United States Patent Application Publication US 2025/0302929 A1 - sequence listing, part 6

SEQ ID NO: 32563 - protein, 188 aa, Artificial Sequence
  Synthetic polypeptide
ICLHLDLGLPSLQNFGKHELTGHKVAVKILNRQKIRSLDVVGKIRREIQNLKLFRHPHIIKLYQVISTPSDIFMVMEYVSGGELFDYICKNGRLDEKESRRLFQQILSGVDYCHRHMVVHRDLKPENVLLDAHMNAKIADFGLSNMMSDGEFLRTSCGSPNYAAPEVISGRDCNIIRILTSQFTNYQH

SEQ ID NO: 32564 - protein, 23 aa, Artificial Sequence
  Synthetic polypeptide
AHNASYKPKEAIDGEQEPADRRM

SEQ ID NO: 32565 - protein, 17 aa, Artificial Sequence
  Synthetic polypeptide
MVSRSQLTDGCNAPEHL

SEQ ID NO: 32566 - protein, 551 aa, Artificial Sequence
  Synthetic polypeptide
QTDVMHQNIYDYIHVDDRQDFCRQLHWAMDPPQVVFGQPPPLETGDDAILGRLLRAQEWGTGTPTEYSAFLTRCFICRVRCLLDSTSGFLTMQFQGKLKFLFGQKKKAPSGAMLPPRLSLFCIAAPVLLPSAAEMKMRSALLRAKPRADTAATADAKVKATTSLCESELHGKPNYSAGRSSRESGVLVLREQTDAGRWAQVPARAPCLCLRGGPDLVLDPKGGSGDREEEQHRMLSRASGVTGRRETPGPTKPLPWTAGKHSEDGARPRLQPSKNDPPSLRPMPRGSCLPCPCVQGTFRNSPISHPPSPSPSAYSSRTSRPMRDVGEDQVHPPLCHFPQRSLQHQLPQPGAQRFATRGYPMEDMKLQGVPMPPGDLCGPTLLLDVSIKMEKDSGCEGAADGCVPSQVWLGASDRSHPATFPTRMHLKTEPDSRQQVYISHLGHGVRGAQPHGRATAGRSRELTPFHPAHCACLEPTDGLPQSEPPHQLCARGRGEQSCTCRAAEAAPVVKREPLDSPQWATHSQGMVPGMLPKSALATLVPPQASGCTFLP

SEQ ID NO: 32567 - protein, 569 aa, Artificial Sequence
  Synthetic polypeptide
QTDVMHQNIYDYIHVDDRQDFCRQLHWAMDPPQVVFGQPPPLETGDDAILGRLLRAQEWGTGTPTEYSAFLTRCFICRVRCLLDSTSGFLARGSQAWQLRLCCPEPLMTMQFQGKLKFLFGQKKKAPSGAMLPPRLSLFCIAAPVLLPSAAEMKMRSALLRAKPRADTAATADAKVKATTSLCESELHGKPNYSAGRSSRESGVLVLREQTDAGRWAQVPARAPCLCLRGGPDLVLDPKGGSGDREEEQHRMLSRASGVTGRRETPGPTKPLPWTAGKHSEDGARPRLQPSKNDPPSLRPMPRGSCLPCPCVQGTFRNSPISHPPSPSPSAYSSRTSRPMRDVGEDQVHPPLCHFPQRSLQHQLPQPGAQRFATRGYPMEDMKLQGVPMPPGDLCGPTLLLDVSIKMEKDSGCEGAADGCVPSQVWLGASDRSHPATFPTRMHLKTEPDSRQQVYISHLGHGVRGAQPHGRATAGRSRELTPFHPAHCACLEPTDGLPQSEPPHQLCARGRGEQSCTCRAAEAAPVVKREPLDSPQWATHSQGMVPGMLPKSALATLVPPQASGCTFLP

SEQ ID NO: 32568 - protein, 11 aa, Artificial Sequence
  Synthetic polypeptide
QTDVMHQNIYD

SEQ ID NO: 32569 - protein, 26 aa, Artificial Sequence
  Synthetic polypeptide
SNCHKDRKPNTACSHRLCLMWTRRKG

SEQ ID NO: 32570 - protein, 35 aa, Artificial Sequence
  Synthetic polypeptide
VHVLCRDMDEAGHHHSDQTVTRTENQTLHVLIGCV

SEQ ID NO: 32571 - protein, 261 aa, Artificial Sequence
  Synthetic polypeptide
GRARWLTPVIPALWETQIDVQLYILSFLSPHDLCQLGSTNHYWNETVRDPILWRYFLLRDLPSWSSVDWKSLPDLEILKKPISEVTDGAFFDYMAVYRMCCPYTRRASKSSRPMYGAVTSFLHSLIIQNEPRFAMFGPGLEELNTSLVLSLMSSEELCPTAGLPQRQIDGIGSGVNFQLNNQHKFNILILYSTTRKERDRAREEHTSAVNKMFSRHNEGDDQQGSRYSVIPQIQKVCEVVDGFIYVANAEAHKSKYSYVHF

SEQ ID NO: 32572 - protein, 37 aa, Artificial Sequence
  Synthetic polypeptide
SQHFGRPRLMYSYIFCPFFHLMICVSWEVQIIIGMKL

SEQ ID NO: 32573 - protein, 17 aa, Artificial Sequence
  Synthetic polypeptide
PGAVAHACNPSTLGDPD

SEQ ID NO: 32574 - protein, 341 aa, Artificial Sequence
  Synthetic polypeptide
GRARWLTPVIPALWETQIDVQLYILSFLSPHDLCQLGSTNHYWNETVRDPILWRYFLLRDLPSWSSVDWKSLPDLEILKKPISEVTDGAFFDYMAVYRMCCPYTRRASKSSRPMYGAVTSFLHSLIIQNEPRFAMFGPGLEELNTSLVLSLMSSEELCPTAGLPQRQIDGIGSGVNFQLNNQHKFNILILYSTTRKERDRAREEHTSAVNKMFSRHNEGDDQQGSRYSVIPQIQKVCEVVDGFIYVANAEAHKRHEWQDEFSHIMAMTDPAFGSSGRPLLVLSCISQGDVKRMPCFYLAHELHLNLLNHPWLVQDTEAETLTGFLNGIEWILEEVESKRAR

SEQ ID NO: 32575 - protein, 108 aa, Artificial Sequence
  Synthetic polypeptide
GRARWLTPVIPALWETQIDVQLYILSFLSPHDLCQLGSTNHYWNETVRDPILWRYFLLRDLPSWSSVDWKSLPDLEILKKPISEVTDGAFFDYMAVRDGVSPCYPGWS

SEQ ID NO: 32576 - protein, 259 aa, Artificial Sequence
  Synthetic polypeptide
GRARWLTPVIPALWETQIDVQLYILSFLSPHDLCQLGSTNHYWNETVRDPILWRYFLLRDLPSWSSVDWKSLPDLEILKKPISEVTDGAFFDYMAVYRMCCPYTRRASKSSRPMYGAVTSFLHSLIIQNEPRFAMFGPGLEELNTSLVLSLMSSEELCPTAGLPQRQIDGIGSGVNFQLNNQHKFNILILYSTTRKERDRAREEHTSAVNKMFSRHNEGDDQQGSRYSVIPQIQKVCEVVDGFIYVANAEAHKSPGYRG

SEQ ID NO: 32577 - protein, 23 aa, Artificial Sequence
  Synthetic polypeptide
GRARWLTPVIPALWETQVGGSRD

SEQ ID NO: 32578 - protein, 257 aa, Artificial Sequence
  Synthetic polypeptide
SQHFGRPRWADHEIDVQLYILSFLSPHDLCQLGSTNHYWNETVRDPILWRYFLLRDLPSWSSVDWKSLPDLEILKKPISEVTDGAFFDYMAVYRMCCPYTRRASKSSRPMYGAVTSFLHSLIIQNEPRFAMFGPGLEELNTSLVLSLMSSEELCPTAGLPQRQIDGIGSGVNFQLNNQHKFNILILYSTTRKERDRAREEHTSAVNKMFSRHNEGDDQQGSRYSVIPQIQKVCEVVDGFIYVANAEAHKSKYSYVHF

SEQ ID NO: 32579 - protein, 51 aa, Artificial Sequence
  Synthetic polypeptide
PGAVAHACNPSTLGDPGGRITRLMYSYIFCPFFHLMICVSWEVQIIIGMKL

SEQ ID NO: 32580 - protein, 337 aa, Artificial Sequence
  Synthetic polypeptide
SQHFGRPRWADHEIDVQLYILSFLSPHDLCQLGSTNHYWNETVRDPILWRYFLLRDLPSWSSVDWKSLPDLEILKKPISEVTDGAFFDYMAVYRMCCPYTRRASKSSRPMYGAVTSFLHSLIIQNEPRFAMFGPGLEELNTSLVLSLMSSEELCPTAGLPQRQIDGIGSGVNFQLNNQHKFNILILYSTTRKERDRAREEHTSAVNKMFSRHNEGDDQQGSRYSVIPQIQKVCEVVDGFIYVANAEAHKRHEWQDEFSHIMAMTDPAFGSSGRPLLVLSCISQGDVKRMPCFYLAHELHLNLLNHPWLVQDTEAETLTGFLNGIEWILEEVESKRAR

SEQ ID NO: 32581 - protein, 104 aa, Artificial Sequence
  Synthetic polypeptide
SQHFGRPRWADHEIDVQLYILSFLSPHDLCQLGSTNHYWNETVRDPILWRYFLLRDLPSWSSVDWKSLPDLEILKKPISEVTDGAFFDYMAVRDGVSPCYPGWS

SEQ ID NO: 32582 - protein, 255 aa, Artificial Sequence
  Synthetic polypeptide
SQHFGRPRWADHEIDVQLYILSFLSPHDLCQLGSTNHYWNETVRDPILWRYFLLRDLPSWSSVDWKSLPDLEILKKPISEVTDGAFFDYMAVYRMCCPYTRRASKSSRPMYGAVTSFLHSLIIQNEPRFAMFGPGLEELNTSLVLSLMSSEELCPTAGLPQRQIDGIGSGVNFQLNNQHKFNILILYSTTRKERDRAREEHTSAVNKMFSRHNEGDDQQGSRYSVIPQIQKVCEVVDGFIYVANAEAHKSPGYRG

SEQ ID NO: 32583 - protein, 277 aa, Artificial Sequence
  Synthetic polypeptide
GRARWLTPVIPALWETQVGGSRGQEIKTILANTIDVQLYILSFLSPHDLCQLGSTNHYWNETVRDPILWRYFLLRDLPSWSSVDWKSLPDLEILKKPISEVTDGAFFDYMAVYRMCCPYTRRASKSSRPMYGAVTSFLHSLIIQNEPRFAMFGPGLEELNTSLVLSLMSSEELCPTAGLPQRQIDGIGSGVNFQLNNQHKFNILILYSTTRKERDRAREEHTSAVNKMFSRHNEGDDQQGSRYSVIPQIQKVCEVVDGFIYVANAEAHKSKYSYVHF

SEQ ID NO: 32584 - protein, 53 aa, Artificial Sequence
  Synthetic polypeptide
SQHFGRPRWADHEVRRSRPSWLTRLMYSYIFCPFFHLMICVSWEVQIIIGMKL

SEQ ID NO: 32585 - protein, 2 aa, Artificial Sequence
  Synthetic polypeptide
HD

SEQ ID NO: 32586 - protein, 357 aa, Artificial Sequence
  Synthetic polypeptide
GRARWLTPVIPALWETQVGGSRGQEIKTILANTIDVQLYILSFLSPHDLCQLGSTNHYWNETVRDPILWRYFLLRDLPSWSSVDWKSLPDLEILKKPISEVTDGAFFDYMAVYRMCCPYTRRASKSSRPMYGAVTSFLHSLIIQNEPRFAMFGPGLEELNTSLVLSLMSSEELCPTAGLPQRQIDGIGSGVNFQLNNQHKFNILILYSTTRKERDRAREEHTSAVNKMFSRHNEGDDQQGSRYSVIPQIQKVCEVVDGFIYVANAEAHKRHEWQDEFSHIMAMTDPAFGSSGRPLLVLSCISQGDVKRMPCFYLAHELHLNLLNHPWLVQDTEAETLTGFLNGIEWILEEVESKRAR

SEQ ID NO: 32587 - protein, 124 aa, Artificial Sequence
  Synthetic polypeptide
GRARWLTPVIPALWETQVGGSRGQEIKTILANTIDVQLYILSFLSPHDLCQLGSTNHYWNETVRDPILWRYFLLRDLPSWSSVDWKSLPDLEILKKPISEVTDGAFFDYMAVRDGVSPCYPGWS

SEQ ID NO: 32588 - protein, 275 aa, Artificial Sequence
  Synthetic polypeptide
GRARWLTPVIPALWETQVGGSRGQEIKTILANTIDVQLYILSFLSPHDLCQLGSTNHYWNETVRDPILWRYFLLRDLPSWSSVDWKSLPDLEILKKPISEVTDGAFFDYMAVYRMCCPYTRRASKSSRPMYGAVTSFLHSLIIQNEPRFAMFGPGLEELNTSLVLSLMSSEELCPTAGLPQRQIDGIGSGVNFQLNNQHKFNILILYSTTRKERDRAREEHTSAVNKMFSRHNEGDDQQGSRYSVIPQIQKVCEVVDGFIYVANAEAHKSPGYRG

SEQ ID NO: 32589 - protein, 9 aa, Artificial Sequence
  Synthetic polypeptide
PPRLSEGKW

SEQ ID NO: 32590 - protein, 29 aa, Artificial Sequence
  Synthetic polypeptide
SLGSHLGYQKENGRNQWKEQYTGYSVGKK

SEQ ID NO: 32591 - protein, 249 aa, Artificial Sequence
  Synthetic polypeptide
PVYPCCIIDHLSVSHLVATSVIRRKMVETNGKNNILDIQLEKSNCLLKVMQAKEVSIKEECATLHNIIKGLQQTIEYQQNLKGENEQLKISADLIKEKLKSHEQEYKNNIAKLVSEMKIKEEGYKKEISKLYQDMQRKVELNEEKHKELIEKKEMEISELNAKLRSQEKEKQNEIIKLQLEFDAKLARVQTKSKSYQDSTVLPQSIYRRKLQHFQEEKNKEIAILRNTIRDLEQRLSVGKDSHLKRRRF

SEQ ID NO: 32592 - protein, 193 aa, Artificial Sequence
  Synthetic polypeptide
PVYPCCIIDHLSVSHLVATSVIRRKMVETNGKNNILDIQLEKSNCLLKVMQAKEVSIKEECATLHNIIKGLQQTIEYQQNLKVELNEEKHKELIEKKEMEISELNAKLRSQEKEKQNEIIKLQLEFDAKLARVQTKSKSYQDSTVLPQSIYRRKLQHFQEEKNKEIAILRNTIRDLEQRLSVGKDSHLKRRRF

SEQ ID NO: 32593 - protein, 30 aa, Artificial Sequence
  Synthetic polypeptide
EQGYSAYATTWMNLEDIMLSEVLVKWPFAI

SEQ ID NO: 32594 - protein, 3 aa, Artificial Sequence
  Synthetic polypeptide
VKC

SEQ ID NO: 32595 - protein, 28 aa, Artificial Sequence
  Synthetic polypeptide
GQEFETSLANMAETPSLLKIQKLARVCS

SEQ ID NO: 32596 - protein, 127 aa, Artificial Sequence
  Synthetic polypeptide
PGSALDKITASLCDLKSRLDSRTGVAPDVFAENMKLREDTHHLVNYIPQGSIDSLFEGTWYLVRVDEKHRRTYARRPTPNDDTLDEGVGLVHSNIATEHIPSPAKKVPRLPATAAEPEAAVISNGEH

SEQ ID NO: 32597 - protein, 18 aa, Artificial Sequence
  Synthetic polypeptide
NPISTKNTKISQGLLLIK

SEQ ID NO: 32598 - protein, 606 aa, Artificial Sequence
  Synthetic polypeptide
GRAQWLMSVMPALWEAEAGRSQGQEFQTSLTNMEQLQRALDFRNSSATCPFLSETIIPSERKKHIFIDITEVRWPSLDTDGTMIYMESGIVKITSLDGHAYLCLPRSQHEFTVHFLCKVSQKSDSSAVLSETNNKAPKDKLVEKTGKICIRGNLPGQRLKNKENEFHCQIMKSKETLKKMSCVNGTEGREELPSPGTKHTCVYTWVKQCWSVAACPEEWKYPLSLALHFHNKISNMSKIDAHITQSRFLTSDISEERGKVVSVLPRALSLSCPVPHLHRWNFCDSLLQRQSDEYSYPELVKMVWYKGVTYRLTHQNMNSIEIYSGDGSVFKSEGAYFGNYFTYYSIQEGSGKREEKTYSVNNLPPDRPGSPFTVGSLIKQATRILQHCVKMRLSLSHNYRICCWKMVPGINDSNILPLVLKESLIPSVGRFLAYSDDKVHAIFLDGITLTLNWNFSSPIEKRQVNQGLNLGWCKLTFPDGQEQLIQIEHPEPYERYVTTVTSWCRRLTQTSPREMPTHSSSSVLQENWSVASELEKIQKFNLLLENSGILNQISNKKNEQQSFDHYKPGSSETLLGEVNENRVSIALKKTSEILHDIDCLLSNSKK

SEQ ID NO: 32599 - protein, 9 aa, Artificial Sequence
  Synthetic polypeptide
PIWSNYSEP

SEQ ID NO: 32600 - protein, 36 aa, Artificial Sequence
  Synthetic polypeptide
GRQISRSGVPDQPDQYGATTASPRFSKLFSYLPFFI

SEQ ID NO: 32601 - protein, 54 aa, Artificial Sequence
  Synthetic polypeptide
KKLFDLPCLIAGLKTLIPESILPHIQNEIHAQRCQEESRQTGLSRANEAPESST

SEQ ID NO: 32602 - protein, 422 aa, Artificial Sequence
  Synthetic polypeptide
RPSFQRASCPISRMKSMLRDAKKNLDRQAFLEQTRPLRAPPSSQDKIPQQNSESAMAKPQVVVAPVLMSKLSVNAPEFYPSGYSSSYTESYEDGCEDYPTLSEYVQDFLNHLTEQPGSFETEIEQFAETLNGCVTTDDALQELVELIYQQATSIPNFSYMGARLCNYLSHHLTISPQSGNFRQLLLQRCRTEYEVKDQAAKGDEVTRKRFHAFVLFLGELYLNLEIKGTNGQVTRADILQVGLRELLNALFSNPMDDNLICAVKLLKLTGSVLEDAWKEKGKMDMEEIIQRIENVVLDANCSRDVKQMLLKLVELRSSNWGRVHATSTYREATPENDPNYFMNEPTFYTSDGVPFTAADPDYQEKYQELLEREDFFPDYEENGTDLSGAGDPYLDDIDDEMDPEIEEAYEKFCLESERKRKQ

SEQ ID NO: 32603 - protein, 373 aa, Artificial Sequence
  Synthetic polypeptide
RPSFQRASCPISRMKSMLRDAKKNLDRQAFLEQTRPLRAPPSSQDKIPQQNSESAMAKPQVVVAPVLMSKLSVNAPEFYPSGYSSSYTESYEDGCEDYPTLSEYVQDFLNHLTEQPGSFETEIEQFAETLNGCVTTDDALQELVELIYQQATSIPNFSYMGARLCNYLSHHLTISPQSGNFRQLLLQRCRTEYEVKDQAAKGDEVTRKRFHAFVLFLGELYLNLEIKGTNGQVTRADILQVGLRELLNALFSNPMDDNLICAVKLLKLTGSVLEDAWKEKGKMDMEEIIQRIENVVLDANCSRDVKQMLLKLVELRSSNWGRVHATSTYREATPENDPNYFMNEPTFYTSDGVPFTAADPDTWMILMMRWTQR

SEQ ID NO: 32604 - protein, 209 aa, Artificial Sequence
  Synthetic polypeptide
RPSFQRASCPISRMKSMLRDAKKNLDRQAFLEQTRPLRAPPSSQDKIPQQNSESAMAKPQVVVAPVLMSKLSVNAPEFYPSGYSSSYTESYEDGCEDYPTLSEYVQDFLNHLTEQPGSFETEIEQFAETLNGCVTTDDALQELVELIYQQATSIPNFSYMGARLCNYLSHHLTISPQSGNFRQLLLQRSREQMDRLQEQIFFRLVFENC

SEQ ID NO: 32605 - protein, 583 aa, Artificial Sequence
  Synthetic polypeptide
SQHFGRPRQADHEARSSRPAWPMRIPSGGDGKTLKFFGQSIHGEMDLNGDGLTDVTIGGLGGAALFWSRDVAVVKVTMNFEPNKVNIQKKNCHMEGKETVCINATVCFDVKLKSKEDTIYEADLQYRVTLDSLRQISRSFFSGTQERKVQRNITVRKSECTKHSFYMLDKHDFQDSVRITLDFNLTDPENGPVLDDSLPNSVHEYIPFAKDCGNKEKCISDLSLHVATTEKDLLIVRSQNDKFNVSLTVKNTKDSAYNTRTIVHYSPNLVFSGIEAIQKDSCESNHNITCKVGYPFLRRGEMVTFKILFQFNTSYLMENVTIYLSATSDSEEPPETLSDNVVNISIPVKYEVGLQFYSSASEYHISIAANETVPEVINSTEDIGNEINIFYLIRKSGSFPMPELKLSISFPNMTSNGYPVLYPTGLSSSENANCRPHIFEDPFSINSGKKMTTSTDHLKRGTILDCNTCKFATITCNLTSSDISQVNVSLILWKPTFIKSYFSSLNLTIRGELRSENASLVLSSSNQKRELAIQISKDGLPGRVPLWVILLSAFAGLLLLMLLILALWKIGFFKRPLKKKMEK

SEQ ID NO: 32606 - protein, 42 aa, Artificial Sequence
  Synthetic polypeptide
MGAVAHACNPSTLGGRGRRIMRPGVRDQPGQCVFHQVGMVRH

SEQ ID NO: 32607 - protein, 18 aa, Artificial Sequence
  Synthetic polypeptide
GQEFETSLANAYSIRWGW

SEQ ID NO: 32608 - protein, 46 aa, Artificial Sequence
  Synthetic polypeptide
ILLFILQIVSGPIPCTGPYLQPASPSEFQISISISHQISPARQSAF

SEQ ID NO: 32609 - protein, 107 aa, Artificial Sequence
  Synthetic polypeptide
NILYFWLLFSSCFSPPFLAALPSSPSQALSLLVFAEFHPESSSSFCRLSLGPFPAQVPISSQPPLLSSRSVFPSATKFLQLDSLHFKLLFGLQCWSPRSKNIFRSFK

SEQ ID NO: 32610 - protein, 1162 aa, Artificial Sequence
  Synthetic polypeptide
TVCILNCCLAYNVGLPEAKIFSGPSSEQFGYAVQQFINPKGNWLLVGSPWSGFPENRMGDVYKCPVDLSTATCEKLNLQTSTSIPNVTEMKTNMSLGLILTRNMGTGGFLTCGPLWAQQCGNQYYTTGVCSDISPDFQLSASFSPATQPCPSLIDVVVVCDESNSIYPWDAVKNFLEKFVQGLDIGPTKTQVGLIQYANNPRVVFNLNTYKTKEEMIVATSQTSQYGGDLTNTFGAIQYARKYAYSAASGGRRSATKVMVVVTDGESHDGSMLKAVIDQCNHDNILRFGIAVLGYLNRNALDTKNLIKEIKAIASIPTERYFFNVSDEAALLEKAGTLGEQIFSIEGTVQGGDNFQMEMSQVGFSADYSSQNDILMLGAVGAFGWSGTIVQKTSHGHLIFPKQAFDQILQDRNHSSYLGYSVAAISTGESTHFVAGAPRANYTGQIVLYSVNENGNITVIQAHRGDQIGSYFGSVLCSVDVDKDTITDVLLVGAPMYMSDLKKEEGRVYLFTIKEGILGQHQFLEGPEGIENTRFGSAIAALSDINMDGFNDVIVGSPLENQNSGAVYIYNGHQGTIRTKYSQKILGSDGAFRSHLQYFGRSLDGYGDLNGDSITDVSIGAFGQVVQLWSQSIADVAIEASFTPEKITLVNKNAQIILKLCFSAKFRPTKQNNQVAIVYNITLDADGFSSRVTSRGLFKENNERCLQKNMVVNQAQSCPEHIIYIQEPSDVVNSLDLRVDISLENPGTSPALEAYSETAKVFSIPFHKDCGEDGLCISDLVLDVRQIPAAQEQPFIVSNQNKRLTFSVTLKNKRESAYNTGIVVDFSENLFFASFSLPVDGTEVTCQVAASQKSVACDVGYPALKREQQVTFTINFDFNLQNLQNQASLSFQALSESQEENKADNLVNLKIPLLYDAEIHLTRSTNINFYEISSDGNVPSIVHSFEDVGPKFIFSLKVTTGSVPVSMATVIIHIPQYTKEKNPLMYLTGVQTDKAGDISCNADINPLKIGQTSSSVSFKSENFRHTKELNCRTASCSNVTCWLKDVHMKGEYFVNVTTRIWNGTFASSTFQTVQLTAAAEINTYNPEIYVIEDNTVTIPLMIMKPDEKAEVPTGVIIGSIIAGILLLLALVAILWKLGFFKRKYEKMTKNPDEIDETTELSS

SEQ ID NO: 32611 - protein, 156 aa, Artificial Sequence
  Synthetic polypeptide
TVCILNCCLAYNVGLPEAKIFSGPSSEQFGYAVQQFINPKGNWLLVGSPWSGFPENRMGDVYKCPVDLSTATCEKLNLQTSTSIPNVTEMKTNMSLGLILTRNMGTGGFLTCGPLWAQQCGNQYYTTGVCSDISPDFQLSASFSPATQRGVNSVCQ

SEQ ID NO: 32612 - protein, 796 aa, Artificial Sequence
  Synthetic polypeptide
TVCILNCCLAYNVGLPEAKIFSGPSSEQFGYAVQQFINPKGNWLLVGSPWSGFPENRMGDVYKCPVDLSTATCEKLNLQTSTSIPNVTEMKTNMSLGLILTRNMGTGGFLTCGPLWAQQCGNQYYTTGVCSDISPDFQLSASFSPATQPCPSLIDVVVVCDESNSIYPWDAVKNFLEKFVQGLDIGPTKTQVGLIQYANNPRVVFNLNTYKTKEEMIVATSQTSQYGGDLTNTFGAIQYARKYAYSAASGGRRSATKVMVVVTDGESHDGSMLKAVIDQCNHDNILRFGIAVLGYLNRNALDTKNLIKEIKAIASIPTERYFFNVSDEAALLEKAGTLGEQIFSIEGTVQGGDNFQMEMSQVGFSADYSSQNDILMLGAVGAFGWSGTIVQKTSHGHLIFPKQAFDQILQDRNHSSYLGYSVAAISTGESTHFVAGAPRANYTGQIVLYSVNENGNITVIQAHRGDQIGSYFGSVLCSVDVDKDTITDVLLVGAPMYMSDLKKEEGRVYLFTIKEGILGQHQFLEGPEGIENTRFGSAIAALSDINMDGFNDVIVGSPLENQNSGAVYIYNGHQGTIRTKYSQKILGSDGAFRSHLQYFGRSLDGYGDLNGDSITDVSIGAFGQVVQLWSQSIADVAIEASFTPEKITLVNKNAQIILKLCFSAKFRPTKQNNQVAIVYNITLDADGFSSRVTSRGLFKENNERCLQKNMVVNQAQSCPEHIIYIQEPSDVVNSLDLRVDISLENPGTSPALEAYSETAKVFSIPFHKDCGEDGLCISDLVLDVRQIPAAQLMGQK

SEQ ID NO: 32613 - protein, 622 aa, Artificial Sequence
  Synthetic polypeptide
TVCILNCCLAYNVGLPEAKIFSGPSSEQFGYAVQQFINPKGNWLLVGSPWSGFPENRMGDVYKCPVDLSTATCEKLNLQTSTSIPNVTEMKTNMSLGLILTRNMGTGGFLTCGPLWAQQCGNQYYTTGVCSDISPDFQLSASFSPATQPCPSLIDVVVVCDESNSIYPWDAVKNFLEKFVQGLDIGPTKTQVGLIQYANNPRVVFNLNTYKTKEEMIVATSQTSQYGGDLTNTFGAIQYARKYAYSAASGGRRSATKVMVVVTDGESHDGSMLKAVIDQCNHDNILRFGIAVLGYLNRNALDTKNLIKEIKAIASIPTERYFFNVSDEAALLEKAGTLGEQIFSIEGTVQGGDNFQMEMSQVGFSADYSSQNDILMLGAVGAFGWSGTIVQKTSHGHLIFPKQAFDQILQDRNHSSYLGYSVAAISTGESTHFVAGAPRANYTGQIVLYSVNENGNITVIQAHRGDQIGSYFGSVLCSVDVDKDTITDVLLVGAPMYMSDLKKEEGRVYLFTIKEGILGQHQFLEGPEGIENTRFGSAIAALSDINMDGFNDVIVGSPLENQNSGAVYIYNGHQGTIRTKYSQLLCTIISCQTCSFRKSWDPMEPLGAISSTLGGPWMAMEI

SEQ ID NO: 32614 - protein, 923 aa, Artificial Sequence
  Synthetic polypeptide
TVCILNCCLAYNVGLPEAKIFSGPSSEQFGYAVQQFINPKGNWLLVGSPWSGFPENRMGDVYKCPVDLSTATCEKLNLQTSTSIPNVTEMKTNMSLGLILTRNMGTGGFLTCGPLWAQQCGNQYYTTGVCSDISPDFQLSASFSPATQPCPSLIDVVVVCDESNSIYPWDAVKNFLEKFVQGLDIGPTKTQVGLIQYANNPRVVFNLNTYKTKEEMIVATSQTSQYGGDLTNTFGAIQYARKYAYSAASGGRRSATKVMVVVTDGESHDGSMLKAVIDQCNHDNILRFGIAVLGYLNRNALDTKNLIKEIKAIASIPTERYFFNVSDEAALLEKAGTLGEQIFSIEGTVQGGDNFQMEMSQVGFSADYSSQNDILMLGAVGAFGWSGTIVQKTSHGHLIFPKQAFDQILQDRNHSSYLGYSVAAISTGESTHFVAGAPRANYTGQIVLYSVNENGNITVIQAHRGDQIGSYFGSVLCSVDVDKDTITDVLLVGAPMYMSDLKKEEGRVYLFTIKEGILGQHQFLEGPEGIENTRFGSAIAALSDINMDGFNDVIVGSPLENQNSGAVYIYNGHQGTIRTKYSQKILGSDGAFRSHLQYFGRSLDGYGDLNGDSITDVSIGAFGQVVQLWSQSIADVAIEASFTPEKITLVNKNAQIILKLCFSAKFRPTKQNNQVAIVYNITLDADGFSSRVTSRGLFKENNERCLQKNMVVNQAQSCPEHIIYIQEPSDVVNSLDLRVDISLENPGTSPALEAYSETAKVFSIPFHKDCGEDGLCISDLVLDVRQIPAAQEQPFIVSNQNKRLTFSVTLKNKRESAYNTGIVVDFSENLFFASFSLPVDGTEVTCQVAASQKSVACDVGYPALKREQQVTFTINFDFNLQNLQNQASLSFQALSESQEENKADNLVNLKIPLLYDAEIHLTR

SEQ ID NO: 32615 - protein, 1175 aa, Artificial Sequence
  Synthetic polypeptide
QTNTETENQTQHVLTRILNCCLAYNVGLPEAKIFSGPSSEQFGYAVQQFINPKGNWLLVGSPWSGFPENRMGDVYKCPVDLSTATCEKLNLQTSTSIPNVTEMKTNMSLGLILTRNMGTGGFLTCGPLWAQQCGNQYYTTGVCSDISPDFQLSASFSPATQPCPSLIDVVVVCDESNSIYPWDAVKNFLEKFVQGLDIGPTKTQVGLIQYANNPRVVFNLNTYKTKEEMIVATSQTSQYGGDLTNTFGAIQYARKYAYSAASGGRRSATKVMVVVTDGESHDGSMLKAVIDQCNHDNILRFGIAVLGYLNRNALDTKNLIKEIKAIASIPTERYFFNVSDEAALLEKAGTLGEQIFSIEGTVQGGDNFQMEMSQVGFSADYSSQNDILMLGAVGAFGWSGTIVQKTSHGHLIFPKQAFDQILQDRNHSSYLGYSVAAISTGESTHFVAGAPRANYTGQIVLYSVNENGNITVIQAHRGDQIGSYFGSVLCSVDVDKDTITDVLLVGAPMYMSDLKKEEGRVYLFTIKEGILGQHQFLEGPEGIENTRFGSAIAALSDINMDGFNDVIVGSPLENQNSGAVYIYNGHQGTIRTKYSQKILGSDGAFRSHLQYFGRSLDGYGDLNGDSITDVSIGAFGQVVQLWSQSIADVAIEASFTPEKITLVNKNAQIILKLCFSAKFRPTKQNNQVAIVYNITLDADGFSSRVTSRGLFKENNERCLQKNMVVNQAQSCPEHIIYIQEPSDVVNSLDLRVDISLENPGTSPALEAYSETAKVFSIPFHKDCGEDGLCISDLVLDVRQIPAAQEQPFIVSNQNKRLTFSVTLKNKRESAYNTGIVVDFSENLFFASFSLPVDGTEVTCQVAASQKSVACDVGYPALKREQQVTFTINFDFNLQNLQNQASLSFQALSESQEENKADNLVNLKIPLLYDAEIHLTRSTNINFYEISSDGNVPSIVHSFEDVGPKFIFSLKVTTGSVPVSMATVIIHIPQYTKEKNPLMYLTGVQTDKAGDISCNADINPLKIGQTSSSVSFKSENFRHTKELNCRTASCSNVTCWLKDVHMKGEYFVNVTTRIWNGTFASSTFQTVQLTAAAEINTYNPEIYVIEDNTVTIPLMIMKPDEKAEVPTGVIIGSIIAGILLLLALVAILWKLGFFKRKYEKMTKNPDEIDETTELSS

SEQ ID NO: 32616 - protein, 17 aa, Artificial Sequence
  Synthetic polypeptide
KLTQKQKTKHSMFSLAF

SEQ ID NO: 32617 - protein, 36 aa, Artificial Sequence
  Synthetic polypeptide
HRNRKPNTACSHSHFKLLFGLQCWSPRSKNIFRSFK

SEQ ID NO: 32618 - protein, 169 aa, Artificial Sequence
  Synthetic polypeptide
QTNTETENQTQHVLTRILNCCLAYNVGLPEAKIFSGPSSEQFGYAVQQFINPKGNWLLVGSPWSGFPENRMGDVYKCPVDLSTATCEKLNLQTSTSIPNVTEMKTNMSLGLILTRNMGTGGFLTCGPLWAQQCGNQYYTTGVCSDISPDFQLSASFSPATQRGVNSVCQ

SEQ ID NO: 32619 - protein, 809 aa, Artificial Sequence
  Synthetic polypeptide
QTNTETENQTQHVLTRILNCCLAYNVGLPEAKIFSGPSSEQFGYAVQQFINPKGNWLLVGSPWSGFPENRMGDVYKCPVDLSTATCEKLNLQTSTSIPNVTEMKTNMSLGLILTRNMGTGGFLTCGPLWAQQCGNQYYTTGVCSDISPDFQLSASFSPATQPCPSLIDVVVVCDESNSIYPWDAVKNFLEKFVQGLDIGPTKTQVGLIQYANNPRVVFNLNTYKTKEEMIVATSQTSQYGGDLTNTFGAIQYARKYAYSAASGGRRSATKVMVVVTDGESHDGSMLKAVIDQCNHDNILRFGIAVLGYLNRNALDTKNLIKEIKAIASIPTERYFFNVSDEAALLEKAGTLGEQIFSIEGTVQGGDNFQMEMSQVGFSADYSSQNDILMLGAVGAFGWSGTIVQKTSHGHLIFPKQAFDQILQDRNHSSYLGYSVAAISTGESTHFVAGAPRANYTGQIVLYSVNENGNITVIQAHRGDQIGSYFGSVLCSVDVDKDTITDVLLVGAPMYMSDLKKEEGRVYLFTIKEGILGQHQFLEGPEGIENTRFGSAIAALSDINMDGFNDVIVGSPLENQNSGAVYIYNGHQGTIRTKYSQKILGSDGAFRSHLQYFGRSLDGYGDLNGDSITDVSIGAFGQVVQLWSQSIADVAIEASFTPEKITLVNKNAQIILKLCFSAKFRPTKQNNQVAIVYNITLDADGFSSRVTSRGLFKENNERCLQKNMVVNQAQSCPEHIIYIQEPSDVVNSLDLRVDISLENPGTSPALEAYSETAKVFSIPFHKDCGEDGLCISDLVLDVRQIPAAQLMGQK

SEQ ID NO: 32620 - protein, 635 aa, Artificial Sequence
  Synthetic polypeptide
QTNTETENQTQHVLTRILNCCLAYNVGLPEAKIFSGPSSEQFGYAVQQFINPKGNWLLVGSPWSGFPENRMGDVYKCPVDLSTATCEKLNLQTSTSIPNVTEMKTNMSLGLILTRNMGTGGFLTCGPLWAQQCGNQYYTTGVCSDISPDFQLSASFSPATQPCPSLIDVVVVCDESNSIYPWDAVKNFLEKFVQGLDIGPTKTQVGLIQYANNPRVVFNLNTYKTKEEMIVATSQTSQYGGDLTNTFGAIQYARKYAYSAASGGRRSATKVMVVVTDGESHDGSMLKAVIDQCNHDNILRFGIAVLGYLNRNALDTKNLIKEIKAIASIPTERYFFNVSDEAALLEKAGTLGEQIFSIEGTVQGGDNFQMEMSQVGFSADYSSQNDILMLGAVGAFGWSGTIVQKTSHGHLIFPKQAFDQILQDRNHSSYLGYSVAAISTGESTHFVAGAPRANYTGQIVLYSVNENGNITVIQAHRGDQIGSYFGSVLCSVDVDKDTITDVLLVGAPMYMSDLKKEEGRVYLFTIKEGILGQHQFLEGPEGIENTRFGSAIAALSDINMDGFNDVIVGSPLENQNSGAVYIYNGHQGTIRTKYSQLLCTIISCQTCSFRKSWDPMEPLGAISSTLGGPWMAMEI

SEQ ID NO: 32621 - protein, 936 aa, Artificial Sequence
  Synthetic polypeptide
QTNTETENQTQHVLTRILNCCLAYNVGLPEAKIFSGPSSEQFGYAVQQFINPKGNWLLVGSPWSGFPENRMGDVYKCPVDLSTATCEKLNLQTSTSIPNVTEMKTNMSLGLILTRNMGTGGFLTCGPLWAQQCGNQYYTTGVCSDISPDFQLSASFSPATQPCPSLIDVVVVCDESNSIYPWDAVKNFLEKFVQGLDIGPTKTQVGLIQYANNPRVVFNLNTYKTKEEMIVATSQTSQYGGDLTNTFGAIQYARKYAYSAASGGRRSATKVMVVVTDGESHDGSMLKAVIDQCNHDNILRFGIAVLGYLNRNALDTKNLIKEIKAIASIPTERYFFNVSDEAALLEKAGTLGEQIFSIEGTVQGGDNFQMEMSQVGFSADYSSQNDILMLGAVGAFGWSGTIVQKTSHGHLIFPKQAFDQILQDRNHSSYLGYSVAAISTGESTHFVAGAPRANYTGQIVLYSVNENGNITVIQAHRGDQIGSYFGSVLCSVDVDKDTITDVLLVGAPMYMSDLKKEEGRVYLFTIKEGILGQHQFLEGPEGIENTRFGSAIAALSDINMDGFNDVIVGSPLENQNSGAVYIYNGHQGTIRTKYSQKILGSDGAFRSHLQYFGRSLDGYGDLNGDSITDVSIGAFGQVVQLWSQSIADVAIEASFTPEKITLVNKNAQIILKLCFSAKFRPTKQNNQVAIVYNITLDADGFSSRVTSRGLFKENNERCLQKNMVVNQAQSCPEHIIYIQEPSDVVNSLDLRVDISLENPGTSPALEAYSETAKVFSIPFHKDCGEDGLCISDLVLDVRQIPAAQEQPFIVSNQNKRLTFSVTLKNKRESAYNTGIVVDFSENLFFASFSLPVDGTEVTCQVAASQKSVACDVGYPALKREQQVTFTINFDFNLQNLQNQASLSFQALSESQEENKADNLVNLKIPLLYDAEIHLTR

SEQ ID NO: 32622 - protein, 99 aa, Artificial Sequence
  Synthetic polypeptide
MTLFSHFRWYFWGTRPKVEVLYFAKSAEITGVRSETISVPQEIKALQLWKEIETRHPGLADVRNQIIFAVRQEYVELGDQLLVLQPGDEIAVIPPISGG

SEQ ID NO: 32623 - protein, 27 aa, Artificial Sequence
  Synthetic polypeptide
LCFRISGGTSGEPGLRLKYCILQKVLK

SEQ ID NO: 32624 - protein, 129 aa, Artificial Sequence
  Synthetic polypeptide
GLPSHASCTACQTDITTLTGVPEEHIKTRKVRIFVPARNNMQSGVNNTKKWKMEFDTRERWENPLMGWASTADPLSNMVLTFSTKEDAVSFAEKNGWSYDIEERKVPKPKSKSYGANFSWNKRTRVSTK

SEQ ID NO: 32625 - protein, 21 aa, Artificial Sequence
  Synthetic polypeptide
KLSEASPAMLLVQPAKLISLL

SEQ ID NO: 32626 - protein, 28 aa, Artificial Sequence
  Synthetic polypeptide
GLPSHASCTACQTDITTLTGVPEEHIKT

SEQ ID NO: 32627 - protein, 74 aa, Artificial Sequence
  Synthetic polypeptide
GLPSHASCTACQTDITTLTGVPEEHIKTRKVRIFVPARNNMQSGVNNTKKWKMEFDTRERWENPLMGWASTMEL

SEQ ID NO: 32628 - protein, 14 aa, Artificial Sequence
  Synthetic polypeptide
ILGCTSCRRGLFTT

SEQ ID NO: 32629 - protein, 931 aa, Artificial Sequence
  Synthetic polypeptide
SWVALPAEEDYLPLKPRVGKAAKEYPFILDAFQREAIQCVDNNQSVLVSAHTSAGKTVCAEYAIALALREKQRVIFTSPIKALSNQKYREMYEEFQDVGLMTGDVTINPTASCLVMTTEILRSMLYRGSEVMREVAWVIFDEIHYMRDSERGVVWEETIILLPDNVHYVFLSATIPNARQFAEWICHLHKQPCHVIYTDYRPTPLQHYIFPAGGDGLHLVVDENGDFREDNFNTAMQVLRDAGDLAKGDQKGRKGGTKGPSNVFKIVKMIMERNFQPVIIFSFSKKDCEAYALQMTKLDFNTDEEKKMVEEVFSNAIDCLSDEDKKLPQVEHVLPLLKRGIGIHHGGLLPILKETIEILFSEGLIKALFATETFAMGINMPARTVLFTNARKFDGKDFRWISSGEYIQMSGRAGRRGMDDRGIVILMVDEKMSPTIGKQLLKGSADPLNSAFHLTYNMVLNLLRVEEINPEYMLEKSFYQFQHYRAIPGVVEKVKNSEEQYNKIVIPNEESVVIYYKIRQQLAKLGKEIEEYIHKPKYCLPFLQPGRLVKVKNEGDDFGWGVVVNFSKKSNVKPNSGELDPLYVVEVLLRCSKESLKNSATEAAKPAKPDEKGEMQVVPVLVHLLSAISSVRLYIPKDLRPVDNRQSVLKSIQEVQKRFPDGIPLLDPIDDMGIQDQGLKKVIQKVEAFEHRMYSHPLHNDPNLETVYTLCEKKAQIAIDIKSAKRELKKARTVLQMDELKCRKRVLRRLGFATSSDVIEMKGRVACEISSADELLLTEMMFNGLFNDLSAEQATALLSCFVFQENSSEMPKLTEQLAGPLRQMQECAKRIAKVSAEAKLEIDEETYLSSFKPHLMDVVYTWATGATFAHICKMTDVFEGSIIRCMRRLEELLRQMCQAAKAIGNTELENKFAEGITKIKRDIVFAASLYL

SEQ ID NO: 32630 - protein, 46 aa, Artificial Sequence
  Synthetic polypeptide
LGLHFLQKRIIYHLNHELEKLLRNTRSFLMLFKERPFSVLTIISLF

SEQ ID NO: 32631 - protein, 47 aa, Artificial Sequence
  Synthetic polypeptide
SWVALPAEEDYLPLKPRVGKAAKEYPFILDAFQREAIQCVDNNQSVL

SEQ ID NO: 32632 - protein, 142 aa, Artificial Sequence
  Synthetic polypeptide
HAEQCPHKGSTWRIKELWPVMDKWIKYRKGHANIAYTPDIIIASILRLIGRLGQLGLKEGFPSAVKNISSVIGMFIQHAHDEDIPWGIQLAAVYALCDLSPSNPAEISKILEAWRREASKSVPSAIVSCLEEVSALSTEELG

SEQ ID NO: 32633 - protein, 67 aa, Artificial Sequence
  Synthetic polypeptide
PYHIFLLYFSLVPVTSFCSILLLSSLSPVEMTLEGRRVALVGLWRIPSMRNSAHTRGAPGELRSCGL

SEQ ID NO: 32634 - protein, 11 aa, Artificial Sequence
  Synthetic polypeptide
KYKKLASISVH

SEQ ID NO: 32635 - protein, 227 aa, Artificial Sequence
  Synthetic polypeptide
PAFQCIEVMQACVAEDQLVVKWQSSALDVNTWMIEWFPDVDSEPTTLSWESVSQATNWTIQQDKLKPFWCYNISVYPMLHDKVGEPYSIQAYAKEGVPSEGPETKVENIGVKTVTITWKEIPKSERKGIICNYTIFYQAEGGKGFCKHAHSEVEKNPKPQIDAMDRPVVGMAPPSHCDLQPGMNHLASLNLSENGAKSTHLLGFWGLNESEVTVPERRVLRKWKELL

SEQ ID NO: 32636 - protein, 36 aa, Artificial Sequence
  Synthetic polypeptide
DQPGQHGETPSLLKIQKISQHFSALRSCRPALLRTS

SEQ ID NO: 32637 - protein, 326 aa, Artificial Sequence
  Synthetic polypeptide
PAFQCIEVMQACVAEDQLVVKWQSSALDVNTWMIEWFPDVDSEPTTLSWESVSQATNWTIQQDKLKPFWCYNISVYPMLHDKVGEPYSIQAYAKEGVPSEGPETKVENIGVKTVTITWKEIPKSERKGIICNYTIFYQAEGGKGFSKTVNSSILQYGLESLKRKTSYIVQVMASTSAGGTNGTSINFKTLSFSVFEIILITSLIGGGLLILIILTVAYGLKKPNKLTHLCWPTVPNPAESSIATWHGDDFKDKLNLKESDDSVNTEDRILKPCSTPSDKLVIDKLVVNFGNVLQEIFTDEARTGQENNLGGEKNGTRILSSCPTSI

SEQ ID NO: 32638 - protein, 409 aa, Artificial Sequence
  Synthetic polypeptide
PAFQCIEVMQACVAEDQLVVKWQSSALDVNTWMIEWFPDVDSEPTTLSWESVSQATNWTIQQDKLKPFWCYNISVYPMLHDKVGEPYSIQAYAKEGVPSEGPETKVENIGVKTVTITWKEIPKSERKGIICNYTIFYQAEGGKGFSKTVNSSILQYGLESLKRKTSYIVQVMASTSAGGTNGTSINFKTLSFSVFEIILITSLIGGGLLILIILTVAYGLKKPNKLTHLCWPTVPNPAESSIATWHGDDFKDKLNLKESDDSVNTEDRILKPCSTPSDKLVIDKLVVNFGNVLQEIFTDEARTGQENNLGGEKNGYVTCPFRPDCPLGKSFEELPVSPEIPPRKSQYLRSRMPEGTRPEAKEQLLFSGQSLVPDHLCEEGAPNPYLKNSVTAREFLVSEKLPEHTKGEV

SEQ ID NO: 32639 - protein, 112 aa, Artificial Sequence
  Synthetic polypeptide
PTVGVLNQNLREGGDLPSVTDIRRPRLYLLQWLKSDKALMMLFNDGTFQVNFYHDHTKIIICSQNEEYLLTYINEDRISTTFRLTTLLMSGCSSELKNRMEYALNMLLQRCN

SEQ ID NO: 32640 - protein, 26 aa, Artificial Sequence
  Synthetic polypeptide
IRISGRVEICLVLLIFEDLGSTSFSG

SEQ ID NO: 32641 - protein, 22 aa, Artificial Sequence
  Synthetic polypeptide
KQILLTYRWCTESESPGGWRSA

SEQ ID NO: 32642 - protein, 738 aa, Artificial Sequence
  Synthetic polypeptide
KLCEASEETLHSSNEEEDPFRGMEPYLVRRLSCRNIQLPPLAFRQLEQADLKSESENIQRPTSLPLKILPLIAITSAESSGFDVDNGTSAGRSPLDPMTSPGSGLILQANFVHSQRRESFLYRSDSDYDLSPKSMSRNSSIASDIHGDDLIVTPFAQVLASLRTVRNNFAALTNLQDRAPSKRSPMCNQPSINKATITEEAYQKLASETLEELDWCLDQLETLQTRHSVSEMASNKFKRMLNRELTHLSEMSRSGNQVSEFISNTFLDKQHEVEIPSPTQKEKEKKKRPMSQISGVKKLMHSSSLTNSSIPRFGVKTEQEDVLAKELEDVNKWGLHVFRIAELSGNRPLTVIMHTIFQERDLLKTFKIPVDTLITYLMTLEDHYHADVAYHNNIHAADVVQSTHVLLSTPALEAVFTDLEILAAIFASAIHDVDHPGVSNQFLINTNSELALMYNDSSVLENHHLAVGFKLLQEENCDIFQNLTKKQRQSLRKMVIDIVLATDMSKHMNLLADLKTMVETKKVTSSGVLLLDNYSDRIQVLQNMVHCADLSNPTKPLQLYRQWTDRIMEEFFRQGDRERERGMEISPMCDKHNASVEKSQVGFIDYIVHPLWETWADLVHPDAQDILDTLEDNREWYQSTIPQSPSPAPDDPEEGRQGQTEKFQFELTLEEDGESDTEKDSGSQVEEDTSCSDSKTLCTQDSESTEIPLDEQVEEEAVGEEEESQPEACVIDDRSPDT

SEQ ID NO: 32643 - protein, 62 aa, Artificial Sequence
  Synthetic polypeptide
ETLSSPEFLILRNCVRPLRKHYIPVMKRKTLSAEWNPILSGDFHVAIFSFPLSPSDSWNKLT

SEQ ID NO: 32644 - protein, 71 aa, Artificial Sequence
  Synthetic polypeptide
KLCEASEETLHSSNEEEDPFRGMEPYLVRRLSCRNIQLPPLAFRQLEQADLKSESENIQRPTSLPLKILPL

SEQ ID NO: 32645 - protein, 64 aa, Artificial Sequence
  Synthetic polypeptide
KLCEASEETLHSSNEEEDPFRGMEPYLVRRLSCRNIQLPPLAFRQLEQADLKSESENIQRPTSL

SEQ ID NO: 32646 - protein, 792 aa, Artificial Sequence
  Synthetic polypeptide
KLWLLSWLQFLFLQSLTLEAASCQLTKTLKQPMEEGHMVKYGGLQPTVSKELRQVNNHASEETLHSSNEEEDPFRGMEPYLVRRLSCRNIQLPPLAFRQLEQADLKSESENIQRPTSLPLKILPLIAITSAESSGFDVDNGTSAGRSPLDPMTSPGSGLILQANFVHSQRRESFLYRSDSDYDLSPKSMSRNSSIASDIHGDDLIVTPFAQVLASLRTVRNNFAALTNLQDRAPSKRSPMCNQPSINKATITEEAYQKLASETLEELDWCLDQLETLQTRHSVSEMASNKFKRMLNRELTHLSEMSRSGNQVSEFISNTFLDKQHEVEIPSPTQKEKEKKKRPMSQISGVKKLMHSSSLTNSSIPRFGVKTEQEDVLAKELEDVNKWGLHVFRIAELSGNRPLTVIMHTIFQERDLLKTFKIPVDTLITYLMTLEDHYHADVAYHNNIHAADVVQSTHVLLSTPALEAVFTDLEILAAIFASAIHDVDHPGVSNQFLINTNSELALMYNDSSVLENHHLAVGFKLLQEENCDIFQNLTKKQRQSLRKMVIDIVLATDMSKHMNLLADLKTMVETKKVTSSGVLLLDNYSDRIQVLQNMVHCADLSNPTKPLQLYRQWTDRIMEEFFRQGDRERERGMEISPMCDKHNASVEKSQVGFIDYIVHPLWETWADLVHPDAQDILDTLEDNREWYQSTIPQSPSPAPDDPEEGRQGQTEKFQFELTLEEDGESDTEKDSGSQVEEDTSCSDSKTLCTQDSESTEIPLDEQVEEEAVGEEEESQPEACVIDDRSPDT

SEQ ID NO: 32647 - protein, 52 aa, Artificial Sequence
  Synthetic polypeptide
DKSTTMPLRKHYIPVMKRKTLSAEWNPILSGDFHVAIFSFPLSPSDSWNKLT

SEQ ID NO: 32648 - protein, 38 aa, Artificial Sequence
  Synthetic polypeptide
LSTHKDTQAAYGRRPHGKIWRPPANSQQGTETSQQPCL

SEQ ID NO: 32649 - protein, 125 aa, Artificial Sequence
  Synthetic polypeptide
KLWLLSWLQFLFLQSLTLEAASCQLTKTLKQPMEEGHMVKYGGLQPTVSKELRQVNNHASEETLHSSNEEEDPFRGMEPYLVRRLSCRNIQLPPLAFRQLEQADLKSESENIQRPTSLPLKILPL

SEQ ID NO: 32650 - protein, 118 aa, Artificial Sequence
  Synthetic polypeptide
KLWLLSWLQFLFLQSLTLEAASCQLTKTLKQPMEEGHMVKYGGLQPTVSKELRQVNNHASEETLHSSNEEEDPFRGMEPYLVRRLSCRNIQLPPLAFRQLEQADLKSESENIQRPTSL

SEQ ID NO: 32651 - protein, 54 aa, Artificial Sequence
  Synthetic polypeptide
ADAGTMFLVHSAEPGMRPWSFFVLRCRYGNIAVVSRAMSIVSQRPKLWIGCMSC

SEQ ID NO: 32652 - protein, 25 aa, Artificial Sequence
  Synthetic polypeptide
KLPEASPETEQMLAPCFLYTLQNLE

SEQ ID NO: 32653 - protein, 577 aa, Artificial Sequence
  Synthetic polypeptide
VHVRSDCLKVWHPVPHSLLFPPCCVMCLLLPASASPSALNKSFLRPHQKLSRCWHHVSCTLCRTWNETVELFRAKMPLRKHRCRFKSYEHCFTAAEAVDWLHELLRCSQNFGPEVTRKQTVQLLKKFLKNHVIEDIKGKWGEEDFEDNRHLYRFPPSSPLKPYPKKPPNQKDVIKFPEWNDLPPGTSQENIPVRPVVMNSEMWYKRHSIAIGEVPACRLVHRRQLTEANVEEIWKSMTLSYLQKILGLDSLEEVLDVKLVNSKFIIHNVYSVSKQGVVILDDKSKELPHWVLSAMKCLANWPNCSDLKQPMYLGFEKDVFKTIADYYGHLKEPLLTFHLFDAFVSVLGLLQKEKVAVEAFQICCLLLPPENRRKLQLLMRMMARICLNKEMPPLCDGFGTRTLMVQTFSRCILCSKDEVDLDELLAARLVTFLMDNYQEILKVPLALQTSIEERVAHLRRVQIKYPGADMDITLSAPSFCRQISPEEFEYQRSYGSQEPLAALLEEVITDAKLSNKEKKKKLKQFQKSYPEVYQERFPTPESAALLFPEKPKPKPQLLMWALKKPFQPFQRTRSFRM

SEQ ID NO: 32654 - protein, 515 aa, Artificial Sequence
  Synthetic polypeptide
VHVRSDCLKVWHPVPHSLLFPPCCVMCLLLPASASPSALNKSFLRPHQKLSRCWHHVSCTLCRTWNETVELFRAKMPLRKHRCRFKSYEHCFTAAEAVDWLHELLRCSQNFGPEVTRKQTVQLLKKFLKNHVIEDIKGKWGEEDFEDNRHLYRFPPSSPLKPYPKKPPNQKDVIKFPEWNDLPPGTSQENIPVRPVVMNSEMWYKRHSIAIGEVPACRLVHRRQLTEANVEEIWKSMTLSYLQKILGLDSLEEVLDVKLVNSKFIIHNVYSVSKQGVVILDDKSKELPHWVLSAMKCLANWPNCSDLKQPMYLGFEKDVFKTIADYYGHLKEPLLTFHLFDAFVSVLGLLQKEKVAVEAFQICCLLLPPENRRKLQLLMRMMARICLNKEMPPLCDGFGTRTLMVQTFSRCILCSKDEVDLDELLAARLVTFLMDNYQEILKVPLALQTSIEERVAHLRRVQFQKSYPEVYQERFPTPESAALLFPEKPKPKPQLLMWALKKPFQPFQRTRSFRM

SEQ ID NO: 32655 - protein, 17 aa, Artificial Sequence
  Synthetic polypeptide
ADAGTMFLVHSAEPFYF

SEQ ID NO: 32656 - protein, 36 aa, Artificial Sequence
  Synthetic polypeptide
KLPEASPETEQMLAPCFLYTLQNLSIFEAGCSGSLL

SEQ ID NO: 32657 - protein, 84 aa, Artificial Sequence
  Synthetic polypeptide
VHVRSDCLKVWHPVPHSLLFPPCCVMCLLLPASASPSALNKSFLRPHQKLSRCWHHVSCTLCRTFLFLRPGAVAHSCNSSTLGG

SEQ ID NO: 32658 - protein, 66 aa, Artificial Sequence
  Synthetic polypeptide
LFLTRADGFIIVWHFPCWHSFSLLPLHEEVPSAVIVSFLTSPRPCRTIQELKIGSSCPRLCHKPSS

SEQ ID NO: 32659 - protein, 11 aa, Artificial Sequence
  Synthetic polypeptide
RLPGHAELSKS

SEQ ID NO: 32660 - protein, 279 aa, Artificial Sequence
  Synthetic polypeptide
RGAFCCDCKFPDVSQAMQNYPRVEDWLLMSSPLPQTILLGFYVYFVTSLGPKLMENRKPFELKKAMITYNFFIVLFSVYMCYEFVMSGWGIGYSFRCDIVDYSRSPTALRMARTCWLYYFSKFIELLDTIFFVLRKKNSQVTFLHVFHHTIMPWTWWFGVKFAAGGLGTFHALLNTAVHVVMYSYYGLSALGPAYQKYLWWKKYLTSLQLVQFVIVAIHISQFFFMEDCKYQFPVFACIIMSYSFMFLLLFLHFWYRAYTKGQRLPKTVKNGTCKNKDN

SEQ ID NO: 32661 - protein, 69 aa, Artificial Sequence
  Synthetic polypeptide
RGAFCCDCKFPDVSQAMQNYPRVEDWLLMSSPLPQTILLGFYVYFVTSLGPKLMENRKPFELKKAMITL

SEQ ID NO: 32662 - protein, 163 aa, Artificial Sequence
  Synthetic polypeptide
RGAFCCDCKFPDVSQAMQNYPRVEDWLLMSSPLPQTILLGFYVYFVTSLGPKLMENRKPFELKKAMITYNFFIVLFSVYMCYEFVMSGWGIGYSFRCDIVDYSRSPTALRMARTCWLYYFSKFIELLDTIFFVLRKKNSQVTFLHVFHHTIMPWTWWFGVKFA

SEQ ID NO: 32663 - protein, 86 aa, Artificial Sequence
  Synthetic polypeptide
RGAFCCDCKFPDVSQAMQNYPRVEDWLLMSSPLPQTILLGFYVYFVTSLGPKLMENRKPFELKKAMITYNFFIVLFSVYMCYEILF

SEQ ID NO: 32664 - protein, 132 aa, Artificial Sequence
  Synthetic polypeptide
GQARSLTPVIPALWEAEVNYGKVCNNSKKGLKFTVSCGCSSEFVFVPYGSTIAVYTVYSGEQITMLKGHYKTVDCCVFQSNFQELYSGSRDCNILAWVPSLYEPVPDDDETTTKSQLNPAFEDAWSSSDEEG

SEQ ID NO: 32665 - protein, 8 aa, Artificial Sequence
  Synthetic polypeptide
SQHFGRRR

SEQ ID NO: 32666 - protein, 23 aa, Artificial Sequence
  Synthetic polypeptide
PGTVAHTCNPSTLGGGGELWKSL

SEQ ID NO: 32667 - protein, 57 aa, Artificial Sequence
  Synthetic polypeptide
FQIQKGRINCQQHKNSETVVLISHSLGINQRMKSFNQNDKRDSNLRIDACYQVVQMV

SEQ ID NO: 32668 - protein, 16 aa, Artificial Sequence
  Synthetic polypeptide
GLTHVIRWFRWCDCTL

SEQ ID NO: 32669 - protein, 18 aa, Artificial Sequence
  Synthetic polypeptide
YGLGLEEQERLHLLWRKY

SEQ ID NO: 32670 - protein, 6 aa, Artificial Sequence
  Synthetic polypeptide
NNMDLD

SEQ ID NO: 32671 - protein, 112 aa, Artificial Sequence
  Synthetic polypeptide
SVLFPAVSPVPKIIWTWIRRTRKTPPTMEEILKNEKHREEIKIKSQDFYEKEKLLSKETSEELLPPPVQTQIKGHASAPYFGKEEPSVAPSSTGKTFQPGSWMPRDGKSHNQ

SEQ ID NO: 32672 - protein, 5 aa, Artificial Sequence
  Synthetic polypeptide
YGLGL

SEQ ID NO: 32673 - protein, 18 aa, Artificial Sequence
  Synthetic polypeptide
SVLFPAVSPVPKIIWTWI

SEQ ID NO: 32674 - protein, 18 aa, Artificial Sequence
  Synthetic polypeptide
SQEMETILANMAEYIKQW

SEQ ID NO: 32675 - protein, 35 aa, Artificial Sequence
  Synthetic polypeptide
SQHFGRLRRADHEVKRWRPSWPTWPNTSSNGNIFK

SEQ ID NO: 32676 - protein, 701 aa, Artificial Sequence
  Synthetic polypeptide
GGQIMKSRDGDHPGQHGRIHQAMVTSLNEDNESVTVEWIENGDTKGKEIDLESIFSLNPDLVPDEEIEPSPETPPPPASSAKVNKIVKNRRTVASIKNDPPSRDNRVVGSARARPSQFPEQSSSAQQNGSVSDISPVQAAKKEFGPPSRRKSNCVKEVEKLQEKREKRRLQQQELREKRAQDVDATNPNYEIMCMIRDFRGSLDYRPLTTADPIDEHRICVCVRKRPLNKKETQMKDLDVITIPSKDVVMVHEPKQKVDLTRYLENQTFRFDYAFDDSAPNEMVYRFTARPLVETIFERGMATCFAYGQTGSGKTHTMGGDFSGKNQDCSKGIYALAARDVFLMLKKPNYKKLELQVYATFFEIYSGKVFDLLNRKTKLRVLEDGKQQVQVVGLQEREVKCVEDVLKLIDIGNSCRTSGQTSANAHSSRSHAVFQIILRRKGKLHGKFSLIDLAGNERGADTSSADRQTRLEGAEINKSLLALKECIRALGRNKPHTPFRASKLTQVLRDSFIGENSRTCMIATISPGMASCENTLNTLRYANRVKELTVDPTAAGDVRPIMHHPPNQIDDLETQWGVGSSPQRDDLKLLCEQNEEEVSPQLFTFHEAVSQMVEMEEQVVEDHRAVFQESIRWLEDEKALLEMTEEVDYDVDSYATQLEAILEQKIDILTELRDKVKSFRAALQEEEQASKQINPKRPRAL

SEQ ID NO: 32677 - protein, 279 aa, Artificial Sequence
  Synthetic polypeptide
GGQIMKSRDGDHPGQHGRIHQAMVTSLNEDNESVTVEWIENGDTKGKEIDLESIFSLNPDLVPDEEIEPSPETPPPPASSAKVNKIVKNRRTVASIKNDPPSRDNRVVGSARARPSQFPEQSSSAQQNARRKSNCVKEVEKLQEKREKRRLQQQELREKRAQDVDATNPNYEIMCMIRDFRGSLDYRPLTTADPIDEHRICVCVRKRPLNKKETQMKDLDVITIPSKDVVMVHEPKQKVDLTRYLENQTFRFDYAFDDSAPNEMVYRFTARPLVETIFE

SEQ ID NO: 32678 - protein, 739 aa, Artificial Sequence
  Synthetic polypeptide
GGQIMKSRDGDHPGQHGRIHQAMVTSLNEDNESVTVEWIENGDTKGKEIDLESIFSLNPDLVPDEEIEPSPETPPPPASSAKVNKIVKNRRTVASIKNDPPSRDNRVVGSARARPSQFPEQSSSAQQNGSVSDISPVQAAKKEFGPPSRRKSNCVKEVEKLQEKREKRRLQQQELREKRAQDVDATNPNYEIMCMIRDFRGSLDYRPLTTADPIDEHRICVCVRKRPLNKKETQMKDLDVITIPSKDVVMVHEPKQKVDLTRYLENQTFRFDYAFDDSAPNEMVYRFTARPLVETIFERGMATCFAYGQTGSGKTHTMGGDFSGKNQDCSKGIYALAARDVFLMLKKPNYKKLELQVYATFFEIYSGKVFDLLNRKTKLRVLEDGKQQVQVVGLQEREVKCVEDVLKLIDIGNSCRTSGQTSANAHSSRSHAVFQIILRRKGKLHGKFSLIDLAGNERGADTSSADRQTRLEGAEINKSLLALKECIRALGRNKPHTPFRASKLTQVLRDSFIGENSRTCMIATISPGMASCENTLNTLRYANRVKEFGISPSDIPFSQGSGSRPDLSPSYEYDDFSPSVTRVKELTVDPTAAGDVRPIMHHPPNQIDDLETQWGVGSSPQRDDLKLLCEQNEEEVSPQLFTFHEAVSQMVEMEEQVVEDHRAVFQESIRWLEDEKALLEMTEEVDYDVDSYATQLEAILEQKIDILTELRDKVKSFRAALQEEEQASKQINPKRPRAL

SEQ ID NO: 32679 - protein, 66 aa, Artificial Sequence
  Synthetic polypeptide
LRPVISTLWEAEAGGSPEWLVQHVHGPVNFLNSLPLHNRMVVFQIYLQFKLQKRNLDPLHVENLIV

SEQ ID NO: 32680 - protein, 26 aa, Artificial Sequence
  Synthetic polypeptide
SPHFGRLRRVDHLSGWFSTCTAQSIS

SEQ ID NO: 32681 - protein, 47 aa, Artificial Sequence
  Synthetic polypeptide
LRPVISTLWEAEAGGSPEWLVQHVHGPVNFLNSLPLHNRMHVENLIV

SEQ ID NO: 32682 - protein, 22 aa, Artificial Sequence
  Synthetic polypeptide
GWVWWFMPVIPALWEAKLEMSF

SEQ ID NO: 32683 - protein, 20 aa, Artificial Sequence
  Synthetic polypeptide
SLHFGRPSSRCLFNAKEAKL

SEQ ID NO: 32684 - protein, 380 aa, Artificial Sequence
  Synthetic polypeptide
MGVVVHACNPCTLGGQARDVFLMLKKPNYKKLELQVYATFFEIYSGKVFDLLNRKTKLRVLEDGKQQVQVVGLQEREVKCVEDVLKLIDIGNSCRTSGQTSANAHSSRSHAVFQIILRRKGKLHGKFSLIDLAGNERGADTSSADRQTRLEGAEINKSLLALKECIRALGRNKPHTPFRASKLTQVLRDSFIGENSRTCMIATISPGMASCENTLNTLRYANRVKELTVDPTAAGDVRPIMHHPPNQIDDLETQWGVGSSPQRDDLKLLCEQNEEEVSPQLFTFHEAVSQMVEMEEQVVEDHRAVFQESIRWLEDEKALLEMTEEVDYDVDSYATQLEAILEQKIDILTELRDKVKSFRAALQEEEQASKQINPKRPRAL

SEQ ID NO: 32685 - protein, 418 aa, Artificial Sequence
  Synthetic polypeptide
MGVVVHACNPCTLGGQARDVFLMLKKPNYKKLELQVYATFFEIYSGKVFDLLNRKTKLRVLEDGKQQVQVVGLQEREVKCVEDVLKLIDIGNSCRTSGQTSANAHSSRSHAVFQIILRRKGKLHGKFSLIDLAGNERGADTSSADRQTRLEGAEINKSLLALKECIRALGRNKPHTPFRASKLTQVLRDSFIGENSRTCMIATISPGMASCENTLNTLRYANRVKEFGISPSDIPFSQGSGSRPDLSPSYEYDDFSPSVTRVKELTVDPTAAGDVRPIMHHPPNQIDDLETQWGVGSSPQRDDLKLLCEQNEEEVSPQLFTFHEAVSQMVEMEEQVVEDHRAVFQESIRWLEDEKALLEMTEEVDYDVDSYATQLEAILEQKIDILTELRDKVKSFRAALQEEEQASKQINPKRPRAL

SEQ ID NO: 32686 - protein, 35 aa, Artificial Sequence
  Synthetic polypeptide
SQLLRRLRRENHLNLGGGGCSEPRSHHGTPAWATD

SEQ ID NO: 32687 - protein, 639 aa, Artificial Sequence
  Synthetic polypeptide
EVEVAVSRDRTTVLQHGQQTELQSLSIPGTYQEKITHLGHSLMSLTGLKSLDLSRNSLVSLEGIQYLTALESLNLYYNCISSLAEVFRLHALTELVDVDFRLNPVVKVEPDYRLFVVHLLPKLQQLDDRPVRASERKASRLHFASEDSLDSKESVPASLKEGRPHHPRAKCTEALAKQSLVMDADDEAVLNLIAECEWDLGRPPGSTSFSQKGREADSRGSQESRHLLSPQLVQYQCGDSGKQGRETRRSSCRGCCLEKMPWSQLCGELPPLYGAEPEASRAPRPHTYFTPHPDSMDTEDSASSQKLDLSGEMVPGPLPAPGKCRKRRMPVGRFQTFSDQEGLGCPERTHGSSVPKESLSRQDSSESRNGRTLSQPEASETEEQRSRGVTDTREPSPGSHSALPGKKTALQAALLETLLDLVDRSWGGCRSLHSNEAFLAQARHILSSVEEFTAAQDSSAMVGEDVGSLALESKSLQSRLAEQQQQHAREMSEVTAELHHTHKELDDLRQHLDKSLEENSRLKSLLLSMKKEVKSADTAATLNLQIAGLQTSVKRLCGEIVELKQHLEHYDKIQELTQMLQESHSSLVSTNEHLLQELSQVRAQHRAEVEQMHWSYQELKKTMALFPHSSASHGGCQAC

SEQ ID NO: 32688 - protein, 35 aa, Artificial Sequence
  Synthetic polypeptide
AEIAPRYSSMGNRLSFSHCLFLELTKRRSPTWDIL

SEQ ID NO: 32689 - protein, 185 aa, Artificial Sequence
  Synthetic polypeptide
EVEVAVSRDRTTVLQHGQQTELQSLSIPGTYQEKITHLGHSLMSLTGLKSLDLSRNSLVSLEGIQYLTALESLNLYYNCISSLAEVFRLHALTELVDVDFRLNPVVKVEPDYRLFVVHLLPKLQQLDDRPVRASERKASRLHFASEDSLDSKESVPASLKEGRIQTSVEPAVGTVPVWGLWEAGP

SEQ ID NO: 32690 - protein, 34 aa, Artificial Sequence
  Synthetic polypeptide
GPPPASLSTSSCCPVKKMPCLPFTFCLDCCGKCP

SEQ ID NO: 32691 - protein, 126 aa, Artificial Sequence
  Synthetic polypeptide
RRCLASLSPSALIVVENALKVNPILGPQMFQPILPYVFKGIIEGERYPVVMSTYLGVMGRVLLQNTSFFSSLLNEMAHKFNQEMDQLLGNMIEMWVDRMDNITQPERRKLSALALLSLLPSDNSQF

SEQ ID NO: 32692 - protein, 238 aa, Artificial Sequence
  Synthetic polypeptide
RRCLASLSPSALIVVENALKVNPILGPQMFQPILPYVFKGIIEGERYPVVMSTYLGVMGRVLLQNTSFFSSLLNEMAHKFNQEMDQLLGNMIEMWVDRMDNITQPERRKLSALALLSLLPSDNSVIQDKFCGIINISVEGLHDVMTEDPETGTYKDCMLMSHLEEPKVTEDEEPPTEQDKRKKMLALKDPVHTVSLQQFIYEKLKAQQEMLGEQGFQSLMETVDTEIVTQLQEFLQGF

SEQ ID NO: 32693 - protein, 158 aa, Artificial Sequence
  Synthetic polypeptide
RRCLASLSPSALIVVENALKVNPILGPQMFQPILPYVFKGIIEGERYPVVMSTYLGVMGRVLLQNTSFFSSLLNEMAHKFNQEMDQLLGNMIEMWVDRMDNITQPERRKLSALALLSLLPSDNSVIQDKFCGIINISVEGLHDVMTEDPETGTYKDWP

SEQ ID NO: 32694 - protein, 10 aa, Artificial Sequence
  Synthetic polypeptide
ATWLWKMPLK

SEQ ID NO: 32695 - protein, 10 aa, Artificial Sequence
  Synthetic polypeptide
PEQHGCGKCP

SEQ ID NO: 32696 - protein, 124 aa, Artificial Sequence
  Synthetic polypeptide
SQEFETSLSNMVVENALKVNPILGPQMFQPILPYVFKGIIEGERYPVVMSTYLGVMGRVLLQNTSFFSSLLNEMAHKFNQEMDQLLGNMIEMWVDRMDNITQPERRKLSALALLSLLPSDNSQF

SEQ ID NO: 32697 - protein, 236 aa, Artificial Sequence
  Synthetic polypeptide
SQEFETSLSNMVVENALKVNPILGPQMFQPILPYVFKGIIEGERYPVVMSTYLGVMGRVLLQNTSFFSSLLNEMAHKFNQEMDQLLGNMIEMWVDRMDNITQPERRKLSALALLSLLPSDNSVIQDKFCGIINISVEGLHDVMTEDPETGTYKDCMLMSHLEEPKVTEDEEPPTEQDKRKKMLALKDPVHTVSLQQFIYEKLKAQQEMLGEQGFQSLMETVDTEIVTQLQEFLQGF

SEQ ID NO: 32698 - protein, 156 aa, Artificial Sequence
  Synthetic polypeptide
SQEFETSLSNMVVENALKVNPILGPQMFQPILPYVFKGIIEGERYPVVMSTYLGVMGRVLLQNTSFFSSLLNEMAHKFNQEMDQLLGNMIEMWVDRMDNITQPERRKLSALALLSLLPSDNSVIQDKFCGIINISVEGLHDVMTEDPETGTYKDWP

SEQ ID NO: 32699 - protein, 4 aa, Artificial Sequence
  Synthetic polypeptide
DLRL

SEQ ID NO: 32700 - protein, 236 aa, Artificial Sequence
  Synthetic polypeptide
PLFYLLMIPKHRSSTTGNLNTPKRSHKVLLLSEKVKILDLIGKEKKIVLLRPKTLNNEMSTDEDNEYAEEKDSYICAVCLDVYFNPYMCYPCHHIFCEPCLRTLAKDNPSSTPCPLCRTIISRVFFQTELNNATKTFFTKEYLKIKQSFQKSNSAKWPLPSCRKAFHLFGGFRRHAAPVTRRQFPHGAHRMDYLHFEDDSRGWWFDMDMVIIYIYSVNWVIGFIVFCFLCYFFFPF

SEQ ID NO: 32701 - protein, 33 aa, Artificial Sequence
  Synthetic polypeptide
CLTIQAAVRIKKIYRSRSKSPALHQRVPGEGSS

SEQ ID NO: 32702 - protein, 70 aa, Artificial Sequence
  Synthetic polypeptide
GSKRYIDQGRNPQLYTKECLERALAKNEQVKGKIDTMKKFKSLLIQELSKVFPEDMAKYRSIRGEDHPPS

SEQ ID NO: 32703 - protein, 13 aa, Artificial Sequence
  Synthetic polypeptide
PYHTSCCKDQKDI

SEQ ID NO: 32704 - protein, 167 aa, Artificial Sequence
  Synthetic polypeptide
GLPSHVKLEELRKEARQLKRELLAAKQKKVENAAKQAEKRSEEEEAPPDGAVAEYRREKQKYEALRKQQSKKGTSREDQTLALLNQFKSKLTQAIAETPENDIPETEVEDDEGWMSHVLQFEDKSRKVKDASMQDSDTFEIYDPRNPVNKRRREESKKLMREKKERR

SEQ ID NO: 32705 - protein, 11 aa, Artificial Sequence
  Synthetic polypeptide
NLKSSEKKQDN

SEQ ID NO: 32706 - protein, 206 aa, Artificial Sequence
  Synthetic polypeptide
GRAQWLTPVIPALWEAEAGRSRGQEIETILANMFQKLRQDLEMVLSTKESKNEKLKEDLEREQRWLDEQQQIMESLNVLHSELKNKVETFSESRIFNELKTKMLNIKEYKEKLLSTLGEFLEDHFPLPDRSVKKKKKNIQESSVNLITLHEMLEILINRLFDVPHDPYVKISDSFWPPYVELLLRNGIALRHPEDPTRIRLEAFHQ

SEQ ID NO: 32707 - protein, 27 aa, Artificial Sequence
  Synthetic polypeptide
SQHFGRLRRADHEVRRSRPSWPTCSKS

SEQ ID NO: 32708 - protein, 24 aa, Artificial Sequence
  Synthetic polypeptide
GGQITRSGDRDHPGQHVPKAETRS

SEQ ID NO: 32709 - protein, 173 aa, Artificial Sequence
  Synthetic polypeptide
GRAQWLTPVIPALWEAEAGRSRGQEIETILANMFQKLRQDLEMVLSTKESKNEKLKEDLERIFNELKTKMLNIKEYKEKLLSTLGEFLEDHFPLPDRSVKKKKKNIQESSVNLITLHEMLEILINRLFDVPHDPYVKISDSFWPPYVELLLRNGIALRHPEDPTRIRLEAFHQ

SEQ ID NO: 32710 - protein, 161 aa, Artificial Sequence
  Synthetic polypeptide
GRAQWLTPVIPALWEAEAGRSRGQEIETILANMFQKLRQDLEMVLSTKESKNEKLKEDLEREQRWLDEQQQIMESLNVLHSELKNKVETFSESRIFNELKTKMLNIKEYKEKLLSTLGEFLEDHFPLPDRSVKKKKMESPCVTQAGMQWHDLVSLQPLPPG

SEQ ID NO: 32711 - protein, 111 aa, Artificial Sequence
  Synthetic polypeptide
GRAQWLTPVIPALWEAEAGRSRGQEIETILANMFQKLRQDLEMVLSTKESKNEKLKEDLEREQRWLDEQQQIMESLNVLHSELKNKVETFSESRIFNELKTKMLNIKEYKE

SEQ ID NO: 32712 - protein, 69 aa, Artificial Sequence
  Synthetic polypeptide
GRAQWLTPVIPALWEAEAGRSRGQEIETILANMFQKLRQDLEMVLSTKESKNEKLKEDLEREQRWLDEQ

SEQ ID NO: 32713 - protein, 5 aa, Artificial Sequence
  Synthetic polypeptide
NKQFP

SEQ ID NO: 32714 - protein, 20 aa, Artificial Sequence
  Synthetic polypeptide
ASQLAIFSNKVFFKISNSLD

SEQ ID NO: 32715 - protein, 45 aa, Artificial Sequence
  Synthetic polypeptide
WSGPKYIETFWKVSPILDAIKNMCDLWKEVKITTLTGVCKSNSLD

SEQ ID NO: 32716 - protein, 194 aa, Artificial Sequence
  Synthetic polypeptide
QECARAIPLTEDVLITLGKEEFQKLRQDLEMVLSTKESKNEKLKEDLEREQRWLDEQQQIMESLNVLHSELKNKVETFSESRIFNELKTKMLNIKEYKEKLLSTLGEFLEDHFPLPDRSVKKKKKNIQESSVNLITLHEMLEILINRLFDVPHDPYVKISDSFWPPYVELLLRNGIALRHPEDPTRIRLEAFHQ

SEQ ID NO: 32717 - protein, 19 aa, Artificial Sequence
  Synthetic polypeptide
FMEGGQNNNINRSVQEQFP

SEQ ID NO: 32718 - protein, 161 aa, Artificial Sequence
  Synthetic polypeptide
QECARAIPLTEDVLITLGKEEFQKLRQDLEMVLSTKESKNEKLKEDLERIFNELKTKMLNIKEYKEKLLSTLGEFLEDHFPLPDRSVKKKKKNIQESSVNLITLHEMLEILINRLFDVPHDPYVKISDSFWPPYVELLLRNGIALRHPEDPTRIRLEAFHQ

SEQ ID NO: 32719 - protein, 99 aa, Artificial Sequence
  Synthetic polypeptide
QECARAIPLTEDVLITLGKEEFQKLRQDLEMVLSTKESKNEKLKEDLEREQRWLDEQQQIMESLNVLHSELKNKVETFSESRIFNELKTKMLNIKEYKE

SEQ ID NO: 32720 - protein, 42 aa, Artificial Sequence
  Synthetic polypeptide
QECARAIPLTEDVLITLGKEEILQMMILSYKPVGCPLNSLQF

SEQ ID NO: 32721 - protein, 57 aa, Artificial Sequence
  Synthetic polypeptide
QECARAIPLTEDVLITLGKEEFQKLRQDLEMVLSTKESKNEKLKEDLEREQRWLDEQ

SEQ ID NO: 32722 - protein, 15 aa, Artificial Sequence
  Synthetic polypeptide
CVCCPGLQCYMYFLR

SEQ ID NO: 32723 - protein, 21 aa, Artificial Sequence
  Synthetic polypeptide
CMLSWVTMLYVFLKVIQVSGD

SEQ ID NO: 32724 - protein, 526 aa, Artificial Sequence
  Synthetic polypeptide
GQVRWLIPVIQNFARLRWVDHLKSGVQGQPGQNGDSGVWGLKKNFALLELLERLQNGPIGQYGAAEESIGISGESIIRCDEDEAHLASVYCTVCATHLCSECSQVTHSTKTLAKHRRVPLADKPHEKTMCSQHQVHAIEFVCLEEGCQTSPLMCCVCKEYGKHQGHKHSVLEPEANQIRASILDMAHCIRTFTEEISDYSRKLVGIVQHIEGGEQIVEDGIGMAHTEHVPGTAENARSCIRAYFYDLHETLCRQEEMALSVVDAHVREKLIWLRQQQEDMTILLSEVSAACLHCEKTLQQDDCRVVLAKQEITRLLETLQKQQQQFTEVADHIQLDASIPVTFTKDNRVHIGPKMEIRVVTLGLDGAGKTTILFKLKQDEFMQPIPTIGFNVETVEYKNLKFTIWDVGGKHKLRPLWKHYYLNTQAVVFVVDSSHRDRISEAHSELAKLLTEKELRDALLLIFANKQDVAGALSVEEITELLSLHKLCCGRSWYIQGCDARSGMGLYEGLDWLSRQLVAAGVLDVA

SEQ ID NO: 32725 - protein, 18 aa, Artificial Sequence
  Synthetic polypeptide
SQEFKASLAKMVIQVSGD

SEQ ID NO: 32726 - protein, 33 aa, Artificial Sequence
  Synthetic polypeptide
PGEVAHTCNPELCKAKMGGSPEVRSSRPAWPKW

SEQ ID NO: 32727 - protein, 521 aa, Artificial Sequence
  Synthetic polypeptide
GQVRWLIPVIQNFARLRWVDHLKSGVQGQPGQNGDSGVWGLKKNFALLELLERLQNGPIGQYGAAEESIGISGESIIRCDEDEAHLASVYCTVCATHLCSECSQVTHSTKTLAKHRRVPLADKPHEKTMCSQHQVHAIEFVCLEEGCQTSPLMCCVCKEYGKHQGHKHSVLEPEANQIRASILDMAHCIRTFTEEISDYSRKLVGIVQHIEGGEQIVEDGIGMAHTEHVPGTAENARSCIRAYFYDLHETLCRQEEMALSVVDAHVREKLIWLRQQQEDMTILLSEVSAACLHCEKTLQQDDCRVVLAKQEITRLLETLQKQQQQFTEVADHIQLDASIPVTFTKDNRVHIGPKMEIRVVTLGLDGAGKTTILFKLKQDEFMQPIPTIGFNVETVEYKNLKFTIWDVGGKHKLRPLWKHYYLNTQAVVFVVDSSHRDRISEAHSELAKLLTEKELRDALLLIFANKQDVAGALSVEEITELLSLHKLCCGRSWYIQGCDARSVFQIICDQYTGKEVVTEKG

SEQ ID NO: 32728 - protein, 498 aa, Artificial Sequence
  Synthetic polypeptide
GQVRWLIPVIQNFARLRWVDHLKSGVQGQPGQNGDSGVWGLKKNFALLELLERLQNGPIGQYGAAEESIGISGESIIRCDEDEAHLASVYCTVCATHLCSECSQVTHSTKTLAKHRRVPLADKPHEKTMCSQHQVHAIEFVCLEEGCQTSPLMCCVCKEYGKHQGHKHSVLEPEANQIRASILDMAHCIRTFTEEISDYSRKLVGIVQHIEGGEQIVEDGIGMAHTEHVPGTAENARSCIRAYFYDLHETLCRQEEMALSVVDAHVREKLIWLRQQQEDMTILLSEVSAACLHCEKTLQQDDCRVVLAKQEITRLLETLQKQQQQFTEVADHIQLDASIPVTFTKDNRVHIGPKMEIRVVTLGLDGAGKTTILFKLKQDEFMQPIPTIGFNVETVEYKNLKFTIWDVGGKHKLRPLWKHYYLNTQAVVFVVDSSHRDRISEAHSELAKLLTEKELRDALLLIFANKQDVAGALSVEEITELLSLHKLCCGRSCFSDNM

SEQ ID NO: 32729 - protein, 41 aa, Artificial Sequence
  Synthetic polypeptide
GQVRWLIPVIQNFARLRWVDHLKSGVQGQPGQNGDSGVWGL

SEQ ID NO: 32730 - protein, 78 aa, Artificial Sequence
  Synthetic polypeptide
GQVRWLIPVIQNFARLRWVDHLKSGVQGQPGQNGDSGVWGLKKNFALLELLERLQNGPIGQYGAAEESIGISGEFYQE

SEQ ID NO: 32731 - protein, 55 aa, Artificial Sequence
  Synthetic polypeptide
LVGRLRRKDRLTPGFKASVSCDHATALQLGQQNKTLSPKSSQTIGCENQILQCRE

SEQ ID NO: 32732 - protein, 270 aa, Artificial Sequence
  Synthetic polypeptide
AVITPLHSSLVNRTRLCLRKVLKPLDVKTKFYNAESDLSSVTDEVFLEAQIQNMTTSPMFMEKVSLEPSIMYNVTELNSVSQAGECVSTFGSRAYLQPMDTRQYLYCLKPKNEFAEKAGIIKGVTVIGKLDIVWKTNLGERGRLQTSQLQRMAPGYGDVRLSLEAIPDTVNLEEPFHITCKITNCSERTMDLVLEMCNTNSIHWCGISGRQLGKLHPSSSLCLALTLLSSVQGLQSISGLRLTDTFLKRTYEYDDIAQVCVVSSAIKVES

SEQ ID NO: 32733 - protein, 24 aa, Artificial Sequence
  Synthetic polypeptide
SRHCTPAWSTEQDSVSEKFSNHWM

SEQ ID NO: 32734 - protein, 271 aa, Artificial Sequence
  Synthetic polypeptide
AVITPLHSSLVNRTRLCLRKVLKPLDVKTKFYNAESDLSSVTDEVFLEAQIQNMTTSPMFMEKVSLEPSIMYNVTELNSVSQAGECVSTFGSRAYLQPMDTRQYLYCLKPKNEFAEKAGIIKGVTVIGKLDIVWKTNLGERGRLQTSQLQRMAPGYGDVRLSLEAIPDTVNLEEPFHITCKITNCSSERTMDLVLEMCNTNSIHWCGISGRQLGKLHPSSSLCLALTLLSSVQGLQSISGLRLTDTFLKRTYEYDDIAQVCVVSSAIKVES

SEQ ID NO: 32735 - protein, 55 aa, Artificial Sequence
  Synthetic polypeptide
LVGRLRRKDRLTPGFKASVSCDHATALQLGQQNKTLSPKSSQTIGCENQILQCRD

SEQ ID NO: 32736 - protein, 264 aa, Artificial Sequence
  Synthetic polypeptide
AVITPLHSSLVNRTRLCLRKVLKPLDVKTKFYNAETDEVFLEAQIQNMTTSPMFMEKVSLEPSIMYNVTELNSVSQAGECVSTFGSRAYLQPMDTRQYLYCLKPKNEFAEKAGIIKGVTVIGKLDIVWKTNLGERGRLQTSQLQRMAPGYGDVRLSLEAIPDTVNLEEPFHITCKITNCSERTMDLVLEMCNTNSIHWCGISGRQLGKLHPSSSLCLALTLLSSVQGLQSISGLRLTDTFLKRTYEYDDIAQVCVVSSAIKVES

SEQ ID NO: 32737 - protein, 265 aa, Artificial Sequence
  Synthetic polypeptide
AVITPLHSSLVNRTRLCLRKVLKPLDVKTKFYNAETDEVFLEAQIQNMTTSPMFMEKVSLEPSIMYNVTELNSVSQAGECVSTFGSRAYLQPMDTRQYLYCLKPKNEFAEKAGIIKGVTVIGKLDIVWKTNLGERGRLQTSQLQRMAPGYGDVRLSLEAIPDTVNLEEPFHITCKITNCSSERTMDLVLEMCNTNSIHWCGISGRQLGKLHPSSSLCLALTLLSSVQGLQSISGLRLTDTFLKRTYEYDDIAQVCVVSSAIKVES

SEQ ID NO: 32738 - protein, 62 aa, Artificial Sequence
  Synthetic polypeptide
LVGRLRRKDRLTPGFKASVSCDHATALQLGQQNKTLSPKSSQTIGCENQILQCREANRQRDY

SEQ ID NO: 32739 - protein, 272 aa, Artificial Sequence
  Synthetic polypeptide
AVITPLHSSLVNRTRLCLRKVLKPLDVKTKFYNAEKQIANVTTDEVFLEAQIQNMTTSPMFMEKVSLEPSIMYNVTELNSVSQAGECVSTFGSRAYLQPMDTRQYLYCLKPKNEFAEKAGIIKGVTVIGKLDIVWKTNLGERGRLQTSQLQRMAPGYGDVRLSLEAIPDTVNLEEPFHITCKITNCSSERTMDLVLEMCNTNSIHWCGISGRQLGKLHPSSSLCLALTLLSSVQGLQSISGLRLTDTFLKRTYEYDDIAQVCVVSSAIKVES

SEQ ID NO: 32740 - protein, 4 aa, Artificial Sequence
  Synthetic polypeptide
GAIY

SEQ ID NO: 32741 - protein, 263 aa, Artificial Sequence
  Synthetic polypeptide
QEHWIKHHLCICGPGCMTWGQLFKLFEPSHFSYSENGDNSNSMYFPGRLGELNQAYVKRHLEKHKEPYTDFARFSGTNVETDFVEVPSQMLENWVWDVDSLRRLSKHYKDGSPIADDLLEKLVASRLVNTGLLTLRQIVLSKVDQSLHTNTSLDAASEYAKYCSEILGVAATPGTNMPATFGHLAGGYDGQYYGYLWSEVFSMDMFYSCFKKEGIMNPEVGMKYRNLILKPGGSLDGMDMLHNFLKREPNQKAFLMSRGLHAP

SEQ ID NO: 32742 - protein, 26 aa, Artificial Sequence
  Synthetic polypeptide
KGIWKSIRSHILILHDLAEQMWKLTL

SEQ ID NO: 32743 - protein, 243 aa, Artificial Sequence
  Synthetic polypeptide
QEHWIKHHLCICGPGCMTWGQLFKLFEPSHFSYSENGDNSNSMYFPGRLGELNQAYVKRHLEKHKEPYTDFARFSGTNVETDFVEVPSQMLENWVWDVDSLRRLSKHYKDGSPIADDLLEKLVASRLVNTGLLTLRQIVLSKVDQSLHTNTSLDAASEYAKYCSEILGVAATPGTNMPATFGHLAGGYDGQYYGYLWSEVFSMDMFYSCFKKEGIMNPETSKHHGISLIMFHYSKGEVDLVPF

SEQ ID NO: 32744 - protein, 23 aa, Artificial Sequence
  Synthetic polypeptide
VGWLKPVISALWEIEEYRSFQKI

SEQ ID NO: 32745 - protein, 19 aa, Artificial Sequence
  Synthetic polypeptide
SQHFGRSRNTGVSRKYKKL

SEQ ID NO: 32746 - protein, 1324 aa, Artificial Sequence
  Synthetic polypeptide
GVAQACNLSTLGDRGIQEFPENIKNCKVLTIVEASVNPISKLPDGFSQLLNLTQLYLNDAFLEFLPANFGRLTKLQILELRENQLKMLPKTMNRLTQLERLDLGSNEFTEVPEVLEQLSGLKEFWMDANRLTFIPGFIGSLKQLTYLDVSKNNIEMVEEGISTCENLQDLLLSSNSLQQLPETIGSLKNITTLKIDENQLMYLPDSIGGLISVEELDCSFNEVEALPSSIGQLTNLRTFAADHNYLQQLPPEIGSWKNITVLFLHSNKLETLPEEMGDMQKLKVINLSDNRLKNLPFSFTKLQQLTAMWLSDNQSKPLIPLQKETDSETQKMVLTNYMFPQQPRTEDVMFISDNESFNPSLWEEQRKQRAQVAFECDEDKDEREAPPREGNLKRYPTPYPDELKNMVKTVQTIVHRLKDEETNEDSGRDLKPHEDQQDINKDVGVKTSESTTTVKSKVDEREKYMIGNSVQKISEPEAEISPGSLPVTANMKASENLKHIVNHDDVFEESEELSSDEEMKMAEMRPPLIETSINQPKVVALSNNKKDDTKETDSLSDEVTHNSNQNNSNCSSPSRMSDSVSLNTDSSQDTSLCSPVKQTHIDINSKIRQEDENFNSLLQNGDILNSSTEEKFKAHDKKDFNLPEYDLNVEERLVLIEKSVDSTATADDTHKLDHINMNLNKLITNDTFQPEIMERSKTQDIVLGTSFLSINSKEETEHLENGNKYPNLESVNKVNGHSEETSQSPNRTEPHDSDCSVDLGISKSTEDLSPQKSGPVGSVVKSHSITNMEIGGLKIYDILSDNGPQQPSTTVKITSAVDGKNIVRSKSATLLYDQPLQVFTGSSSSSDLISGTKAIFKFDSNHNPEEPNIIRGPTSGPQSAPQIYGPPQYNIQYSSSAAVKDTLWHSKQNPQIDHASFPPQLLPRSESTENQSYAKHSANMNFSNHNNVRANTAYHLHQRLGPARHGEMWAISPNDRLIPAVTRSTIQRQSSVSSTASVNLGDPGSTRRAQIPEGDYLSYREFHSAGRTPPMMPGSQRPLSARTYSIDGPNASRPQSARPSINEIPERTMSVSDFNYSRTSPSKRPNARVGSEHSLLDPPGKSKVPRDWREQVLRHIEAKKLEKKHPQTSSSGDPCQDGIFISGQQNYSSATLSHKDVPPDSLMKMPLSNGQMGQPLRPQANYSQIHHPPQASVARHPSREQLIDYLMLKVAHQPPYTQPHCSPRQGHELAKQEIRVRVEKDPELGFSISGGVGGRGNPFRPDDDGIFVTRVQPEGPASKLLQPGDKIIQANGYSFINIEHGQAVSLLKTFQNTVELIIVREVSS

SEQ ID NO: 32747 - protein, 1283 aa, Artificial Sequence
  Synthetic polypeptide
GVAQACNLSTLGDRGIQEFPENIKNCKVLTIVEASVNPISKLPDGFSQLLNLTQLYLNDAFLEFLPANFGRLTKLQILELRENQLKMLPKTMNRLTQLERLDLGSNEFTEVPEVLEQLSGLKEFWMDANRLTFIPGFIGSLKQLTYLDVSKNNIEMVEEGISTCENLQDLLLSSNSLQQLPETIGSLKNITTLKIDENQLMYLPDSIGGLISVEELDCSFNEVEALPSSIGQLTNLRTFAADHNYLQQLPPEIGSWKNITVLFLHSNKLETLPEEMGDMQKLKVINLSDNRLKNLPFSFTKLQQLTAMWLSDNQSKPLIPLQKETDSETQKMVLTNYMFPQQPRTEDVMFISDNESFNPSLWEEQRKQRAQVAFECDEDKDEREAPPREGNLKRYPTPYPDELKNMVKTVQTIVHRLKDEETNEDSGRDLKPHEDQQDINKDVGVKTSESTTTVKSKVDEREKYMIGNSVQKISEPEAEISPGSLPVTANMKASENLKHIVNHDDVFEESEELSSDEEMKMAEMRPPLIETSINQPKVVALSNNKKDDTKETDSLSDEVTHNSNQNNSNCSSPSRMSDSVSLNTDSSQDTSLCSPVKQTHIDINSKIRQEDENFNSLLQNGDILNSSTEEKFKAHDKKDFNLPEYDLNVEERLVLIEKSVDSTATADDTHKLDHINMNLNKLITNDTFQPEIMERSKTQDIVLGTSFLSINSKEETEHLENGNKYPNLESVNKVNGHSEETSQSPNRTEPHDSDCSVDLGISKSTEDLSPQKSGPVGSVVKSHSITNMEIGGLKIYDILSDNGPQQPSTTVKITSAVDGKNIVRSKSATLLYDQPLQVFTGSSSSSDLISGTKAIFKFDSNHNPEEPNIIRGPTSGPQSAPQIYGPPQYNIQYSSSAAVKDTLWHSKQNPQIDHASFPPQLLPRSESTENQSYAKHSANMNFSNHNNVRANTAYHLHQRLGPARHGEMWAISPNDRLIPAVTRSTIQRQSSVSSTASVNLGDPGSTRRAQIPEGDYLSYREFHSAGRTPPMMPGSQRPLSARTYSIDGPNASRPQSARPSINEIPERTMSVSDFNYSRTSPSKRPNARVGSEHSLLDPPGKSKVPRDWREQVLRHIEAKKLEKMPLSNGQMGQPLRPQANYSQIHHPPQASVARHPSREQLIDYLMLKVAHQPPYTQPHCSPRQGHELAKQEIRVRVEKDPELGFSISGGVGGRGNPFRPDDDGIFVTRVQPEGPASKLLQPGDKIIQANGYSFINIEHGQAVSLLKTFQNTVELIIVREVSS

SEQ ID NO: 32748 - protein, 522 aa, Artificial Sequence
  Synthetic polypeptide
GVAQACNLSTLGDRGIQEFPENIKNCKVLTIVEASVNPISKLPDGFSQLLNLTQLYLNDAFLEFLPANFGRLTKLQILELRENQLKMLPKTMNRLTQLERLDLGSNEFTEVPEVLEQLSGLKEFWMDANRLTFIPGFIGSLKQLTYLDVSKNNIEMVEEGISTCENLQDLLLSSNSLQQLPETIGSLKNITTLKIDENQLMYLPDSIGGLISVEELDCSFNEVEALPSSIGQLTNLRTFAADHNYLQQLPPEIGSWKNITVLFLHSNKLETLPEEMGDMQKLKVINLSDNRLKNLPFSFTKLQQLTAMWLSDNQSMLSRSFNSNFTTVSSFHCGSSRDLHGSQGSLALSVADRRGSGGHIFRMPLSNGQMGQPLRPQANYSQIHHPPQASVARHPSREQLIDYLMLKVAHQPPYTQPHCSPRQGHELAKQEIRVRVEKDPELGFSISGGVGGRGNPFRPDDDGIFVTRVQPEGPASKLLQPGDKIIQANGYSFINIEHGQAVSLLKTFQNTVELIIVREVSS

SEQ ID NO: 32749 - protein, 1214 aa, Artificial Sequence
  Synthetic polypeptide
GVAQACNLSTLGDRGIQEFPENIKNCKVLTIVEASVNPISKLPDGFSQLLNLTQLYLNDAFLEFLPANFGRLTKLQILELRENQLKMLPKTMNRLTQLERLDLGSNEFTEVPEVLEQLSGLKEFWMDANRLTFIPGFIGSLKQLTYLDVSKNNIEMVEEGISTCENLQDLLLSSNSLQQLPETIGSLKNITTLKIDENQLMYLPDSIGGLISVEELDCSFNEVEALPSSIGQLTNLRTFAADHNYLQQLPPEIGSWKNITVLFLHSNKLETLPEEMGDMQKLKVINLSDNRLKNLPFSFTKLQQLTAMWLSDNQSKPLIPLQKETDSETQKMVLTNYMFPQQPRTEDVMFISDNESFNPSLWEEQRKQRAQVAFECDEDKDEREAPPREGNLKRYPTPYPDELKNMVKTVQTIVHRLKDEETNEDSGRDLKPHEDQQDINKDVGVKTSESTTTVKSKVDEREKYMIGNSVQKISEPEAEISPGSLPVTANMKASENLKHIVNHDDVFEESEELSSDEEMKMAEMRPPLIETSINQPKVVALSNNKKDDTKETDSLSDEVTHNSNQNNSNCSSPSRMSDSVSLNTDSSQDTSLCSPVKQTHIDINSKIRQEDENFNSLLQNGDILNSSTEEKFKAHDKKDFNLPEYDLNVEERLVLIEKSVDSTATADDTHKLDHINMNLNKLITNDTFQPEIMERSKTQDIVLGTSFLSINSKEETEHLENGNKYPNLESVNKVNGHSEETSQSPNRTEPHDSDCSVDLGISKSTEDLSPQKSGPVGSVVKSHSITNMEIGGLKIYDILSDNGPQQPSTTVKITSAVDGKNIVRSKSATLLYDQPLQVFTGSSSSSDLISGTKAIFKFDSNHNPEEPNIIRGPTSGPQSAPQIYGPPQYNIQYSSSAAVKDTLWHSKQNPQIDHASFPPQLLPRSESTENQSYAKHSANMNFSNHNNVRANTAYHLHQRLGPARHGEMWAISPNDRLIPAVTRSTIQRQSSVSSTASVNLGDPGSTRRAQIPEGDYLSYREFHSAGRTPPMMPGSQRPLSARTYSIDGPNASRPQSARPSINEIPERTMSVSDFNYSRTSPSKRPNARVGSEHSLLDPPGKSKVPRDWREQVLRHIEAKKLEKIRVRVEKDPELGFSISGGVGGRGNPFRPDDDGIFVTRVQPEGPASKLLQPGDKIIQANGYSFINIEHGQAVSLLKTFQNTVELIIVREVSS

SEQ ID NO: 32750 - protein, 1252 aa, Artificial Sequence
  Synthetic polypeptide
GVAQACNLSTLGDRGIQEFPENIKNCKVLTIVEASVNPISKLPDGFSQLLNLTQLYLNDAFLEFLPANFGRLTKLQILELRENQLKMLPKTMNRLTQLERLDLGSNEFTEVPEVLEQLSGLKEFWMDANRLTFIPGFIGSLKQLTYLDVSKNNIEMVEEGISTCENLQDLLLSSNSLQQLPETIGSLKNITTLKIDENQLMYLPDSIGGLISVEELDCSFNEVEALPSSIGQLTNLRTFAADHNYLQQLPPEIGSWKNITVLFLHSNKLETLPEEMGDMQKLKVINLSDNRLKNLPFSFTKLQQLTAMWLSDNQSKPLIPLQKETDSETQKMVLTNYMFPQQPRTEDVMFISDNESFNPSLWEEQRKQRAQVAFECDEDKDEREAPPREGNLKRYPTPYPDELKNMVKTVQTIVHRLKDEETNEDSGRDLKPHEDQQDINKDVGVKTSESTTTVKSKVDEREKYMIGNSVQKISEPEAEISPGSLPVTANMKASENLKHIVNHDDVFEESEELSSDEEMKMAEMRPPLIETSINQPKVVALSNNKKDDTKETDSLSDEVTHNSNQNNSNCSSPSRMSDSVSLNTDSSQDTSLCSPVKQTHIDINSKIRQEDENFNSLLQNGDILNSSTEEKFKAHDKKDFNLPEYDLNVEERLVLIEKSVDSTATADDTHKLDHINMNLNKLITNDTFQPEIMERSKTQDIVLGTSFLSINSKEETEHLENGNKYPNLESVNKVNGHSEETSQSPNRTEPHDSDCSVDLGISKSTEDLSPQKSGPVGSVVKSHSITNMEIGGLKIYDILSDNGPQQPSTTVKITSAVDGKNIVRSKSATLLYDQPLQVFTGSSSSSDLISGTKAIFKFDSNHNPEEPNIIRGPTSGPQSAPQIYGPPQYNIQYSSSAAVKDTLWHSKQNPQIDHASFPPQLLPRSESTENQSYAKHSANMNFSNHNNVRANTAYHLHQRLGPARHGEMWAISPNDRLIPAVTRSTIQRQSSVSSTASVNLGDPGSTRRAQIPEGDYLSYREFHSAGRTPPMMPGSQRPLSARTYSIDGPNASRPQSARPSINEIPERTMSVSDFNYSRTSPSKRPNARVGSEHSLLDPPGKSKVPRDWREQVLRHIEAKKLEKMPLSNGQMGQPLRPQANYSQIHHPPQASVARHPSREQLIDYLMLKVAHQPPYTQPHCSPRQGHELAKQEGIFVTRVQPEGPASKLLQPGDKIIQANGYSFINIEHGQAVSLLKTFQNTVELIIVREVSS

SEQ ID NO: 32751 - protein, 1272 aa, Artificial Sequence
  Synthetic polypeptide
GVAQACNLSTLGDRGIQEFPENIKNCKVLTIVEASVNPISKLPDGFSQLLNLTQLYLNDAFLEFLPANFGRLTKLQILELRENQLKMLPKTMNRLTQLERLDLGSNEFTEVPEVLEQLSGLKEFWMDANRLTFIPGFIGSLKQLTYLDVSKNNIEMVEEGISTCENLQDLLLSSNSLQQLPETIGSLKNITTLKIDENQLMYLPDSIGGLISVEELDCSFNEVEALPSSIGQLTNLRTFAADHNYLQQLPPEIGSWKNITVLFLHSNKLETLPEEMGDMQKLKVINLSDNRLKNLPFSFTKLQQLTAMWLSDNQSKPLIPLQKETDSETQKMVLTNYMFPQQPRTEDVMFISDNESFNPSLWEEQRKQRAQVAFECDEDKDEREAPPREGNLKRYPTPYPDELKNMVKTVQTIVHRLKDEETNEDSGRDLKPHEDQQDINKDVGVKTSESTTTVKSKVDEREKYMIGNSVQKISEPEAEISPGSLPVTANMKASENLKHIVNHDDVFEESEELSSDEEMKMAEMRPPLIETSINQPKVVALSNNKKDDTKETDSLSDEVTHNSNQNNSNCSSPSRMSDSVSLNTDSSQDTSLCSPVKQTHIDINSKIRQEDENFNSLLQNGDILNSSTEEKFKAHDKKDFNLPEYDLNVEERLVLIEKSVDSTATADDTHKLDHINMNLNKLITNDTFQPEIMERSKTQDIVLGTSFLSINSKEETEHLENGNKYPNLESVNKVNGHSEETSQSPNRTEPHDSDCSVDLGISKSTEDLSPQKSGPVGSVVKSHSITNMEIGGLKIYDILSDNGPQQPSTTVKITSAVDGKNIVRSKSATLLYDQPLQVFTGSSSSSDLISGTKAIFKFDSNHNPEEPNIIRGPTSGPQSAPQIYGPPQYNIQYSSSAAVKDTLWHSKQNPQIDHASFPPQLLPRSESTENQSYAKHSANMNFSNHNNVRANTAYHLHQRLGPARHGEMWAISPNDRLIPAVTRSTIQRQSSVSSTASVNLGDPGSTRRAQIPEGDYLSYREFHSAGRTPPMMPGSQRPLSARTYSIDGPNASRPQSARPSINEIPERTMSVSDFNYSRTSPSKRPNARVGSEHSLLDPPGKSKVPRDWREQVLRHIEAKKLEKMPLSNGQMGQPLRPQASVARHPSREQLIDYLMLKVAHQPPYTQPHCSPRQGHELAKQEIRVRVEKDPELGFSISGGVGGRGNPFRPDDDGIFVTRVQPEGPASKLLQPGDKIIQANGYSFINIEHGQAVSLLKTFQNTVELIIVREVSS

SEQ ID NO: 32752 - protein, 1258 aa, Artificial Sequence
  Synthetic polypeptide
GVAQACNLSTLGDRGIQEFPENIKNCKVLTIVEASVNPISKLPDGFSQLLNLTQLYLNDAFLEFLPANFGRLTKLQILELRENQLKMLPKTMNRLTQLERLDLGSNEFTEVPEVLEQLSGLKEFWMDANRLTFIPGFIGSLKQLTYLDVSKNNIEMVEEGISTCENLQDLLLSSNSLQQLPETIGSLKNITTLKIDENQLMYLPDSIGGLISVEELDCSFNEVEALPSSIGQLTNLRTFAADHNYLQQLPPEIGSWKNITVLFLHSNKLETLPEEMGDMQKLKVINLSDNRLKNLPFSFTKLQQLTAMWLSDNQSKPLIPLQKETDSETQKMVLTNYMFPQQPRTEDVMFISDNESFNPSLWEEQRKQRAQVAFECDEDKDEREAPPREGNLKRYPTPYPDELKNMVKTVQTIVHRLKDEETNEDSGRDLKPHEDQQDINKDVGVKTSESTTTVKSKVDEREKYMIGNSVQKISEPEAEISPGSLPVTANMKASENLKHIVNHDDVFEESEELSSDEEMKMAEMRPPLIETSINQPKVVALSNNKKDDTKETDSLSDEVTHNSNQNNSNCSSPSRMSDSVSLNTDSSQDTSLCSPVKQTHIDINSKIRQEDENFNSLLQNGDILNSSTEEKFKAHDKKDFNLPEYDLNVEERLVLIEKSVDSTATADDTHKLDHINMNLNKLITNDTFQPEIMERSKTQDIVLGTSFLSINSKEETEHLENGNKYPNLESVNKVNGHSEETSQSPNRTEPHDSDCSVDLGISKSTEDLSPQKSGPVGSVVKSHSITNMEIGGLKIYDILSDNGPQQPSTTVKITSAVDGKNIVRSKSATLLYDQPLQVFTGSSSSSDLISGTKAIFKFDSNHNPEEPNIIRGPTSGPQSAPQIYGPPQYNIQYSSSAAVKDTLWHSKQNPQIDHASFPPQLLPRSESTENQSYAKHSANMNFSNHNNVRANTAYHLHQRLGPARHGEMWAISPNDRLIPAVTRSTIQRQSSVSSTASVNLGDPGSTRRAQIPEGDYLSYREFHSAGRTPPMMPGSQRPLSARTYSIDGPNASRPQSARPSINEIPERTMSVSDFNYSRTSPSKRPNARVGSEHSLLDPPGKSKVPRDWREQVLRHIEAKKLEKMPLSNGQMGQPLRPQANYSQIHHPPQASVARHPSREQLIDYLMLKVAHQPPYTQPHCSPRQGHELAKQEIRVRVEKDPELGFSISGGVGGRGNPFRPDDDANGYSFINIEHGQAVSLLKTFQNTVELIIVREVSS

SEQ ID NO: 32753 - protein, 1279 aa, Artificial Sequence
  Synthetic polypeptide
GVAQACNLSTLGDRGIQEFPENIKNCKVLTIVEASVNPISKLPDGFSQLLNLTQLYLNDAFLEFLPANFGRLTKLQILELRENQLKMLPKTMNRLTQLERLDLGSNEFTEVPEVLEQLSGLKEFWMDANRLTFIPGFIGSLKQLTYLDVSKNNIEMVEEGISTCENLQDLLLSSNSLQQLPETIGSLKNITTLKIDENQLMYLPDSIGGLISVEELDCSFNEVEALPSSIGQLTNLRTFAADHNYLQQLPPEIGSWKNITVLFLHSNKLETLPEEMGDMQKLKVINLSDNRLKNLPFSFTKLQQLTAMWLSDNQSKPLIPLQKETDSETQKMVLTNYMFPQQPRTEDVMFISDNESFNPSLWEEQRKQRAQVAFECDEDKDEREAPPREGNLKRYPTPYPDELKNMVKTVQTIVHRLKDEETNEDSGRDLKPHEDQQDINKDTSESTTTVKSKVDEREKYMIGNSVQKISEPEAEISPGSLPVTANMKASENLKHIVNHDDVFEESEELSSDEEMKMAEMRPPLIETSINQPKVVALSNNKKDDTKETDSLSDEVTHNSNQNNSNCSSPSRMSDSVSLNTDSSQDTSLCSPVKQTHIDINSKIRQEDENFNSLLQNGDILNSSTEEKFKAHDKKDFNLPEYDLNVEERLVLIEKSVDSTATADDTHKLDHINMNLNKLITNDTFQPEIMERSKTQDIVLGTSFLSINSKEETEHLENGNKYPNLESVNKVNGHSEETSQSPNRTEPHDSDCSVDLGISKSTEDLSPQKSGPVGSVVKSHSITNMEIGGLKIYDILSDNGPQQPSTTVKITSAVDGKNIVRSKSATLLYDQPLQVFTGSSSSSDLISGTKAIFKFDSNHNPEEPNIIRGPTSGPQSAPQIYGPPQYNIQYSSSAAVKDTLWHSKQNPQIDHASFPPQLLPRSESTENQSYAKHSANMNFSNHNNVRANTAYHLHQRLGPARHGEMWAISPNDRLIPAVTRSTIQRQSSVSSTASVNLGDPGSTRRAQIPEGDYLSYREFHSAGRTPPMMPGSQRPLSARTYSIDGPNASRPQSARPSINEIPERTMSVSDFNYSRTSPSKRPNARVGSEHSLLDPPGKSKVPRDWREQVLRHIEAKKLEKMPLSNGQMGQPLRPQANYSQIHHPPQASVARHPSREQLIDYLMLKVAHQPPYTQPHCSPRQGHELAKQEIRVRVEKDPELGFSISGGVGGRGNPFRPDDDGIFVTRVQPEGPASKLLQPGDKIIQANGYSFINIEHGQAVSLLKTFQNTVELIIVREVSS

SEQ ID NO: 32754 - protein, 1331 aa, Artificial Sequence
  Synthetic polypeptide
GVAQACNLSTLGDRGIQEFPENIKNCKVLTIVEASVNPISKLPDGFSQLLNLTQLYLNDAFLEFLPANFGRLTKLQILELRENQLKMLPKTMNRLTQLERLDLGSNEFTEVPEVLEQLSGLKEFWMDANRLTFIPGFIGSLKQLTYLDVSKNNIEMVEEGISTCENLQDLLLSSNSLQQLPETIGSLKNITTLKIDENQLMYLPDSIGGLISVEELDCSFNEVEALPSSIGQLTNLRTFAADHNYLQQLPPEIGSWKNITVLFLHSNKLETLPEEMGDMQKLKVINLSDNRLKNLPFSFTKLQQLTAMWLSDNQSKPLIPLQKETDSETQKMVLTNYMFPQQPRTEDVMFISDNESFNPSLWEEQRKQRAQVAFECDEDKDEREAPPREGNLKRYPTPYPDELKNMVKTVQTIVHRLKDEETNEDSGRDLKPHEDQQDINKDVGVKTSESTTTVKSKVDEREKYMIGNSVQKISEPEAEISPGSLPVTANMKASENLKHIVNHDDVFEESEELSSDEEMKMAEMRPPLIETSINQPKVVALSNNKKDDTKETDSLSDEVTHNSNQNNSNCSSPSRMSDSVSLNTDSSQDTSLCSPVKQTHIDINSKIRQEDENFNSLLQNGDILNSSTEEKFKAHDKKDFNLPEYDLNVEERLVLIEKSVDSTATADDTHKLDHINMNLNKLITNDTFQPEIMERSKTQDIVLGTSFLSINSKEETEHLENGNKYPNLESVNKVNGHSEETSQSPNRTEPHDSDCSVDLGISKSTEDLSPQKSGPVGSVVKSHSITNMEIGGLKIYDILSDNGPQQPSTTVKITSAVDGKNIVRSKSATLLYDQPLQVFTGSSSSSDLISGTKAIFKFDSNHNPEEPNIIRGPTSGPQSAPQIYGPPQYNIQYSSSAAVKDTLWHSKQNPQIDHASFPPQLLPRSESTENQSYAKHSANMNFSNHNNVRANTAYHLHQRLGPARHGEMWAISPNDRLIPAVTRSTIQRQSSVSSTASVNLGDPGSTRRAQIPEGDYLSYREFHSAGRTPPMMPGSQRPLSARTYSIDGPNASRPQSARPSINEIPERTMSVSDFNYSRTSPSKRPNARVGSEHSLLDPPGKSKVPRDWREQVLRHIEAKKLEKSMLSRSFNSNFTTVSSFHCGSSRDLHGSQGSLALSVADRRGSGGHIFRMPLSNGQMGQPLRPQANYSQIHHPPQASVARHPSREQLIDYLMLKVAHQPPYTQPHCSPRQGHELAKQEIRVRVEKDPELGFSISGGVGGRGNPFRPDDDGIFVTRVQPEGPASKLLQPGDKIIQANGYSFINIEHGQAVSLLKTFQNTVELIIVREVSS

SEQ ID NO: 32755 - protein, 2520 aa, Artificial Sequence
  Synthetic polypeptide
GTGFISLGSARQWAQLDHILSPPPMPFRKCSNPDVASGPGKSLKYKRQLSEDGRQLRRGSLGGALTGRYLLPNPVAGQAWPASAETSNLVRMRSQALGQSAPSLTASLKELSLPRRGSFCRTSNRKSLIGNGQSPALPRPHSPLSAHAGNSPQDSPRNFSPSASAHFSFARSLNRTDGRRWSLASLPSSGYGTNTPSSTVSSSCSSQEKLHQLPYQPTPDELHFLSKHFCTTESIATENRCRNTPMRPRSRSLSPGRSPACCDHEIIMMNHVYKERFPKATAQMEERLKEIITSYSPDNVLPLADGVLSFTHHQIIELARDCLDKSHQGLITSRYFLELQHKLDKLLQEAHDRSESGELAFIKQLVRKILIVIARPARLLECLEFDPEEFYYLLEAAEGHAKEGQGIKTDIPRYIISQLGLNKDPLEEMAHLGNYDSGTAETPETDESVSSSNASLKLRRKPRESDFETIKLISNGAYGAVYFVRHKESRQRFAMKKINKQNLILRNQIQQAFVERDILTFAENPFVVSMYCSFETRRHLCMVMEYVEGGDCATLMKNMGPLPVDMARMYFAETVLALEYLHNYGIVHRDLKPDNLLVTSMGHIKLTDFGLSKVGLMSMTTNLYEGHIEKDAREFLDKQVCGTPEYIAPEVILRQGYGKPVDWWAMGIILYEFLVGCVPFFGDTPEELFGQVISDEINWPEKDEAPPPDAQDLITLLLRQNPLERLGTGGAYEVKQHRFFRSLDWNSLLRQKAEFIPQLESEDDTSYFDTRSEKYHHMETEEEDDTNDEDFNVEIRQFSSCSHRFSKVFSSIDRITQNSAEEKEDSVDKTKSTTLPSTETLSWSSEYSEMQQLSTSNSSDTESNRHKLSSGLLPKLAISTEGEQDEAASCPGDPHEEPGKPALPPEECAQEEPEVTTPASTISSSTLSVGSFSEHLDQINGRSECVDSTDNSSKPSSEPASHMARQRLESTEKKKISGKVTKSLSASALSLMIPGDMFAVSPLGSPMSPHSLSSDPSSSRDSSPSRDSSAASASPHQPIVIHSSGKNYGFTIRAIRVYVGDSDIYTVHHIVWNVEEGSPACQAGLKAGDLITHINGEPVHGLVHTEVIELLLKSGNKVSITTTPFENTSIKTGPARRNSYKSRMVRRSKKSKKKESLERRRSLFKKLAKQPSPLLHTSRSFSCLNRSLSSGESLPGSPTHSLSPRSPTPSYRSTPDFPSGTNSSQSSSPSSSAPNSPAGSGHIRPSTLHGLAPKLGGQRYRSGRRKSAGNIPLSPLARTPSPTPQPTSPQRSPSPLLGHSLGNSKIAQAFPSKMHSPPTIVRHIVRPKSAEPPRSPLLKRVQSEEKLSPSYGSDKKHLCSRKHSLEVTQEEVQREQSQREAPLQSLDENVCDVPPLSRARPVEQGCLKRPVSRKVGRQESVDDLDRDKLKAKVVVKKADGFPEKQESHQKSHGPGSDLENFALFKLEEREKKVYPKAVERSSTFENKASMQEAPPLGSLLKDALHKQASVRASEGAMSDGRVPAEHRQGGGDFRRAPAPGTLQDGLCHSLDRGISGKGEGTEKSSQAKELLRCEKLDSKLANIDYLRKKMSLEDKEDNLCPVLKPKMTAGSHECLPGNPVRPTGGQQEPPPASESRAFVSSTHAAQMSAVSFVPLKALTGRVDSGTEKPGLVAPESPVRKSPSEYKLEGRSVSCLKPIEGTLDIALLSGPQASKTELPSPESAQSPSPSGDVRASVPPVLPSSSGKKNDTTSARELSPSSLKMNKSYLLEPWFLPPSRGLQNSPAVSLPDPEFKRDRKGPHPTARSPGTVMESNPQQREGSSPKHQDHTTDPKLLTCLGQNLHSPDLARPRCPLPPEASPSREKPGLRESSERGPPTARSERSAARADTCREPSMELCFPETAKTSDNSKNLLSVGRTHPDFYTQTQAMEKAWAPGGKTNHKDGPGEARPPPRDNSSLHSAGIPCEKELGKVRRGVEPKPEALLARRSLQPPGIESEKSEKLSSFPSLQKDGAKEPERKEQPLQRHPSSIPPPPLTAKDLSSPAARQHCSSPSHASGREPGAKPSTAEPSSSPQDPPKPVAAHSESSSHKPRPGPDPGPPKTKHPDRSLSSQKPSVGATKGKEPATQSLGGSSREGKGHSKSGPDVFPATPGSQNKASDGIGQGEGGPSVPLHTDRAPLDAKPQPTSGGRPLEVLEKPVHLPRPGHPGPSEPADQKLSAVGEKQTLSPKHPKPSTVKDCPTLCKQTDNRQTDKSPSQPAANTDRRAEGKKCTEALYAPAEGDKLEAGLSFVHSENRLKGAERPAAGVGKGFPEARGKGPGPQKPPTEADKPNGMKRSPSATGQSSFRSTALPEKSLSCSSSFPETRAGVREASAASSDTSSAKAAGGMLELPAPSNRDHRKAQPAGEGRTHMTKSDSLPSFRVSTLPLESHHPDPNTMGGASHRDRALSVTATVGETKGKDPAPAQPPPARKQNVGRDVTKPSPAPNTDRPISLSNEKDFVVRQRRGKESLRSSPHKKAL

SEQ ID NO: 32756 - protein, 35 aa, Artificial Sequence
  Synthetic polypeptide
GVPDSGRSLTTYYPLHPCRFGNAATQMWLLALENH

SEQ ID NO: 32757 - protein, 22 aa, Artificial Sequence
  Synthetic polypeptide
FLHFHLRYRVHLTRECQTVGAA

SEQ ID NO: 32758 - protein, 2517 aa, Artificial Sequence
  Synthetic polypeptide
GTGFISLGSARQWAQLDHILSPPPMPFRKCSNPDVASGPGKSLKYKRQLSEDGRQLRRGSLGGALTGRYLLPNPVAGQAWPASAETSNLVRMRSQALGQSAPSLTASLKELSLPRRGSFCRTSNRKSLIGNGQSPALPRPHSPLSAHAGNSPQDSPRNFSPSASAHFSFARRTDGRRWSLASLPSSGYGTNTPSSTVSSSCSSQEKLHQLPYQPTPDELHFLSKHFCTTESIATENRCRNTPMRPRSRSLSPGRSPACCDHEIIMMNHVYKERFPKATAQMEERLKEIITSYSPDNVLPLADGVLSFTHHQIIELARDCLDKSHQGLITSRYFLELQHKLDKLLQEAHDRSESGELAFIKQLVRKILIVIARPARLLECLEFDPEEFYYLLEAAEGHAKEGQGIKTDIPRYIISQLGLNKDPLEEMAHLGNYDSGTAETPETDESVSSSNASLKLRRKPRESDFETIKLISNGAYGAVYFVRHKESRQRFAMKKINKQNLILRNQIQQAFVERDILTFAENPFVVSMYCSFETRRHLCMVMEYVEGGDCATLMKNMGPLPVDMARMYFAETVLALEYLHNYGIVHRDLKPDNLLVTSMGHIKLTDFGLSKVGLMSMTTNLYEGHIEKDAREFLDKQVCGTPEYIAPEVILRQGYGKPVDWWAMGIILYEFLVGCVPFFGDTPEELFGQVISDEINWPEKDEAPPPDAQDLITLLLRQNPLERLGTGGAYEVKQHRFFRSLDWNSLLRQKAEFIPQLESEDDTSYFDTRSEKYHHMETEEEDDTNDEDFNVEIRQFSSCSHRFSKVFSSIDRITQNSAEEKEDSVDKTKSTTLPSTETLSWSSEYSEMQQLSTSNSSDTESNRHKLSSGLLPKLAISTEGEQDEAASCPGDPHEEPGKPALPPEECAQEEPEVTTPASTISSSTLSVGSFSEHLDQINGRSECVDSTDNSSKPSSEPASHMARQRLESTEKKKISGKVTKSLSASALSLMIPGDMFAVSPLGSPMSPHSLSSDPSSSRDSSPSRDSSAASASPHQPIVIHSSGKNYGFTIRAIRVYVGDSDIYTVHHIVWNVEEGSPACQAGLKAGDLITHINGEPVHGLVHTEVIELLLKSGNKVSITTTPFENTSIKTGPARRNSYKSRMVRRSKKSKKKESLERRRSLFKKLAKQPSPLLHTSRSFSCLNRSLSSGESLPGSPTHSLSPRSPTPSYRSTPDFPSGTNSSQSSSPSSSAPNSPAGSGHIRPSTLHGLAPKLGGQRYRSGRRKSAGNIPLSPLARTPSPTPQPTSPQRSPSPLLGHSLGNSKIAQAFPSKMHSPPTIVRHIVRPKSAEPPRSPLLKRVQSEEKLSPSYGSDKKHLCSRKHSLEVTQEEVQREQSQREAPLQSLDENVCDVPPLSRARPVEQGCLKRPVSRKVGRQESVDDLDRDKLKAKVVVKKADGFPEKQESHQKSHGPGSDLENFALFKLEEREKKVYPKAVERSSTFENKASMQEAPPLGSLLKDALHKQASVRASEGAMSDGRVPAEHRQGGGDFRRAPAPGTLQDGLCHSLDRGISGKGEGTEKSSQAKELLRCEKLDSKLANIDYLRKKMSLEDKEDNLCPVLKPKMTAGSHECLPGNPVRPTGGQQEPPPASESRAFVSSTHAAQMSAVSFVPLKALTGRVDSGTEKPGLVAPESPVRKSPSEYKLEGRSVSCLKPIEGTLDIALLSGPQASKTELPSPESAQSPSPSGDVRASVPPVLPSSSGKKNDTTSARELSPSSLKMNKSYLLEPWFLPPSRGLQNSPAVSLPDPEFKRDRKGPHPTARSPGTVMESNPQQREGSSPKHQDHTTDPKLLTCLGQNLHSPDLARPRCPLPPEASPSREKPGLRESSERGPPTARSERSAARADTCREPSMELCFPETAKTSDNSKNLLSVGRTHPDFYTQTQAMEKAWAPGGKTNHKDGPGEARPPPRDNSSLHSAGIPCEKELGKVRRGVEPKPEALLARRSLQPPGIESEKSEKLSSFPSLQKDGAKEPERKEQPLQRHPSSIPPPPLTAKDLSSPAARQHCSSPSHASGREPGAKPSTAEPSSSPQDPPKPVAAHSESSSHKPRPGPDPGPPKTKHPDRSLSSQKPSVGATKGKEPATQSLGGSSREGKGHSKSGPDVFPATPGSQNKASDGIGQGEGGPSVPLHTDRAPLDAKPQPTSGGRPLEVLEKPVHLPRPGHPGPSEPADQKLSAVGEKQTLSPKHPKPSTVKDCPTLCKQTDNRQTDKSPSQPAANTDRRAEGKKCTEALYAPAEGDKLEAGLSFVHSENRLKGAERPAAGVGKGFPEARGKGPGPQKPPTEADKPNGMKRSPSATGQSSFRSTALPEKSLSCSSSFPETRAGVREASAASSDTSSAKAAGGMLELPAPSNRDHRKAQPAGEGRTHMTKSDSLPSFRVSTLPLESHHPDPNTMGGASHRDRALSVTATVGETKGKDPAPAQPPPARKQNVGRDVTKPSPAPNTDRPISLSNEKDFVVRQRRGKESLRSSPHKKAL

SEQ ID NO: 32759 - protein, 144 aa, Artificial Sequence
  Synthetic polypeptide
GTGFISLGSARQWAQLDHILSPPPMPFRKCSNPDVASGPGKSLKYKRQLSEDGRQLRRGSLGGALTGRYLLPNPVAGQAWPASAETSNLVRMRSQALGQSAPSLTASLKELSLPRRGSLIDSQKWNCLVKRPVCPNAGRTSPLG

SEQ ID NO: 32760 - protein, 132 aa, Artificial Sequence
  Synthetic polypeptide
GTGFISLGSARQWAQLDHILSPPPMPFRKCSNPDVASGPGKSLKYKRQLSEDGRQLRRGSLGGALTGRYLLPNPVAGQAWPASAETSNLVRMRSQALGQSAPSLTASLKELSLPRRGSFPVCPNAGRTSPLG

SEQ ID NO: 32761 - protein, 15 aa, Artificial Sequence
  Synthetic polypeptide
FEYFIAFYCCFRKQL

SEQ ID NO: 32762 - protein, 14 aa, Artificial Sequence
  Synthetic polypeptide
MSTSLLFTVVSESN

SEQ ID NO: 32763 - protein, 13 aa, Artificial Sequence
  Synthetic polypeptide
VLHCFLLLFQKAT

SEQ ID NO: 32764 - protein, 2409 aa, Artificial Sequence
  Synthetic polypeptide
GLPSHAELCRTSNRKSLIGNGQSPALPRPHSPLSAHAGNSPQDSPRNFSPSASAHFSFARSLNRTDGRRWSLASLPSSGYGTNTPSSTVSSSCSSQEKLHQLPYQPTPDELHFLSKHFCTTESIATENRCRNTPMRPRSRSLSPGRSPACCDHEIIMMNHVYKERFPKATAQMEERLKEIITSYSPDNVLPLADGVLSFTHHQIIELARDCLDKSHQGLITSRYFLELQHKLDKLLQEAHDRSESGELAFIKQLVRKILIVIARPARLLECLEFDPEEFYYLLEAAEGHAKEGQGIKTDIPRYIISQLGLNKDPLEEMAHLGNYDSGTAETPETDESVSSSNASLKLRRKPRESDFETIKLISNGAYGAVYFVRHKESRQRFAMKKINKQNLILRNQIQQAFVERDILTFAENPFVVSMYCSFETRRHLCMVMEYVEGGDCATLMKNMGPLPVDMARMYFAETVLALEYLHNYGIVHRDLKPDNLLVTSMGHIKLTDFGLSKVGLMSMTTNLYEGHIEKDAREFLDKQVCGTPEYIAPEVILRQGYGKPVDWWAMGIILYEFLVGCVPFFGDTPEELFGQVISDEINWPEKDEAPPPDAQDLITLLLRQNPLERLGTGGAYEVKQHRFFRSLDWNSLLRQKAEFIPQLESEDDTSYFDTRSEKYHHMETEEEDDTNDEDFNVEIRQFSSCSHRFSKVFSSIDRITQNSAEEKEDSVDKTKSTTLPSTETLSWSSEYSEMQQLSTSNSSDTESNRHKLSSGLLPKLAISTEGEQDEAASCPGDPHEEPGKPALPPEECAQEEPEVTTPASTISSSTLSVGSFSEHLDQINGRSECVDSTDNSSKPSSEPASHMARQRLESTEKKKISGKVTKSLSASALSLMIPGDMFAVSPLGSPMSPHSLSSDPSSSRDSSPSRDSSAASASPHQPIVIHSSGKNYGFTIRAIRVYVGDSDIYTVHHIVWNVEEGSPACQAGLKAGDLITHINGEPVHGLVHTEVIELLLKSGNKVSITTTPFENTSIKTGPARRNSYKSRMVRRSKKSKKKESLERRRSLFKKLAKQPSPLLHTSRSFSCLNRSLSSGESLPGSPTHSLSPRSPTPSYRSTPDFPSGTNSSQSSSPSSSAPNSPAGSGHIRPSTLHGLAPKLGGQRYRSGRRKSAGNIPLSPLARTPSPTPQPTSPQRSPSPLLGHSLGNSKIAQAFPSKMHSPPTIVRHIVRPKSAEPPRSPLLKRVQSEEKLSPSYGSDKKHLCSRKHSLEVTQEEVQREQSQREAPLQSLDENVCDVPPLSRARPVEQGCLKRPVSRKVGRQESVDDLDRDKLKAKVVVKKADGFPEKQESHQKSHGPGSDLENFALFKLEEREKKVYPKAVERSSTFENKASMQEAPPLGSLLKDALHKQASVRASEGAMSDGRVPAEHRQGGGDFRRAPAPGTLQDGLCHSLDRGISGKGEGTEKSSQAKELLRCEKLDSKLANIDYLRKKMSLEDKEDNLCPVLKPKMTAGSHECLPGNPVRPTGGQQEPPPASESRAFVSSTHAAQMSAVSFVPLKALTGRVDSGTEKPGLVAPESPVRKSPSEYKLEGRSVSCLKPIEGTLDIALLSGPQASKTELPSPESAQSPSPSGDVRASVPPVLPSSSGKKNDTTSARELSPSSLKMNKSYLLEPWFLPPSRGLQNSPAVSLPDPEFKRDRKGPHPTARSPGTVMESNPQQREGSSPKHQDHTTDPKLLTCLGQNLHSPDLARPRCPLPPEASPSREKPGLRESSERGPPTARSERSAARADTCREPSMELCFPETAKTSDNSKNLLSVGRTHPDFYTQTQAMEKAWAPGGKTNHKDGPGEARPPPRDNSSLHSAGIPCEKELGKVRRGVEPKPEALLARRSLQPPGIESEKSEKLSSFPSLQKDGAKEPERKEQPLQRHPSSIPPPPLTAKDLSSPAARQHCSSPSHASGREPGAKPSTAEPSSSPQDPPKPVAAHSESSSHKPRPGPDPGPPKTKHPDRSLSSQKPSVGATKGKEPATQSLGGSSREGKGHSKSGPDVFPATPGSQNKASDGIGQGEGGPSVPLHTDRAPLDAKPQPTSGGRPLEVLEKPVHLPRPGHPGPSEPADQKLSAVGEKQTLSPKHPKPSTVKDCPTLCKQTDNRQTDKSPSQPAANTDRRAEGKKCTEALYAPAEGDKLEAGLSFVHSENRLKGAERPAAGVGKGFPEARGKGPGPQKPPTEADKPNGMKRSPSATGQSSFRSTALPEKSLSCSSSFPETRAGVREASAASSDTSSAKAAGGMLELPAPSNRDHRKAQPAGEGRTHMTKSDSLPSFRVSTLPLESHHPDPNTMGGASHRDRALSVTATVGETKGKDPAPAQPPPARKQNVGRDVTKPSPAPNTDRPISLSNEKDFVVRQRRGKESLRSSPHKKAL

SEQ ID NO: 32765 - protein, 48 aa, Artificial Sequence
  Synthetic polypeptide
GASAFTRHFFFLLQCEIECVCFPFRHDCEFPEASQAMLNFAEQATGKA

SEQ ID NO: 32766 - protein, 32 aa, Artificial Sequence
  Synthetic polypeptide
TLPNKQPEKLNRQWAVTSIASTTLTSLCSCRK

SEQ ID NO: 32767 - protein, 2406 aa, Artificial Sequence
  Synthetic polypeptide
GLPSHAELCRTSNRKSLIGNGQSPALPRPHSPLSAHAGNSPQDSPRNFSPSASAHFSFARRTDGRRWSLASLPSSGYGTNTPSSTVSSSCSSQEKLHQLPYQPTPDELHFLSKHFCTTESIATENRCRNTPMRPRSRSLSPGRSPACCDHEIIMMNHVYKERFPKATAQMEERLKEIITSYSPDNVLPLADGVLSFTHHQIIELARDCLDKSHQGLITSRYFLELQHKLDKLLQEAHDRSESGELAFIKQLVRKILIVIARPARLLECLEFDPEEFYYLLEAAEGHAKEGQGIKTDIPRYIISQLGLNKDPLEEMAHLGNYDSGTAETPETDESVSSSNASLKLRRKPRESDFETIKLISNGAYGAVYFVRHKESRQRFAMKKINKQNLILRNQIQQAFVERDILTFAENPFVVSMYCSFETRRHLCMVMEYVEGGDCATLMKNMGPLPVDMARMYFAETVLALEYLHNYGIVHRDLKPDNLLVTSMGHIKLTDFGLSKVGLMSMTTNLYEGHIEKDAREFLDKQVCGTPEYIAPEVILRQGYGKPVDWWAMGIILYEFLVGCVPFFGDTPEELFGQVISDEINWPEKDEAPPPDAQDLITLLLRQNPLERLGTGGAYEVKQHRFFRSLDWNSLLRQKAEFIPQLESEDDTSYFDTRSEKYHHMETEEEDDTNDEDFNVEIRQFSSCSHRFSKVFSSIDRITQNSAEEKEDSVDKTKSTTLPSTETLSWSSEYSEMQQLSTSNSSDTESNRHKLSSGLLPKLAISTEGEQDEAASCPGDPHEEPGKPALPPEECAQEEPEVTTPASTISSSTLSVGSFSEHLDQINGRSECVDSTDNSSKPSSEPASHMARQRLESTEKKKISGKVTKSLSASALSLMIPGDMFAVSPLGSPMSPHSLSSDPSSSRDSSPSRDSSAASASPHQPIVIHSSGKNYGFTIRAIRVYVGDSDIYTVHHIVWNVEEGSPACQAGLKAGDLITHINGEPVHGLVHTEVIELLLKSGNKVSITTTPFENTSIKTGPARRNSYKSRMVRRSKKSKKKESLERRRSLFKKLAKQPSPLLHTSRSFSCLNRSLSSGESLPGSPTHSLSPRSPTPSYRSTPDFPSGTNSSQSSSPSSSAPNSPAGSGHIRPSTLHGLAPKLGGQRYRSGRRKSAGNIPLSPLARTPSPTPQPTSPQRSPSPLLGHSLGNSKIAQAFPSKMHSPPTIVRHIVRPKSAEPPRSPLLKRVQSEEKLSPSYGSDKKHLCSRKHSLEVTQEEVQREQSQREAPLQSLDENVCDVPPLSRARPVEQGCLKRPVSRKVGRQESVDDLDRDKLKAKVVVKKADGFPEKQESHQKSHGPGSDLENFALFKLEEREKKVYPKAVERSSTFENKASMQEAPPLGSLLKDALHKQASVRASEGAMSDGRVPAEHRQGGGDFRRAPAPGTLQDGLCHSLDRGISGKGEGTEKSSQAKELLRCEKLDSKLANIDYLRKKMSLEDKEDNLCPVLKPKMTAGSHECLPGNPVRPTGGQQEPPPASESRAFVSSTHAAQMSAVSFVPLKALTGRVDSGTEKPGLVAPESPVRKSPSEYKLEGRSVSCLKPIEGTLDIALLSGPQASKTELPSPESAQSPSPSGDVRASVPPVLPSSSGKKNDTTSARELSPSSLKMNKSYLLEPWFLPPSRGLQNSPAVSLPDPEFKRDRKGPHPTARSPGTVMESNPQQREGSSPKHQDHTTDPKLLTCLGQNLHSPDLARPRCPLPPEASPSREKPGLRESSERGPPTARSERSAARADTCREPSMELCFPETAKTSDNSKNLLSVGRTHPDFYTQTQAMEKAWAPGGKTNHKDGPGEARPPPRDNSSLHSAGIPCEKELGKVRRGVEPKPEALLARRSLQPPGIESEKSEKLSSFPSLQKDGAKEPERKEQPLQRHPSSIPPPPLTAKDLSSPAARQHCSSPSHASGREPGAKPSTAEPSSSPQDPPKPVAAHSESSSHKPRPGPDPGPPKTKHPDRSLSSQKPSVGATKGKEPATQSLGGSSREGKGHSKSGPDVFPATPGSQNKASDGIGQGEGGPSVPLHTDRAPLDAKPQPTSGGRPLEVLEKPVHLPRPGHPGPSEPADQKLSAVGEKQTLSPKHPKPSTVKDCPTLCKQTDNRQTDKSPSQPAANTDRRAEGKKCTEALYAPAEGDKLEAGLSFVHSENRLKGAERPAAGVGKGFPEARGKGPGPQKPPTEADKPNGMKRSPSATGQSSFRSTALPEKSLSCSSSFPETRAGVREASAASSDTSSAKAAGGMLELPAPSNRDHRKAQPAGEGRTHMTKSDSLPSFRVSTLPLESHHPDPNTMGGASHRDRALSVTATVGETKGKDPAPAQPPPARKQNVGRDVTKPSPAPNTDRPISLSNEKDFVVRQRRGKESLRSSPHKKAL

SEQ ID NO: 32768 - protein, 322 aa, Artificial Sequence
  Synthetic polypeptide
GLPSHAELCRTSNRKSLIGNGQSPALPRPHSPLSAHAGNSPQDSPRNFSPSASAHFSFARRTDGRRWSLASLPSSGYGTNTPSSTVSSSCSSQEKLHQLPYQPTPDELHFLSKHFCTTESIATENRCRNTPMRPRSRSLSPGRSPACCDHEIIMMNHVYKERFPKATAQMEERLKEIITSYSPDNVLPLADGVLSFTHHQIIELARDCLDKSHQGLITSRYFLELQHKLDKLLQEAHDRSESGELAFIKQLVRKILIVIARPARLLECLEFDPEEFYYLLEAAEGHAKEGQGIKTDIPRYIISQLGLNKDPLEGESLGCSYL

SEQ ID NO: 32769 - protein, 2409 aa, Artificial Sequence
  Synthetic polypeptide
GLPSHAELCRTSNRKSLIGNGQSPALPRPHSPLSAHAGNSPQDSPRNFSPSASAHFSFARRNDRTDGRRWSLASLPSSGYGTNTPSSTVSSSCSSQEKLHQLPYQPTPDELHFLSKHFCTTESIATENRCRNTPMRPRSRSLSPGRSPACCDHEIIMMNHVYKERFPKATAQMEERLKEIITSYSPDNVLPLADGVLSFTHHQIIELARDCLDKSHQGLITSRYFLELQHKLDKLLQEAHDRSESGELAFIKQLVRKILIVIARPARLLECLEFDPEEFYYLLEAAEGHAKEGQGIKTDIPRYIISQLGLNKDPLEEMAHLGNYDSGTAETPETDESVSSSNASLKLRRKPRESDFETIKLISNGAYGAVYFVRHKESRQRFAMKKINKQNLILRNQIQQAFVERDILTFAENPFVVSMYCSFETRRHLCMVMEYVEGGDCATLMKNMGPLPVDMARMYFAETVLALEYLHNYGIVHRDLKPDNLLVTSMGHIKLTDFGLSKVGLMSMTTNLYEGHIEKDAREFLDKQVCGTPEYIAPEVILRQGYGKPVDWWAMGIILYEFLVGCVPFFGDTPEELFGQVISDEINWPEKDEAPPPDAQDLITLLLRQNPLERLGTGGAYEVKQHRFFRSLDWNSLLRQKAEFIPQLESEDDTSYFDTRSEKYHHMETEEEDDTNDEDFNVEIRQFSSCSHRFSKVFSSIDRITQNSAEEKEDSVDKTKSTTLPSTETLSWSSEYSEMQQLSTSNSSDTESNRHKLSSGLLPKLAISTEGEQDEAASCPGDPHEEPGKPALPPEECAQEEPEVTTPASTISSSTLSVGSFSEHLDQINGRSECVDSTDNSSKPSSEPASHMARQRLESTEKKKISGKVTKSLSASALSLMIPGDMFAVSPLGSPMSPHSLSSDPSSSRDSSPSRDSSAASASPHQPIVIHSSGKNYGFTIRAIRVYVGDSDIYTVHHIVWNVEEGSPACQAGLKAGDLITHINGEPVHGLVHTEVIELLLKSGNKVSITTTPFENTSIKTGPARRNSYKSRMVRRSKKSKKKESLERRRSLFKKLAKQPSPLLHTSRSFSCLNRSLSSGESLPGSPTHSLSPRSPTPSYRSTPDFPSGTNSSQSSSPSSSAPNSPAGSGHIRPSTLHGLAPKLGGQRYRSGRRKSAGNIPLSPLARTPSPTPQPTSPQRSPSPLLGHSLGNSKIAQAFPSKMHSPPTIVRHIVRPKSAEPPRSPLLKRVQSEEKLSPSYGSDKKHLCSRKHSLEVTQEEVQREQSQREAPLQSLDENVCDVPPLSRARPVEQGCLKRPVSRKVGRQESVDDLDRDKLKAKVVVKKADGFPEKQESHQKSHGPGSDLENFALFKLEEREKKVYPKAVERSSTFENKASMQEAPPLGSLLKDALHKQASVRASEGAMSDGRVPAEHRQGGGDFRRAPAPGTLQDGLCHSLDRGISGKGEGTEKSSQAKELLRCEKLDSKLANIDYLRKKMSLEDKEDNLCPVLKPKMTAGSHECLPGNPVRPTGGQQEPPPASESRAFVSSTHAAQMSAVSFVPLKALTGRVDSGTEKPGLVAPESPVRKSPSEYKLEGRSVSCLKPIEGTLDIALLSGPQASKTELPSPESAQSPSPSGDVRASVPPVLPSSSGKKNDTTSARELSPSSLKMNKSYLLEPWFLPPSRGLQNSPAVSLPDPEFKRDRKGPHPTARSPGTVMESNPQQREGSSPKHQDHTTDPKLLTCLGQNLHSPDLARPRCPLPPEASPSREKPGLRESSERGPPTARSERSAARADTCREPSMELCFPETAKTSDNSKNLLSVGRTHPDFYTQTQAMEKAWAPGGKTNHKDGPGEARPPPRDNSSLHSAGIPCEKELGKVRRGVEPKPEALLARRSLQPPGIESEKSEKLSSFPSLQKDGAKEPERKEQPLQRHPSSIPPPPLTAKDLSSPAARQHCSSPSHASGREPGAKPSTAEPSSSPQDPPKPVAAHSESSSHKPRPGPDPGPPKTKHPDRSLSSQKPSVGATKGKEPATQSLGGSSREGKGHSKSGPDVFPATPGSQNKASDGIGQGEGGPSVPLHTDRAPLDAKPQPTSGGRPLEVLEKPVHLPRPGHPGPSEPADQKLSAVGEKQTLSPKHPKPSTVKDCPTLCKQTDNRQTDKSPSQPAANTDRRAEGKKCTEALYAPAEGDKLEAGLSFVHSENRLKGAERPAAGVGKGFPEARGKGPGPQKPPTEADKPNGMKRSPSATGQSSFRSTALPEKSLSCSSSFPETRAGVREASAASSDTSSAKAAGGMLELPAPSNRDHRKAQPAGEGRTHMTKSDSLPSFRVSTLPLESHHPDPNTMGGASHRDRALSVTATVGETKGKDPAPAQPPPARKQNVGRDVTKPSPAPNTDRPISLSNEKDFVVRQRRGKESLRSSPHKKAL

SEQ ID NO: 32770 - protein, 51 aa, Artificial Sequence
  Synthetic polypeptide
GLPSHAELCRTSNRKSLIGNGQSPALPRPHSPLSAHAGNSPQDSPRNFSPS

SEQ ID NO: 32771 - protein, 144 aa, Artificial Sequence
  Synthetic polypeptide
GLPSHAELCRTSNRKSLIGNGQSPALPRPHSPLSAHAGNSPQDSPRNFSPSASAHFSFARRTDGRRWSLASLPSSGYGTNTPSSTVSSSCSSQEKLHQLPYQPTPDELHFLSKHFCTTESIATENRCRNTPMRPRSRSLSPGRS

SEQ ID NO: 32772 - protein, 143 aa, Artificial Sequence
  Synthetic polypeptide
GLPSHAELCRTSNRKSLIGNGQSPALPRPHSPLSAHAGNSPQDSPRNFSPSASAHFSFARRTDGRRWSLASLPSSGYGTNTPSSTVSSSCSSQEKLHQLPYQPTPDELHFLSKHFCTTESIATENRCRNTPMRPRSRSLSLKG

SEQ ID NO: 32773 - protein, 11 aa, Artificial Sequence
  Synthetic polypeptide
SLQSKRSQQNI

SEQ ID NO: 32774 - protein, 688 aa, Artificial Sequence
  Synthetic polypeptide
DLVIEKSGTSSVILSLLLSPCSVPAPRLPSAMIVSVSSPPQKPSRCQHCASCRACRAKEANKTYNCENLGLSEIPDTLPNTTEFLEFSFNFLPTIHNRTFSRLMNLTFLDLTRCQINWIHEDTFQSHHQLSTLVLTGNPLIFMAETSLNGPKSLKHLFLIQTGISNLEFIPVHNLENLESLYLGSNHISSIKFPKDFPARNLKVLDFQNNAIHYISREDMRSLEQAINLSLNFNGNNVKGIELGAFDSTIFQSLNFGGTPNLSVIFNGLQNSTTQSLWLGTFEDIDDEDISSAMLKGLCEMSVESLNLQEHRFSDISSTTFQCFTQLQELDLTATHLKGLPSGMKGLNLLKKLVLSVNHFDQLCQISAANFPSLTHLYIRGNVKKLHLGVGCLEKLGNLQTLDLSHNDIEASDCCSLQLKNLSHLQTLNLSHNEPLGLQSQAFKECPQLELLDLAFTRLHINAPQSPFQNLHFLQVLNLTYCFLDTSNQHLLAGLPVLRHLNLKGNHFQDGTITKTNLLQTVGSLEVLILSSCGLLSIDQQAFHSLGKMSHVDLSHNSLTCDSIDSLSHLKGIYLNLAANSINIISPRLLPILSQQSTINLSHNPLDCTCSNIHFLTWYKENLHKLEGSEETTCANPPSLRGVKLSDVKLSCGITAIGIFFLIVFLLLLAILLFFAVKYLLRWKYQHI

SEQ ID NO: 32775 - protein, 34 aa, Artificial Sequence
  Synthetic polypeptide
ASQVLPRSQADASTVLPVEPAEQKKPTKHITVKI

SEQ ID NO: 32776 - protein, 26 aa, Artificial Sequence
  Synthetic polypeptide
GQAWRLTPVIPELWEAEAGGSQDTEN

SEQ ID NO: 32777 - protein, 112 aa, Artificial Sequence
  Synthetic polypeptide
SQNFGRPRRADHKIQKIEGLISYRDPHFWRHSASIVAGTIHIQVTSDVLEQRIVQQVTGILKDAGVNNLTIQVEKEAYFQHMSGLSTGFHDVLAMTKQMESMKYCKDGTYIM

SEQ ID NO: 32778 - protein, 28 aa, Artificial Sequence
  Synthetic polypeptide
PGVAAHTCNPRTLGGRGGRITRYRKLKD

SEQ ID NO: 32779 - protein, 216 aa, Artificial Sequence
  Synthetic polypeptide
SEGLGFEFTLGHVRLRAQTKQQLLEYKSMVDASEEKTPEQIMQEKQIEAKIEDLENEIEEVKVAFEIKKLALDRMRLSTALKKNLEKISRQSSVLMDNMKHLLELNKLIMKSQQESWDLEEKLLDIRKKRLQLKQASESKLLEIQTEKNKQKIDLDSMENSERIKIIRQNLQMEIKITTVIQHVFQNLILGSKVNWAEDPALKEIVLQLEKNVDMM

SEQ ID NO: 32780 - protein, 10 aa, Artificial Sequence
  Synthetic polypeptide
GSNSRSVTSG

SEQ ID NO: 32781 - protein, 25 aa, Artificial Sequence
  Synthetic polypeptide
RRARVRIHARSRQAESTDKTTTLRI

SEQ ID NO: 32782 - protein, 197 aa, Artificial Sequence
  Synthetic polypeptide
SEGLGFEFTLGHVRLRAQTKQQLLEYKSMVDASEEKTPEQIMQEKQIEAKIEDLENEIEEVKVAFEIKKLALDSVLMDNMKHLLELNKLIMKSQQESWDLEEKLLDIRKKRLQLKQASESKLLEIQTEKNKQKIDLDSMENSERIKIIRQNLQMEIKITTVIQHVFQNLILGSKVNWAEDPALKEIVLQLEKNVDMM

SEQ ID NO: 32783 - protein, 67 aa, Artificial Sequence
  Synthetic polypeptide
SEGLGFEFTLGHVRLRAQTKQQLLEYKSMVDASEEKTPEQIMQEKQIEAKIEDLENEIEEDETFNCT

SEQ ID NO: 32784 - protein, 191 aa, Artificial Sequence
  Synthetic polypeptide
SEGLGFEFTLGHVRLRAQTKQQLLEYKSMVDASEEKTPEQIMQEKQIEAMRLSTALKKNLEKISRQSSVLMDNMKHLLELNKLIMKSQQESWDLEEKLLDIRKKRLQLKQASESKLLEIQTEKNKQKIDLDSMENSERIKIIRQNLQMEIKITTVIQHVFQNLILGSKVNWAEDPALKEIVLQLEKNVDMM

SEQ ID NO: 32785 - protein, 26 aa, Artificial Sequence
  Synthetic polypeptide
LPHSLKLLKLFLHQRKGEKNDPLERG

SEQ ID NO: 32786 - protein, 29 aa, Artificial Sequence
  Synthetic polypeptide
SSFFISEKERKMTPWREAESTDKTTTLRI

SEQ ID NO: 32787 - protein, 207 aa, Artificial Sequence
  Synthetic polypeptide
PPGERLRAQTKQQLLEYKSMVDASEEKTPEQIMQEKQIEAKIEDLENEIEEVKVAFEIKKLALDRMRLSTALKKNLEKISRQSSVLMDNMKHLLELNKLIMKSQQESWDLEEKLLDIRKKRLQLKQASESKLLEIQTEKNKQKIDLDSMENSERIKIIRQNLQMEIKITTVIQHVFQNLILGSKVNWAEDPALKEIVLQLEKNVDMM

SEQ ID NO: 32788 - protein, 188 aa, Artificial Sequence
  Synthetic polypeptide
PPGERLRAQTKQQLLEYKSMVDASEEKTPEQIMQEKQIEAKIEDLENEIEEVKVAFEIKKLALDSVLMDNMKHLLELNKLIMKSQQESWDLEEKLLDIRKKRLQLKQASESKLLEIQTEKNKQKIDLDSMENSERIKIIRQNLQMEIKITTVIQHVFQNLILGSKVNWAEDPALKEIVLQLEKNVDMM

SEQ ID NO: 32789 - protein, 58 aa, Artificial Sequence
  Synthetic polypeptide
PPGERLRAQTKQQLLEYKSMVDASEEKTPEQIMQEKQIEAKIEDLENEIEEDETFNCT

SEQ ID NO: 32790 - protein, 182 aa, Artificial Sequence
  Synthetic polypeptide
PPGERLRAQTKQQLLEYKSMVDASEEKTPEQIMQEKQIEAMRLSTALKKNLEKISRQSSVLMDNMKHLLELNKLIMKSQQESWDLEEKLLDIRKKRLQLKQASESKLLEIQTEKNKQKIDLDSMENSERIKIIRQNLQMEIKITTVIQHVFQNLILGSKVNWAEDPALKEIVLQLEKNVDMM

SEQ ID NO: 32791 - protein, 23 aa, Artificial Sequence
  Synthetic polypeptide
ALLEAKTRRSLEAKSLRLAWETK

SEQ ID NO: 32792 - protein, 188 aa, Artificial Sequence
  Synthetic polypeptide
PGKQSEEKTPEQIMQEKQIEAKIEDLENEIEEVKVAFEIKKLALDRMRLSTALKKNLEKISRQSSVLMDNMKHLLELNKLIMKSQQESWDLEEKLLDIRKKRLQLKQASESKLLEIQTEKNKQKIDLDSMENSERIKIIRQNLQMEIKITTVIQHVFQNLILGSKVNWAEDPALKEIVLQLEKNVDMM

SEQ ID NO: 32793 - protein, 37 aa, Artificial Sequence
  Synthetic polypeptide
EFEISLGNKVKKKLQNKLCKKSKSKLKLKTWKMKLKR

SEQ ID NO: 32794 - protein, 169 aa, Artificial Sequence
  Synthetic polypeptide
PGKQSEEKTPEQIMQEKQIEAKIEDLENEIEEVKVAFEIKKLALDSVLMDNMKHLLELNKLIMKSQQESWDLEEKLLDIRKKRLQLKQASESKLLEIQTEKNKQKIDLDSMENSERIKIIRQNLQMEIKITTVIQHVFQNLILGSKVNWAEDPALKEIVLQLEKNVDMM

SEQ ID NO: 32795 - protein, 39 aa, Artificial Sequence
  Synthetic polypeptide
PGKQSEEKTPEQIMQEKQIEAKIEDLENEIEEDETFNCT

SEQ ID NO: 32796 - protein, 44 aa, Artificial Sequence
  Synthetic polypeptide
EFEISLGNKVKKKLQNKLCKKSKSKLKLKTWKMKLKRMRLSTAL

SEQ ID NO: 32797 - protein, 163 aa, Artificial Sequence
  Synthetic polypeptide
PGKQSEEKTPEQIMQEKQIEAMRLSTALKKNLEKISRQSSVLMDNMKHLLELNKLIMKSQQESWDLEEKLLDIRKKRLQLKQASESKLLEIQTEKNKQKIDLDSMENSERIKIIRQNLQMEIKITTVIQHVFQNLILGSKVNWAEDPALKEIVLQLEKNVDMM

SEQ ID NO: 32798 - protein, 26 aa, Artificial Sequence
  Synthetic polypeptide
EFEISLGNKVKKKLQNKLCKKSKSKR

SEQ ID NO: 32799 - protein, 175 aa, Artificial Sequence
  Synthetic polypeptide
SQHFEKPSKIEDLENEIEEVKVAFEIKKLALDRMRLSTALKKNLEKISRQSSVLMDNMKHLLELNKLIMKSQQESWDLEEKLLDIRKKRLQLKQASESKLLEIQTEKNKQKIDLDSMENSERIKIIRQNLQMEIKITTVIQHVFQNLILGSKVNWAEDPALKEIVLQLEKNVDMM

SEQ ID NO: 32800 - protein, 28 aa, Artificial Sequence
  Synthetic polypeptide
PGTVTHACNPSTLRSQVKLKTWKMKLKR

SEQ ID NO: 32801 - protein, 156 aa, Artificial Sequence
  Synthetic polypeptide
SQHFEKPSKIEDLENEIEEVKVAFEIKKLALDSVLMDNMKHLLELNKLIMKSQQESWDLEEKLLDIRKKRLQLKQASESKLLEIQTEKNKQKIDLDSMENSERIKIIRQNLQMEIKITTVIQHVFQNLILGSKVNWAEDPALKEIVLQLEKNVDMM

SEQ ID NO: 32802 - protein, 26 aa, Artificial Sequence
  Synthetic polypeptide
SQHFEKPSKIEDLENEIEEDETFNCT

SEQ ID NO: 32803 - protein, 35 aa, Artificial Sequence
  Synthetic polypeptide
PGTVTHACNPSTLRSQVKLKTWKMKLKRMRLSTAL

SEQ ID NO: 32804 - protein, 101 aa, Artificial Sequence
  Synthetic polypeptide
QSKTWSRKINNKVVKPHTPLIRFPDRRDNPKPNVSEALRSAGLPSHSSVISQHSKGSKSPDLLMYQGPPDTAEIIKTLPQKYRRKLVSQEEMEFIQRGGPE

SEQ ID NO: 32805 - protein, 3 aa, Artificial Sequence
  Synthetic polypeptide
IIK

SEQ ID NO: 32806 - protein, 180 aa, Artificial Sequence
  Synthetic polypeptide
AQEVKALVSQVPLHSSLGTPGVGKTTLGKELASKSGLKYINVGDLAREEQLYDGYDEEYDCPILDEDRVVDELDNQMREGGVIVDYHGCDFFPERWFHIVFVLRTDTNVLYERLETRGYNEKKLTDNIQCEIFQVLYEEATASYKEEIVHQLPSNKPEELENNVDQILKWIEQWIKDHNS

SEQ ID NO: 32807 - protein, 51 aa, Artificial Sequence
  Synthetic polypeptide
LPDRLRWEDCLSPGGKGSSEPSSTALQPRYTRGWKNHTRQRTCVKIRTEIH

SEQ ID NO: 32808 - protein, 51 aa, Artificial Sequence
  Synthetic polypeptide
TELLYTLGNLKVHVTCFIANIYCDICFIAAVWNPTLQYLQDTCLDIQVEKY

SEQ ID NO: 32809 - protein, 40 aa, Artificial Sequence
  Synthetic polypeptide
LALLQIFIVIFALLLRSGIQPCSISKTHAWTYKSRSTNHL

SEQ ID NO: 32810 - protein, 255 aa, Artificial Sequence
  Synthetic polypeptide
YLLYCCGLESNPAVSPRHMPGHTSREVLIIFSSLTTCDPSNIYDLIKTLKAAKIRVSVIGLSAEVRVCTVLARETGGTYHVILDESHYKELLTHHLSPPPASSSSECSLIRMGFPQHTIASLSDQDAKPSFSMAHLDGNTEPGLTLGGYFCPQCRAKYCELPVECKICGLTLVSAPHLARSYHHLFPLDAFQEIPLEEYNGERFCYGCQGELKDQHVYVCAVCQNVFCVDCDVFVHDSLHCCPGCIHKIPAPSGV

SEQ ID NO: 32811 - protein, 130 aa, Artificial Sequence
  Synthetic polypeptide
YLLYCCGLESNPAVSPRHMPGHTSREVLIIFSSLTTCDPSNIYDLIKTLKAAKIRVSVIGLSAEVRVCTVLARETGGTYHVILDESHYKELLTHHLSPPPASSSSECSLIRMGFPQHTIASLSDQDAKPS

SEQ ID NO: 32812 - protein, 43 aa, Artificial Sequence
  Synthetic polypeptide
YVSNSKQAEERPRMMILLWMSGGIERPTCLCLCCVPKCFLCGL

SEQ ID NO: 32813 - protein, 11 aa, Artificial Sequence
  Synthetic polypeptide
DDDFVMDVRGN

SEQ ID NO: 32814 - protein, 37 aa, Artificial Sequence
  Synthetic polypeptide
RRNRKPNTTCCLLEVGAERWKSTRTCPPEKHEENPGN

SEQ ID NO: 32815 - protein, 65 aa, Artificial Sequence
  Synthetic polypeptide
KWELNGGNQRELARQKNMKKTQEISKGKRKEDSLTASQRKQRDSEIMQEKQKAANEKKSMQTREK

SEQ ID NO: 32816 - protein, 13 aa, Artificial Sequence
  Synthetic polypeptide
TVEINENLPARKT

SEQ ID NO: 32817 - protein, 113 aa, Artificial Sequence
  Synthetic polypeptide
KWELNGGNQRELARQKNMKKTQEISKGKRKEDSLTASQRKQSSGGQKSESKMSAGPHLPLKAPRENPCFPLPAAGGSRYYLAYGSITPISAFVFVVFFSVFFPSFYEDFCCWI

SEQ ID NO: 32818 - protein, 78 aa, Artificial Sequence
  Synthetic polypeptide
KWELNGGNQRELARQKNMKKTQEISKGKRKEDSLTASQRKQRYGVLLCDPDWSAVPQSRFTASSASQAQVTLPPQPSE

SEQ ID NO: 32819 - protein, 84 aa, Artificial Sequence
  Synthetic polypeptide
KWELNGGNQRELARQKNMKKTQEISKGKRKEDSLTASQRKQSSGGQKSESKMSAGPHLPLKAPRENPCFPLPAAGGSRFHSNLG

SEQ ID NO: 32820 - protein, 279 aa, Artificial Sequence
  Synthetic polypeptide
TCIRKQLWHRGGASWVISKLHIRKSDDSDIWDDTALIKAYDKAVASFKHALKNGDICETSGKPKTTPKRKPAKKNKSQKKNTAASLQQWKVGDKCSAIWSEDGCIYPATIASIDFKRETCVVVYTGYGNREEQNLSDLLSPICEVANNIEQNAQENENESQVSTDESENSRSPGNKSDNIKPKSAPWNSFLPPPPPMPGPRLGPGKPGLKFNGPPPPPPPPPPHLLSCWLPPFPSGPPIIPPPPPICPDSLDDADALGSMLISWYMSGYHTGYYMEMLA

SEQ ID NO: 32821 - protein, 19 aa, Artificial Sequence
  Synthetic polypeptide
SASFTYVRAMILTFGMIQH

SEQ ID NO: 32822 - protein, 291 aa, Artificial Sequence
  Synthetic polypeptide
TCIRKQLWHRGGASWVISKLHIRKSDDSDIWDDTALIKAYDKAVASFKHALKNGDICETSGKPKTTPKRKPAKKNKSQKKNTAASLQQWKVGDKCSAIWSEDGCIYPATIASIDFKRETCVVVYTGYGNREEQNLSDLLSPICEVANNIEQNAQENENESQVSTDESENSRSPGNKSDNIKPKSAPWNSFLPPPPPMPGPRLGPGKPGLKFNGPPPPPPPPPPHLLSCWLPPFPSGPPIIPPPPPICPDSLDDADALGSMLISWYMSGYHTGYYMGFRQNQKEGRCSHSLN

SEQ ID NO: 32823 - protein, 224 aa, Artificial Sequence
  Synthetic polypeptide
TCIRKQLWHRGGASWVISKLHIRKSDDSDIWDDTALIKAYDKAVASFKHALKNGDICETSGKPKTTPKRKPAKKNKSQKKNTAASLQQNENESQVSTDESENSRSPGNKSDNIKPKSAPWNSFLPPPPPMPGPRLGPGKPGLKFNGPPPPPPPPPPHLLSCWLPPFPSGPPIIPPPPPICPDSLDDADALGSMLISWYMSGYHTGYYMGFRQNQKEGRCSHSLN

SEQ ID NO: 32824 - protein, 291 aa, Artificial Sequence
  Synthetic polypeptide
TCIRKQLWHRGGASWVISKLHIRKSDDSDIWDDTALIKAYDKAVASFKHALKNGDICETSGKPKTTPKRKPAKKNKSQKKNTAASLQQWKVGDKCSAIWSEDGCIYPATIASIDFKRETCVVVYTGYGNREEQNLSDLLSPICEVANNIEQNAQENENESQVSTDESENSRSPGNKSDNIKPKSAPWNSFLPPPPPMPGPRLGPGKPGLKFNGPPPPPPPPPPHLLSCWLPPFPSGPPIIPPPPPICPDSLDDADALGSMLISWYMSGYHTGYYMTGFHCVSQDGLNLLTP

SEQ ID NO: 32825 - protein, 259 aa, Artificial Sequence
  Synthetic polypeptide
TCIRKQLWHRGGASWVISKLHIRKSDDSDIWDDTALIKAYDKAVASFKHALKNGDICETSGKPKTTPKRKPAKKNKSQKKNTAASLQQWKVGDKCSAIWSEDGCIYPATIASIDFKRETCVVVYTGYGNREEQNLSDLLSPICEVANNIEQNAQENENESQVSTDESENSRSPGNKSDNIKPKSAPWNSFLPPPPPMPGPRLGPGKIIPPPPPICPDSLDDADALGSMLISWYMSGYHTGYYMGFRQNQKEGRCSHSLN

SEQ ID NO: 32826 - protein, 37 aa, Artificial Sequence; identical to SEQ ID NO: 32814
  Synthetic polypeptide

SEQ ID NO: 32827 - protein, 65 aa, Artificial Sequence; identical to SEQ ID NO: 32815
  Synthetic polypeptide

SEQ ID NO: 32828 - protein, 13 aa, Artificial Sequence
  Synthetic polypeptide
TVEINENLPARKT

SEQ ID NO: 32829 - protein, 113 aa, Artificial Sequence; identical to SEQ ID NO: 32817
  Synthetic polypeptide

SEQ ID NO: 32830 - protein, 78 aa, Artificial Sequence; identical to SEQ ID NO: 32818
  Synthetic polypeptide

SEQ ID NO: 32831 - protein, 84 aa, Artificial Sequence; identical to SEQ ID NO: 32819
  Synthetic polypeptide

SEQ ID NO: 32832 - protein, 279 aa, Artificial Sequence; identical to SEQ ID NO: 32820
  Synthetic polypeptide

SEQ ID NO: 32833 - protein, 19 aa, Artificial Sequence
  Synthetic polypeptide
SASFTYVRAMILTFGMIQH

SEQ ID NO: 32834 - protein, 291 aa, Artificial Sequence; identical to SEQ ID NO: 32822
  Synthetic polypeptide

SEQ ID NO: 32835 - protein, 224 aa, Artificial Sequence; identical to SEQ ID NO: 32823
  Synthetic polypeptide

SEQ ID NO: 32836 - protein, 291 aa, Artificial Sequence; identical to SEQ ID NO: 32824
  Synthetic polypeptide

SEQ ID NO: 32837 - protein, 259 aa, Artificial Sequence; identical to SEQ ID NO: 32825
  Synthetic polypeptide

SEQ ID NO: 32838 - protein, 8 aa, Artificial Sequence
  Synthetic polypeptide
DQPGQQVP

SEQ ID NO: 32839 - protein, 21 aa, Artificial Sequence
  Synthetic polypeptide
AREFETSLGNKFLKYFLTASY

SEQ ID NO: 32840 - protein, 1255 aa, Artificial Sequence
  Synthetic polypeptide
WVRWLTPVIPAFWEAEAGRSLEPGSLRPAWATSSLNIFSLLPTKGRTEHLFFSHILSFHWPAFSSIRLELWINLRCEFLRSKKSSEEITQYIQSYKGFVDITGEHFVNSWVQRELPMASAYCNDSIFAYEELRLDSFKDWPRESAVGVAALAKAGLFYTGIKDIVQCFSCGGCLEKWQEGDDPLDDHTRCFPNCPFLQNMKSSAEVTPDLQSRGELCELLETTSESNLEDSIAVGPIVPEMAQGEAQWFQEAKNLNEQLRAAYTSASFRHMSLLDISSDLATDHLLGCDLSIASKHISKPVQEPLVLPEVFGNLNSVMCVEGEAGSGKTVLLKKIAFLWASGCCPLLNRFQLVFYLSLSSTRPDEGLASIICDQLLEKEGSVTEMCVRNIIQQLKNQVLFLLDDYKEICSIPQVIGKLIQKNHLSRTCLLIAVRTNRARDIRRYLETILEIKAFPFYNTVCILRKLFSHNMTRLRKFMVYFGKNQSLQKIQKTPLFVAAICAHWFQYPFDPSFDDVAVFKSYMERLSLRNKATAEILKATVSSCGELALKGFFSCCFEFNDDDLAEAGVDEDEDLTMCLMSKFTAQRLRPFYRFLSPAFQEFLAGMRLIELLDSDRQEHQDLGLYHLKQINSPMMTVSAYNNFLNYVSSLPSTKAGPKIVSHLLHLVDNKESLENISENDDYLKHQPEISLQMQLLRGLWQICPQAYFSMVSEHLLVLALKTAYQSNTVAACSPFVLQFLQGRTLTLGALNLQYFFDHPESLSLLRSIHFPIRGNKTSPRAHFSVLETCFDKSQVPTIDQDYASAFEPMNEWERNLAEKEDNVKSYMDMQRRASPDLSTGYWKLSPKQYKIPCLEVDVNDIDVVGQDMLEILMTVFSASQRIELHLNHSRGFIESIRPALELSKASVTKCSISKLELSAAEQELLLTLPSLESLEVSGTIQSQDQIFPNLDKFLCLKELSVDLEGNINVFSVIPEEFPNFHHMEKLLIQISAEYDPSKLVKLIQNSPNLHVFHLKCNFFSDFGSLMTMLVSCKKLTEIKFSDSFFQAVPFVASLPNFISLKILNLEGQQFPDEETSEKFAYILGSLSNLEELILPTGDGIYRVAKLIIQQCQQLHCLRVLSFFKTLNDDSVVEIAKVAISGGFQKLENLKLSINHKITEEGYRNFFQALDNMPNLQELDISRHFTECIKAQATTVKSLSQCVLRLPRLIRLNMLSWLLDADDIALLNVMKERHPQSKYLTILQKWILPFSPIIQK

SEQ ID NO: 32841 - protein, 43 aa, Artificial Sequence; identical to SEQ ID NO: 32812
  Synthetic polypeptide

SEQ ID NO: 32842 - protein, 11 aa, Artificial Sequence
  Synthetic polypeptide
DDDFVMDVRGN

SEQ ID NO: 32843 - protein, 255 aa, Artificial Sequence
  Synthetic polypeptide
YLLYCCGLESNPAVSPRHMPGHTSREVLIIFSSLTTCDPSNIYDLIKTLKAAKIRVSVIGLSAEVRVCTVLARETGGTYHVILDESHYKELLTHHVSPPPASSSSECSLIRMGFPQHTIASLSDQDAKPSFSMAHLDGNTEPGLTLGGYFCPQCRAKYCELPVECKICGLTLVSAPHLARSYHHLFPLDAFQEIPLEEYNGERFCYGCQGELKDQHVYVCAVCQNVFCVDCDVFVHDSLHCCPGCIHKIPAPSGV

SEQ ID NO: 32844 - protein, 51 aa, Artificial Sequence; identical to SEQ ID NO: 32808
  Synthetic polypeptide

SEQ ID NO: 32845 - protein, 40 aa, Artificial Sequence; identical to SEQ ID NO: 32809
  Synthetic polypeptide

SEQ ID NO: 32846 - protein, 49 aa, Artificial Sequence
  Synthetic polypeptide
KSASLPANLVGEALRKWALSSEEMLLQRIQIAGQSEGKSEGCACPCGQI

SEQ ID NO: 32847 - protein, 91 aa, Artificial Sequence
  Synthetic polypeptide
GNGRYHLRKCCYSEYRLLAKVREKVKDVPALVAKFDEIYGTLHITGQVTTDSLDAVLCHTPRDRKSHTLLLNKRMVSRRTFQPLSQSLLAE

SEQ ID NO: 32848 - protein, 13 aa, Artificial Sequence
  Synthetic polypeptide
GNAATANTDCWPK

SEQ ID NO: 32849 - protein, 77 aa, Artificial Sequence
  Synthetic polypeptide
GNGRYHLRKCCYSEYRLLAKVREKVKDVPALVAKFDEIYGTLHITGQVTTDSLDAVLCHTPRDRKSHTLLLNKRMVS

SEQ ID NO: 32850 - protein, 18 aa, Artificial Sequence
  Synthetic polypeptide
ICLALGLPILQNANQDGV

SEQ ID NO: 32851 - protein, 915 aa, Artificial Sequence
  Synthetic polypeptide
ARKQPSPDTEYALLLDFPSYRMQTKMEYEWKPDEQGLQQILQLLKESQSPDTTIQRTVQQKLEQLNQYPDFNNYLIFVLTKLKSEDEPTRSLSGLILKNNVKAHFQNFPNGVTDFIKSECLNNIGDSSPLIRATVGILITTIASKGELQNWPDLLPKLCSLLDSEDYNTCEGAFGALQKICEDSAEILDSDVLDRPLNIMIPKFLQFFKHSSPKIRSHAVACVNQFIISRTQALMLHIDSFIENLFALAGDEEPEVRKNVCRALVMLLEVRMDRLLPHMHNIVEYMLQRTQDQDENVALEACEFWLTLAEQPICKDVLVRHLPKLIPVLVNGMKYSDIDIILLKGDVEEDETIPDSEQDIRPRFHRSRTVAQQHDEDGIEEEDDDDDEIDDDDTISDWNLRKCSAAALDVLANVYRDELLPHILPLLKELLFHHEWVVKESGILVLGAIAEGCMQGMIPYLPELIPHLIQCLSDKKALVRSITCWTLSRYAHWVVSQPPDTYLKPLMTELLKRILDSNKRVQEAACSAFATLEEEACTELVPYLAYILDTLVFAFSKYQHKNLLILYDAIGTLADSVGHHLNKPEYIQMLMPPLIQKWNMLKDEDKDLFPLLECLSSVATALQSGFLPYCEPVYQRCVNLVQKTLAQAMLNNAQPDQYEAPDKDFMIVALDLLSGLAEGLGGNIEQLVARSNILTLMYQCMQDKMPEVRQSSFALLGDLTKACFQHVKPCIADFMPILGTNLNPEFISVCNNATWAIGEISIQMGIEMQPYIPMVLHQLVEIINRPNTPKTLLENTAITIGRLGYVCPQEVAPMLQQFIRPWCTSLRNIRDNEEKDSAFRGICTMISVNPSGVIQDFIFFCDAVASWINPKDDLRDMFCKILHGFKNQVGDENWRRFSDQFPLPLKERLAAFYGV

SEQ ID NO: 32852 - protein, 61 aa, Artificial Sequence
  Synthetic polypeptide
LERSLALCLLRTQQEVCELESSPHQILNMPCSWTSHPTECKPRWSMSGNLTSKGFSKSCSC

SEQ ID NO: 32853 - protein, 865 aa, Artificial Sequence
  Synthetic polypeptide
ARKQPSPDTEYALLLDFPSYRMQTKMEYEWKPDEQGLQQILQLLKESQSPDTTIQRTVQQKLEQLNQYPDFNNYLIFVLTKLKSEGILITTIASKGELQNWPDLLPKLCSLLDSEDYNTCEGAFGALQKICEDSAEILDSDVLDRPLNIMIPKFLQFFKHSSPKIRSHAVACVNQFIISRTQALMLHIDSFIENLFALAGDEEPEVRKNVCRALVMLLEVRMDRLLPHMHNIVEYMLQRTQDQDENVALEACEFWLTLAEQPICKDVLVRHLPKLIPVLVNGMKYSDIDIILLKGDVEEDETIPDSEQDIRPRFHRSRTVAQQHDEDGIEEEDDDDDEIDDDDTISDWNLRKCSAAALDVLANVYRDELLPHILPLLKELLFHHEWVVKESGILVLGAIAEGCMQGMIPYLPELIPHLIQCLSDKKALVRSITCWTLSRYAHWVVSQPPDTYLKPLMTELLKRILDSNKRVQEAACSAFATLEEEACTELVPYLAYILDTLVFAFSKYQHKNLLILYDAIGTLADSVGHHLNKPEYIQMLMPPLIQKWNMLKDEDKDLFPLLECLSSVATALQSGFLPYCEPVYQRCVNLVQKTLAQAMLNNAQPDQYEAPDKDFMIVALDLLSGLAEGLGGNIEQLVARSNILTLMYQCMQDKMPEVRQSSFALLGDLTKACFQHVKPCIADFMPILGTNLNPEFISVCNNATWAIGEISIQMGIEMQPYIPMVLHQLVEIINRPNTPKTLLENTAITIGRLGYVCPQEVAPMLQQFIRPWCTSLRNIRDNEEKDSAFRGICTMISVNPSGVIQDFIFFCDAVASWINPKDDLRDMFCKILHGFKNQVGDENWRRFSDQFPLPLKERLAAFYGV

SEQ ID NO: 32854 - protein, 153 aa, Artificial Sequence
  Synthetic polypeptide
ARKQPSPDTEYALLLDFPSYRMQTKMEYEWKPDEQGLQQILQLLKESQSPDTTIQRTVQQKLEQLNQYPDFNNYLIFVLTKLKSEDEPTRSLSGLILKNNVKAHFQNFPNGVTDFIKSECLNNIGDSSPLIRATVGLTLLHVSISLSSVGLKL

SEQ ID NO: 32855 - protein, 22 aa, Artificial Sequence
  Synthetic polypeptide
TNYALSILKTNVHLLKANQDGV

SEQ ID NO: 32856 - protein, 894 aa, Artificial Sequence
  Synthetic polypeptide
KQTKMEYEWKPDEQGLQQILQLLKESQSPDTTIQRTVQQKLEQLNQYPDFNNYLIFVLTKLKSEDEPTRSLSGLILKNNVKAHFQNFPNGVTDFIKSECLNNIGDSSPLIRATVGILITTIASKGELQNWPDLLPKLCSLLDSEDYNTCEGAFGALQKICEDSAEILDSDVLDRPLNIMIPKFLQFFKHSSPKIRSHAVACVNQFIISRTQALMLHIDSFIENLFALAGDEEPEVRKNVCRALVMLLEVRMDRLLPHMHNIVEYMLQRTQDQDENVALEACEFWLTLAEQPICKDVLVRHLPKLIPVLVNGMKYSDIDIILLKGDVEEDETIPDSEQDIRPRFHRSRTVAQQHDEDGIEEEDDDDDEIDDDDTISDWNLRKCSAAALDVLANVYRDELLPHILPLLKELLFHHEWVVKESGILVLGAIAEGCMQGMIPYLPELIPHLIQCLSDKKALVRSITCWTLSRYAHWVVSQPPDTYLKPLMTELLKRILDSNKRVQEAACSAFATLEEEACTELVPYLAYILDTLVFAFSKYQHKNLLILYDAIGTLADSVGHHLNKPEYIQMLMPPLIQKWNMLKDEDKDLFPLLECLSSVATALQSGFLPYCEPVYQRCVNLVQKTLAQAMLNNAQPDQYEAPDKDFMIVALDLLSGLAEGLGGNIEQLVARSNILTLMYQCMQDKMPEVRQSSFALLGDLTKACFQHVKPCIADFMPILGTNLNPEFISVCNNATWAIGEISIQMGIEMQPYIPMVLHQLVEIINRPNTPKTLLENTAITIGRLGYVCPQEVAPMLQQFIRPWCTSLRNIRDNEEKDSAFRGICTMISVNPSGVIQDFIFFCDAVASWINPKDDLRDMFCKILHGFKNQVGDENWRRFSDQFPLPLKERLAAFYGV

SEQ ID NO: 32857 - protein, 84 aa, Artificial Sequence
  Synthetic polypeptide
IHILFGLITPPGCHYYVGTLVQEFFCCVVGSGKKVEAIWKPIRRWLNKLCSIHSQDQCASIKSKPRWSMSGNLTSKGFSKSCSC

SEQ ID NO: 32858 - protein, 844 aa, Artificial Sequence
  Synthetic polypeptide
KQTKMEYEWKPDEQGLQQILQLLKESQSPDTTIQRTVQQKLEQLNQYPDFNNYLIFVLTKLKSEGILITTIASKGELQNWPDLLPKLCSLLDSEDYNTCEGAFGALQKICEDSAEILDSDVLDRPLNIMIPKFLQFFKHSSPKIRSHAVACVNQFIISRTQALMLHIDSFIENLFALAGDEEPEVRKNVCRALVMLLEVRMDRLLPHMHNIVEYMLQRTQDQDENVALEACEFWLTLAEQPICKDVLVRHLPKLIPVLVNGMKYSDIDIILLKGDVEEDETIPDSEQDIRPRFHRSRTVAQQHDEDGIEEEDDDDDEIDDDDTISDWNLRKCSAAALDVLANVYRDELLPHILPLLKELLFHHEWVVKESGILVLGAIAEGCMQGMIPYLPELIPHLIQCLSDKKALVRSITCWTLSRYAHWVVSQPPDTYLKPLMTELLKRILDSNKRVQEAACSAFATLEEEACTELVPYLAYILDTLVFAFSKYQHKNLLILYDAIGTLADSVGHHLNKPEYIQMLMPPLIQKWNMLKDEDKDLFPLLECLSSVATALQSGFLPYCEPVYQRCVNLVQKTLAQAMLNNAQPDQYEAPDKDFMIVALDLLSGLAEGLGGNIEQLVARSNILTLMYQCMQDKMPEVRQSSFALLGDLTKACFQHVKPCIADFMPILGTNLNPEFISVCNNATWAIGEISIQMGIEMQPYIPMVLHQLVEIINRPNTPKTLLENTAITIGRLGYVCPQEVAPMLQQFIRPWCTSLRNIRDNEEKDSAFRGICTMISVNPSGVIQDFIFFCDAVASWINPKDDLRDMFCKILHGFKNQVGDENWRRFSDQFPLPLKERLAAFYGV

SEQ ID NO: 32859 - protein, 132 aa, Artificial Sequence
  Synthetic polypeptide
KQTKMEYEWKPDEQGLQQILQLLKESQSPDTTIQRTVQQKLEQLNQYPDFNNYLIFVLTKLKSEDEPTRSLSGLILKNNVKAHFQNFPNGVTDFIKSECLNNIGDSSPLIRATVGLTLLHVSISLSSVGLKL

SEQ ID NO: 32860 - protein, 41 aa, Artificial Sequence
  Synthetic polypeptide
DLVSTKNTKISRVWWRPPVIPATWEAELNAISIHLLLREFK

SEQ ID NO: 32861 - protein, 8 aa, Artificial Sequence
  Synthetic polypeptide
SQLLGRLS

SEQ ID NO: 32862 - protein, 72 aa, Artificial Sequence
  Synthetic polypeptide
DNLIQNHPAKTPKFLNHKNYIMAIFLVSTSGIMNLLNSRLKPRFSNFLSQSPFSQSVMLSPTYLQMSLILYL

SEQ ID NO: 32863 - protein, 17 aa, Artificial Sequence
  Synthetic polypeptide
TTRTISWLYFWFLQVAS

SEQ ID NO: 32864 - protein, 463 aa, Artificial Sequence
  Synthetic polypeptide
IPEPQELYHGYIFGFYKWHHEPAEFQAKTQVQQLLVSITLQSECDAFPNISSDESYTLLVKEPVAVLKANRVWGALRGLETFSQLVYQDSYGTFTINESTIIDSPRFSHRGILIDTSRHYLPVKIILKTLDAMAFNKFNVLHWHIVDDQSFPYQSITFPELSNKGSYSLSHVYTPNDVRMVIEYARLRGIRVLPEFDTPGHTLSWGKGQKDLLTPCYSRQNKLDSFGPINPTLNTTYSFLTTFFKEISEVFPDQFIHLGGDEVEFKCWESNPKIQDFMRQKGFGTDFKKLESFYIQKVLDIIATINKGSIVWQEVFDDKAKLAPGTIVEVWKDSAYPEELSRVTASGFPVILSAPWYLDLISYGQDWRKYYKVEPLDFGGTQKQKQLFIGGEACLWGEYVDATNLTPRLWPRASAVGERLWSSKDVRDMDDAYDRLTRHRCRMVERGIAAQPLYAGYCNHENM

SEQ ID NO: 32865 - protein, 16 aa, Artificial Sequence
  Synthetic polypeptide
TKITPLHIALQPGKQR

SEQ ID NO: 32866 - protein, 775 aa, Artificial Sequence
  Synthetic polypeptide
SQLLGRLRQENCLNPGGRGCSEPRSHHCTLHSSLGNKDEVRENIARGMAILGPTFTLDALVECLVIGVGTMSGVRQLEIMCCFGCMSVLANYFVFMTFFPACVSLVLELSRESREGRPIWQLSHFARVLEEEENKPNPVTQRVKMIMSLGLVLVHAHSRWIADPSPQNSTADTSKVSLGLDENVSKRIEPSVSLWQFYLSKMISMDIEQVITLSLALLLAVKYIFFEQTETESTLSLKNPITSPVVTQKKVPDNCCRREPMLVRNNQKCDSVEEETGINRERKVEVIKPLVAETDTPNRATFVVGNSSLLDTSSVLVTQEPEIELPREPRPNEECLQILGNAEKGAKFLSDAEIIQLVNAKHIPAYKLETLMETHERGVSIRRQLLSKKLSEPSSLQYLPYRDYNYSLVMGACCENVIGYMPIPVGVAGPLCLDEKEFQVPMATTEGCLVASTNRGCRAIGLGGGASSRVLADGMTRGPVVRLPRACDSAEVKAWLETSEGFAVIKEAFDSTSRFARLQKLHTSIAGRNLYIRFQSRSGDAMGMNMISKGTEKALSKLHEYFPEMQILAVSGNYCTDKKPAAINWIEGRGKSVVCEAVIPAKVVREVLKTTTEAMIEVNINKNLVGSAMAGSIGGYNAHAANIVTAIYIACGQDAAQNVGSSNCITLMEASGPTNEDLYISCTMPSIEIGTVGGGTNLLPQQACLQMLGVQGACKDNPGENARQLARIVCGTVMAGELSLMAALAAGHLVKSHMIHNRSKINLQDLQGACTKKTA

SEQ ID NO: 32867 - protein, 26 aa, Artificial Sequence
  Synthetic polypeptide
TQEAEVAVNQDHTIAHCTPAWETKMK

SEQ ID NO: 32868 - protein, 722 aa, Artificial Sequence
  Synthetic polypeptide
SQLLGRLRQENCLNPGGRGCSEPRSHHCTLHSSLGNKDEVRENIARGMAILGPTFTLDALVECLVIGVGTMSGVRQLEIMCCFGCMSVLANYFVFMTFFPACVSLVLELSRESREGRPIWQLSHFARVLEEEENKPNPVTQRVKMIMSLGLVLVHAHSRWIADPSPQNSTADTSKVSLGLDENVSKRIEPSVSLWQFYLSKMISMDIEQVITLSLALLLAVKYIFFEQTETESTLSLKNPITSPVVTQKKVPDNCCRREPMLVRNNQKCDSVEEETGINRERKVEVIKPLVAETDTPNRATFVVGNSSLLDTSSVLVTQEPEIELPREPRPNEECLQILGNAEKGAKFLSDAEIIQLVNAKHIPAYKLETLMETHERGVSIRRQLLSKKLSEPSSLQYLPYRDYNYSLLGGGASSRVLADGMTRGPVVRLPRACDSAEVKAWLETSEGFAVIKEAFDSTSRFARLQKLHTSIAGRNLYIRFQSRSGDAMGMNMISKGTEKALSKLHEYFPEMQILAVSGNYCTDKKPAAINWIEGRGKSVVCEAVIPAKVVREVLKTTTEAMIEVNINKNLVGSAMAGSIGGYNAHAANIVTAIYIACGQDAAQNVGSSNCITLMEASGPTNEDLYISCTMPSIEIGTVGGGTNLLPQQACLQMLGVQGACKDNPGENARQLARIVCGTVMAGELSLMAALAAGHLVKSHMIHNRSKINLQDLQGACTKKTA

SEQ ID NO: 32869 - protein, 36 aa, Artificial Sequence
  Synthetic polypeptide
AWKYHSQQTNTGTENQTPHLFTWYRESTFKTSRVFP

SEQ ID NO: 32870 - protein, 258 aa, Artificial Sequence
  Synthetic polypeptide
DHVLCRDMDEPGNIILSKLTQEQKTKHHTFSLGTEKALSKLHEYFPEMQILAVSGNYCTDKKPAAINWIEGRGKSVVCEAVIPAKVVREVLKTTTEAMIEVNINKNLVGSAMAGSIGGYNAHAANIVTAIYIACGQDAAQNVGSSNCITLMEASGPTNEDLYISCTMPSIEIGTVGGGTNLLPQQACLQMLGVQGACKDNPGENARQLARIVCGTVMAGELSLMAALAAGHLVKSHMIHNRSKINLQDLQGACTKKTA

SEQ ID NO: 32871 - protein, 31 aa, Artificial Sequence
  Synthetic polypeptide
HRNRKPNTTPFHLVQRKHFQNFTSISLKCRF

SEQ ID NO: 32872 - protein, 55 aa, Artificial Sequence
  Synthetic polypeptide
GRVWWLTPVIPALREAEVGGSPEAGSLRPAWATRGPDFMEMSSRKKSKSTNELKI

SEQ ID NO: 32873 - protein, 13 aa, Artificial Sequence
  Synthetic polypeptide
DQPGQQGVQILWK

SEQ ID NO: 32874 - protein, 836 aa, Artificial Sequence
  Synthetic polypeptide
GREFETSLGNKGSRFYGNELKKEKQVNQRIENMMQQKAQITSQQLRKAQLQVDRFAMELEQSRNLSNTIVHIDMDAFYAAVEMRDNPELKDKPIAVGSMSMLSTSNYHARRFGVRAAMPGFIAKRLCPQLIIVPPNFDKYRAVSKEVKEILADYDPNFMAMSLDEAYLNITKHLEERQNWPEDKRRYFIKMGSSVENDNPGKEVNKLSEHERSISPLLFEESPSDVQPPGDPFQVNFEEQNNPQILQNSVVFGTSAQEVVKEIRFRIEQKTTLTASAGIAPNTMLAKVCSDKNKPNGQYQILPNRQAVMDFIKDLPIRKVSGIGKVTEKMLKALGIITCTELYQQRALLSLLFSETSWHYFLHISLGLGSTHLTRDGERKSMSVERTFSEINKAEEQYSLCQELCSELAQDLQKERLKGRTVTIKLKNVNFEVKTRASTVSSVVSTAEEIFAIAKELLKTEIDADFPHPLRLRLMGVRISSFPNEEDRKHQQRSIIGFLQAGNQALSATECTLEKTDKDKFVKPLEMSHKKSFFDKKRSERKWSHQDTFKCEAVNKQSFQTSQPFQVLKKKMNENLEISENSDDCQILTCPVCFRAQGCISLEALNKHVDECLDGPSISENFKMFSCSHVSATKVNKKENVPASSLCEKQDYEAHPKIKEISSVDCIALVDTIDNSSKAESIDALSNKHSKEECSSLPSKSFNIEHCHQNSSSTVSLENEDVGSFRQEYRQPYLCEVKTGQALVCPVCNVEQKTSDLTLFNVHVDVCLNKSFIQELRKDKFNPVNQPKESSRSTGSSSGVQKAVTRTKRPGLMTKYSTSKKIKPNNPKHTLDIFFK

SEQ ID NO: 32875 - protein, 638 aa, Artificial Sequence
  Synthetic polypeptide
GREFETSLGNKGSRFYGNELKKEKQVNQRIENMMQQKAQITSQQLRKAQLQVDRFAMELEQSRNLSNTIVHIDMDAFYAAVEMRDNPELKDKPIAVGSMSMLSTSNYHARRFGVRAAMPGFIAKRLCPQLIIVPPNFDKYRAVSKEVKEILADYDPNFMAMSLDEAYLNITKHLEERQNWPEDKRRYFIKMGSSVENDNPGKEVNKLSEHERSISPLLFEESPSDVQPPGDPFQVNFEEQNNPQILQNSVVFGTSAQEVVKEIRFRIEQKTTLTASAGVRISSFPNEEDRKHQQRSIIGFLQAGNQALSATECTLEKTDKDKFVKPLEMSHKKSFFDKKRSERKWSHQDTFKCEAVNKQSFQTSQPFQVLKKKMNENLEISENSDDCQILTCPVCFRAQGCISLEALNKHVDECLDGPSISENFKMFSCSHVSATKVNKKENVPASSLCEKQDYEAHPKIKEISSVDCIALVDTIDNSSKAESIDALSNKHSKEECSSLPSKSFNIEHCHQNSSSTVSLENEDVGSFRQEYRQPYLCEVKTGQALVCPVCNVEQKTSDLTLFNVHVDVCLNKSFIQELRKDKFNPVNQPKESSRSTGSSSGVQKAVTRTKRPGLMTKYSTSKKIKPNNPKHTLDIFFK

SEQ ID NO: 32876 - protein, 56 aa, Artificial Sequence
  Synthetic polypeptide
GREFETSLGNKGSRFYGNELKKEKQVNQRIENMMQQKAQITSQQLRKAQLQINIKF

SEQ ID NO: 32877 - protein, 107 aa, Artificial Sequence
  Synthetic polypeptide
GREFETSLGNKGSRFYGNELKKEKQVNQRIENMMQQKAQITSQQLRKAQLQVDRFAMELEQSRNLSNTIVHIDMDAFYAAVEMRDNPELKDKPIAVGSMSMLSTSNY

SEQ ID NO: 32878 - protein, 438 aa, Artificial Sequence
  Synthetic polypeptide
GREFETSLGNKGSRFYGNELKKEKQVNQRIENMMQQKAQITSQQLRKAQLQVDRFAMELEQSRNLSNTIVHIDMDAFYAAVEMRDNPELKDKPIAVGSMSMLSTSNYHARRFGVRAAMPGFIAKRLCPQLIIVPPNFDKYRAVSKEVKEILADYDPNFMAMSLDEAYLNITKHLEERQNWPEDKRRYFIKMGSSVENDNPGKEVNKLSEHERSISPLLFEESPSDVQPPGDPFQVNFEEQNNPQILQNSVVFGTSAQEVVKEIRFRIEQKTTLTASAGIAPNTMLAKVCSDKNKPNGQYQILPNRQAVMDFIKDLPIRKVSGIGKVTEKMLKALGIITCTELYQQRALLSLLFSETSWHYFLHISLGLGSTHLTRDGERKSMSVERTFSEINKAEEQYSLCQELCSELAQDLQKERLKVLYFDMVSLVFKFFNSKMLP

SEQ ID NO: 32879 - protein, 393 aa, Artificial Sequence
  Synthetic polypeptide
GREFETSLGNKGSRFYGNELKKEKQVNQRIENMMQQKAQITSQQLRKAQLQVDRFAMELEQSRNLSNTIVHIDMDAFYAAVEMRDNPELKDKPIAVGSMSMLSTSNYHARRFGVRAAMPGFIAKRLCPQLIIVPPNFDKYRAVSKEVKEILADYDPNFMAMSLDEAYLNITKHLEERQNWPEDKRRYFIKMGSSVENDNPGKEVNKLSEHERSISPLLFEESPSDVQPPGDPFQVNFEEQNNPQILQNSVVFGTSAQEVVKEIRFRIEQKTTLTASAGIAPNTMLAKVCSDKNKPNGQYQILPNRQAVMDFIKDLPIRKVSGIGKVTEKMLKALGIITCTELYQQRALLSLLFSETSWHYFLHISLGLGSTHLTRDGERKSMSVERVELLPLS

SEQ ID NO: 32880 - protein, 427 aa, Artificial Sequence
  Synthetic polypeptide
GREFETSLGNKGSRFYGNELKKEKQVNQRIENMMQQKAQITSQQLRKAQLQVDRFAMELEQSRNLSNTIVHIDMDAFYAAVEMRDNPELKDKPIAVGSMSMLSTSNYHARRFGVRAAMPGFIAKRLCPQLIIVPPNFDKYRAVSKEVKEILADYDPNFMAMSLDEAYLNITKHLEERQNWPEDKRRYFIKMGSSVENDNPGKEVNKLSEHERSISPLLFEESPSDVQPPGDPFQVNFEEQNNPQILQNSVVFGTSAQEVVKEIRFRIEQKTTLTASAGIAPNTMLAKVCSDKNKPNGQYQILPNRQAVMDFIKDLPIRKVSGIGKVTEKMLKALGIITCTELYQQRALLSLLFSETSWHYFLHISLGLGSTHLTRDGERKSMSVERTFSEINKAEEQYSLCQELCSELAQDLQKERLKVAQVEYRRL

SEQ ID NO: 32881 - protein, 455 aa, Artificial Sequence
  Synthetic polypeptide
GREFETSLGNKGSRFYGNELKKEKQVNQRIENMMQQKAQITSQQLRKAQLQVDRFAMELEQSRNLSNTIVHIDMDAFYAAVEMRDNPELKDKPIAVGSMSMLSTSNYHARRFGVRAAMPGFIAKRLCPQLIIVPPNFDKYRAVSKEVKEILADYDPNFMAMSLDEAYLNITKHLEERQNWPEDKRRYFIKMGSSVENDNPGKEVNKLSEHERSISPLLFEESPSDVQPPGDPFQVNFEEQNNPQILQNSVVFGTSAQEVVKEIRFRIEQKTTLTASAGIAPNTMLAKVCSDKNKPNGQYQILPNRQAVMDFIKDLPIRKVSGIGKVTEKMLKALGIITCTELYQQRALLSLLFSETSWHYFLHISLGLGSTHLTRDGERKSMSVERTFSEINKAEEQYSLCQELCSELAQDLQKERLKVFGYLVFPMKRTGNTNKGALLAFYRLETKPCQPLSVH

SEQ ID NO: 32882 - protein, 11 aa, Artificial Sequence
  Synthetic polypeptide
DLQERCRRPRR

SEQ ID NO: 32883 - protein, 48 aa, Artificial Sequence
  Synthetic polypeptide
SPRSEIMDKKGKSQEEIKSMRAQQAQQEAELNAETCRSAAGGQEDDHL

SEQ ID NO: 32884 - protein, 130 aa, Artificial Sequence
  Synthetic polypeptide
GPSRPSKKLNSTLRPAGALPEAKKMTTFEYLINTRKEESSKHQAVRKDPYVQMDKGFLQQGAGALGSSAQGVKAKSSLLIYKCPCHFCTSVNQDGDSKAQEADDAPSTSTLGLQQETTEPMKTDSAESED

SEQ ID NO: 32885 - protein, 43 aa, Artificial Sequence
  Synthetic polypeptide
LQENKLRAPIDSTLCLLQITMQGDLVFVQPCQDLLLRGCAHNL

SEQ ID NO: 32886 - protein, 49 aa, Artificial Sequence
  Synthetic polypeptide
SITVSHHPQMGFSNCRKTSLGLPLILHYVYFKLPCKEIWCSCSHARIYC

SEQ ID NO: 32887 - protein, 738 aa, Artificial Sequence
  Synthetic polypeptide
FYIMSTSNYHARRFGVRAAMPGFIAKRLCPQLIIVPPNFDKYRAVSKEVKEILADYDPNFMAMSLDEAYLNITKHLEERQNWPEDKRRYFIKMGSSVENDNPGKEVNKLSEHERSISPLLFEESPSDVQPPGDPFQVNFEEQNNPQILQNSVVFGTSAQEVVKEIRFRIEQKTTLTASAGIAPNTMLAKVCSDKNKPNGQYQILPNRQAVMDFIKDLPIRKVSGIGKVTEKMLKALGIITCTELYQQRALLSLLFSETSWHYFLHISLGLGSTHLTRDGERKSMSVERTFSEINKAEEQYSLCQELCSELAQDLQKERLKGRTVTIKLKNVNFEVKTRASTVSSVVSTAEEIFAIAKELLKTEIDADFPHPLRLRLMGVRISSFPNEEDRKHQQRSIIGFLQAGNQALSATECTLEKTDKDKFVKPLEMSHKKSFFDKKRSERKWSHQDTFKCEAVNKQSFQTSQPFQVLKKKMNENLEISENSDDCQILTCPVCFRAQGCISLEALNKHVDECLDGPSISENFKMFSCSHVSATKVNKKENVPASSLCEKQDYEAHPKIKEISSVDCIALVDTIDNSSKAESIDALSNKHSKEECSSLPSKSFNIEHCHQNSSSTVSLENEDVGSFRQEYRQPYLCEVKTGQALVCPVCNVEQKTSDLTLFNVHVDVCLNKSFIQELRKDKFNPVNQPKESSRSTGSSSGVQKAVTRTKRPGLMTKYSTSKKIKPNNPKHTLDIFFK

SEQ ID NO: 32888 - protein, 540 aa, Artificial Sequence
  Synthetic polypeptide
FYIMSTSNYHARRFGVRAAMPGFIAKRLCPQLIIVPPNFDKYRAVSKEVKEILADYDPNFMAMSLDEAYLNITKHLEERQNWPEDKRRYFIKMGSSVENDNPGKEVNKLSEHERSISPLLFEESPSDVQPPGDPFQVNFEEQNNPQILQNSVVFGTSAQEVVKEIRFRIEQKTTLTASAGVRISSFPNEEDRKHQQRSIIGFLQAGNQALSATECTLEKTDKDKFVKPLEMSHKKSFFDKKRSERKWSHQDTFKCEAVNKQSFQTSQPFQVLKKKMNENLEISENSDDCQILTCPVCFRAQGCISLEALNKHVDECLDGPSISENFKMFSCSHVSATKVNKKENVPASSLCEKQDYEAHPKIKEISSVDCIALVDTIDNSSKAESIDALSNKHSKEECSSLPSKSFNIEHCHQNSSSTVSLENEDVGSFRQEYRQPYLCEVKTGQALVCPVCNVEQKTSDLTLFNVHVDVCLNKSFIQELRKDKFNPVNQPKESSRSTGSSSGVQKAVTRTKRPGLMTKYSTSKKIKPNNPKHTLDIFFK

SEQ ID NO: 32889 - protein, 330 aa, Artificial Sequence
  Synthetic polypeptide
FYIMSTSNYHARRFGVRAAMPGFIAKRLCPQLIIVPPNFDKYRAVSKEVKEILADYDPNFMAMSLDEAYLNITKHLEERQNWPEDKRRYFIKMGSSVENDNPGKEVNKLSEHERSISPLLFEESPSDVQPPGDPFQVNFEEQNNPQILQNSVVFGTSAQEVVKEIRFRIEQKTTLTASAGIAPNTMLAKVCSDKNKPNGQYQILPNRQAVMDFIKDLPIRKVSGIGKVTEKMLKALGIITCTELYQQRALLSLLFSETSWHYFLHISLGLGSTHLTRDGERKSMSVERTFSEINKAEEQYSLCQELCSELAQDLQKERLKKKYLPLLRNC

SEQ ID NO: 32890 - protein, 20 aa, Artificial Sequence
  Synthetic polypeptide
LQENKLRAPIDSTLCLLQIT

SEQ ID NO: 32891 - protein, 33 aa, Artificial Sequence
  Synthetic polypeptide
SITVSHHPQMGFSNCRKTSLGLPLILHYVYFKL

SEQ ID NO: 32892 - protein, 9 aa, Artificial Sequence
  Synthetic polypeptide
FYIMSTSNY

SEQ ID NO: 32893 - protein, 340 aa, Artificial Sequence
  Synthetic polypeptide
FYIMSTSNYHARRFGVRAAMPGFIAKRLCPQLIIVPPNFDKYRAVSKEVKEILADYDPNFMAMSLDEAYLNITKHLEERQNWPEDKRRYFIKMGSSVENDNPGKEVNKLSEHERSISPLLFEESPSDVQPPGDPFQVNFEEQNNPQILQNSVVFGTSAQEVVKEIRFRIEQKTTLTASAGIAPNTMLAKVCSDKNKPNGQYQILPNRQAVMDFIKDLPIRKVSGIGKVTEKMLKALGIITCTELYQQRALLSLLFSETSWHYFLHISLGLGSTHLTRDGERKSMSVERTFSEINKAEEQYSLCQELCSELAQDLQKERLKVLYFDMVSLVFKFFNSKMLP

SEQ ID NO: 32894 - protein, 295 aa, Artificial Sequence
  Synthetic polypeptide
FYIMSTSNYHARRFGVRAAMPGFIAKRLCPQLIIVPPNFDKYRAVSKEVKEILADYDPNFMAMSLDEAYLNITKHLEERQNWPEDKRRYFIKMGSSVENDNPGKEVNKLSEHERSISPLLFEESPSDVQPPGDPFQVNFEEQNNPQILQNSVVFGTSAQEVVKEIRFRIEQKTTLTASAGIAPNTMLAKVCSDKNKPNGQYQILPNRQAVMDFIKDLPIRKVSGIGKVTEKMLKALGIITCTELYQQRALLSLLFSETSWHYFLHISLGLGSTHLTRDGERKSMSVERVELLPLS

SEQ ID NO: 32895 - protein, 329 aa, Artificial Sequence
  Synthetic polypeptide
FYIMSTSNYHARRFGVRAAMPGFIAKRLCPQLIIVPPNFDKYRAVSKEVKEILADYDPNFMAMSLDEAYLNITKHLEERQNWPEDKRRYFIKMGSSVENDNPGKEVNKLSEHERSISPLLFEESPSDVQPPGDPFQVNFEEQNNPQILQNSVVFGTSAQEVVKEIRFRIEQKTTLTASAGIAPNTMLAKVCSDKNKPNGQYQILPNRQAVMDFIKDLPIRKVSGIGKVTEKMLKALGIITCTELYQQRALLSLLFSETSWHYFLHISLGLGSTHLTRDGERKSMSVERTFSEINKAEEQYSLCQELCSELAQDLQKERLKVAQVEYRRL

SEQ ID NO: 32896 - protein, 357 aa, Artificial Sequence
  Synthetic polypeptide
FYIMSTSNYHARRFGVRAAMPGFIAKRLCPQLIIVPPNFDKYRAVSKEVKEILADYDPNFMAMSLDEAYLNITKHLEERQNWPEDKRRYFIKMGSSVENDNPGKEVNKLSEHERSISPLLFEESPSDVQPPGDPFQVNFEEQNNPQILQNSVVFGTSAQEVVKEIRFRIEQKTTLTASAGIAPNTMLAKVCSDKNKPNGQYQILPNRQAVMDFIKDLPIRKVSGIGKVTEKMLKALGIITCTELYQQRALLSLLFSETSWHYFLHISLGLGSTHLTRDGERKSMSVERTFSEINKAEEQYSLCQELCSELAQDLQKERLKVFGYLVFPMKRTGNTNKGALLAFYRLETKPCQPLSVH

SEQ ID NO: 32897 - protein, 286 aa, Artificial Sequence
  Synthetic polypeptide
GRSQDGRIGTAPVYSSQRERRRRQLNISSLQIATRNGHASLVNFLLSENVDLHQKVEPKESPLHLVVINNHITVVNSLLSAQHDIDILNQKQQTPLHVAADRGNVELVETLLKAGCDLKAVDKQGKTALAVASRSNHSLVVGMLIKAERYYAWREEHHESIRDPSTGFTLTFKQDHSLETRHIRTLLWDLAYHQLKANEWQRLARSWNFTDDQIRAIEEQWSGNESFREHGHRALLIWLHGTLMTQGDPAKQLYEELVHAGFPKLAEKTRHFKSKTDSNSKKCVVS

SEQ ID NO: 32898 - protein, 23 aa, Artificial Sequence
  Synthetic polypeptide
EQLRSTAPSVSDAEDSSISVVCR

SEQ ID NO: 32899 - protein, 9 aa, Artificial Sequence
  Synthetic polypeptide
ATQKTAQYQ

SEQ ID NO: 32900 - protein, 294 aa, Artificial Sequence
  Synthetic polypeptide
GRSQDGRIGTAPVYSSQRERRRRQVISAFPSELNISSLQIATRNGHASLVNFLLSENVDLHQKVEPKESPLHLVVINNHITVVNSLLSAQHDIDILNQKQQTPLHVAADRGNVELVETLLKAGCDLKAVDKQGKTALAVASRSNHSLVVGMLIKAERYYAWREEHHESIRDPSTGFTLTFKQDHSLETRHIRTLLWDLAYHQLKANEWQRLARSWNFTDDQIRAIEEQWSGNESFREHGHRALLIWLHGTLMTQGDPAKQLYEELVHAGFPKLAEKTRHFKSKTDSNSKKCVVS

SEQ ID NO: 32901 - protein, 14 aa, Artificial Sequence
  Synthetic polypeptide
FLHFHLSSISVVCR

SEQ ID NO: 32902 - protein, 18 aa, Artificial Sequence
  Synthetic polypeptide
GQARSLTPVIPALWEAEG

SEQ ID NO: 32903 - protein, 13 aa, Artificial Sequence
  Synthetic polypeptide
SQHFGRPRDRLHK

SEQ ID NO: 32904 - protein, 215 aa, Artificial Sequence
  Synthetic polypeptide
PGAVAHTCNPSTLGGRGIDSTNNKKEEYGPGVQGKEHSAHLDPSAPPMPLPVTSPLLPSPPAAVGGASATAVPSAASMTSTRAASASSVHVPVSALGAGSAATAASEEMYVPRVVTSAQQKAGRTITARITGRCDFASKNRISSSLAIMGVSPPMSSVVVEKHHPVTVQTIPQATAAKYPRTIHPESSTSASRSLGTRSAHTQSLTSVHSIKVVD

SEQ ID NO: 32905 - protein, 156 aa, Artificial Sequence
  Synthetic polypeptide
PGAVAHTCNPSTLGGRGIDSTNNKKEEYGPGVQGKEHSAHLDPSAPPMPLPVTSPLLPSPPAAVGGASATAVPSAASMTSTRAASASSVHVPVSALGAGSAATAASEEMQTIPQATAAKYPRTIHPESSTSASRSLGTRSAHTQSLTSVHSIKVVD

SEQ ID NO: 32906 - protein, 56 aa, Artificial Sequence
  Synthetic polypeptide
HSCIPHSLSKALSTKDRDPPGERIVFPSPPCKTGNVATPEQNLSQDDIQVDGSLLS

SEQ ID NO: 32907 - protein, 1587 aa, Artificial Sequence
  Synthetic polypeptide
HSKLKKLQGVSDIPASHILFQRLYLPKIETHQGKELFFLPLPVRPGMWPHLNRTFHRMTYRWMEVCLVEELPPTTELEEGLRNGVYLAKLAKFFAPKMVSEKKIYDVEQTRYKKSGLHFRHTDNTVQWLRAMESIGLPKIFYPETTDVYDRKNIPRMIYCIHALSLYLFKLGIAPQIQDLLGKVDFTEEEISNMRKELEKYGIQMPSFSKIGGILANELSVDEAALHAAVIAINEAVEKGIAEQTVVTLRNPNAVLTLVDDNLAPEYQKELWDAKKKKEENARLKNSCISEEERDAYEELLTQAEIQGNINKVNRQAAVDHINAVIPEGDPENTLLALKKPEAQLPAVYPFAAAMYQNELFNLQKQNTMNYLAHEELLIAVEMLSAVALLNQALESNDLVSVQNQLRSPAIGLNNLDKAYVERYANTLLSVKLEVLSQGQDNLSWNEIQNCIDMVNAQIQEENDRVVAVGYINEAIDEGNPLRTLETLLLPTANISDVDPAHAQHYQDVLYHAKSQKLGDSESVSKVLWLDEIQQAVDDANVDKDRAKQWVTLVVDVNQCLEGKKSSDILSVLKSSTSNANDIIPECADKYYDALVKAKELKSERVSSDGSWLKLNLHKKYDYYYNTDSKESSWVTPESCLYKESWLTGKEIEDIIEEVTVGYIRENIWSASEELLLRFQATSSGPILREEFEARKSFLHEQEENVVKIQAFWKGYKQRKEYMHRRQTFIDNTDSIVKIQSWFRMATARKSYLSRLQYFRDHNNEIVKIQSLLRANKARDDYKTLVGSENPPLTVIRKFVYLLDQSDLDFQEELEVARLREEVVTKIRANQQLEKDLNLMDIKIGLLVKNRITLEDVISHSKKLNKKKGGEMEILNNTDNQGIKSLSKERRKTLETYQQLFYLLQTNPLYLAKLIFQMPQNKSTKFMDTVIFTLYNYASNQREEYLLLKLFKTALEEEIKSKVDQVQDIVTGNPTVIKMVVSFNRGARGQNTLRQLLAPVVKEIIDDKSLIINTNPVEVYKAWVNQLETQTGEASKLPYDVTTEQALTYPEVKNKLEASIENLRRVTDKVLNSIISSLDLLPYGLRYIAKVLKNSIHEKFPDATEDELLKIVGNLLYYRYMNPAIVAPDGFDIIDMTAGGQINSDQRRNLGSVAKVLQHAASNKLFEGENEHLSSMNNYLSETYQEFRKYFKEACNVPEPEEKFNMDKYTDLVTVSKPVIYISIEEIISTHSLLLEHQDAIAPEKNDLLSELLGSLGEVPTVESFLGEGAVDPNDPNKANTLSQLSKTEISLVLTSKYDIEDGEAIDSRSLMIKTKKLIIDVIRNQPGNTLTEILETPATAQQEVDHATDMVSRAMIDSRTPEEMKHSQSMIEDAQLPLEQKKRKIQRNLRTLEQTGHVSSENKYQDILNEIAKDIRNQRIYRKLRKAELAKLQQTLNALNKKAAFYEEQINYYDTYIKTCLDNLKRKNTRRSIKLDGKGEPKGAKRAKPVKYTAAKLHEKGVLLDIDDLQTNQFKNVTFDIIATEDVGIFDVRSKFLGVEMEKVQLNIQDLLQMQYEGVAVMKMFDKVKVNVNLLIYLLNKKFYGK

SEQ ID NO: 32908 - protein, 8 aa, Artificial Sequence
  Synthetic polypeptide
HTGGWKFA

SEQ ID NO: 32909 - protein, 863 aa, Artificial Sequence
  Synthetic polypeptide
HSKLKKLQGVSDIPASHILFQRLYLPKIETHQGKELFFLPLPVRPGMWPHLNRTFHRMTYRWMEVCLVEELPPTTELEEGLRNGVYLAKLAKFFAPKMVSEKKIYDVEQTRYKKSGLHFRHTDNTVQWLRAMESIGLPKIFYPETTDVYDRKNIPRMIYCIHALSLYLFKLGIAPQIQDLLGKVDFTEEEISNMRKELEKYGIQMPSFSKIGGILANELSVDEAALHAAVIAINEAVEKGIAEQTVVTLRNPNAVLTLVDDNLAPEYQKELWDAKKKKEENARLKNSCISEEERDAYEELLTQAEIQGNINKVNRQAAVDHINAVIPEGDPENTLLALKKPEAQLPAVYPFAAAMYQNELFNLQKQNTMNYLAHEELLIAVEMLSAVALLNQALESNDLVSVQNQLRSPAIGLNNLDKAYVERYANTLLSVKLEVLSQGQDNLSWNEIQNCIDMVNAQIQEENDRVVAVGYINEAIDEGNPLRTLETLLLPTANISDVDPAHAQHYQDVLYHAKSQKLGDSESVSKVLWLDEIQQAVDDANVDKDRAKQWVTLVVDVNQCLEGKKSSDILSVLKSSTSNANDIIPECADKYYDALVKAKELKSERVSSDGSWLKLNLHKKYDYYYNTDSKESSWVTPESCLYKESWLTGKEIEDIIEEVTVGYIRENIWSASEELLLRFQATSSGPILREEFEARKSFLHEQEENVVKIQAFWKGYKQRKEYMHRRQTFIDNTDSIVKIQSWFRMATARKSYLSRLQYFRDHNNEIVKIQSLLRANKARDDYKTLVGSENPPLTVIRKFVYLLDQSDLDFQEELEVARLREEVVTKIRANQQLEKDLNLMDIKIGLLVKNRITLEDVISHSKK

SEQ ID NO: 32910 - protein, 446 aa, Artificial Sequence
  Synthetic polypeptide
GASLPGRPSSEMWGAPLPHRPVWDVRSASARPRPRLGGEERLCPAAPSEKGGDPPPGNRPVSEVRSPSTRQSPRLGRTSRSSKGRSLIGKVDGTSHVTGKGVTVETVFSVDEFSASVLTGKLTTVFLPIVYTIVFVVGLPSNGMALWVFLFRTKKKHPAVIYMANLALADLLSVIWFPLKIAYHIHGNNWIYGEALCNVLIGFFYGNMYCSILFMTCLSVQRYWVIVNPMGHSRKKANIAIGISLAIWLLILLVTIPLYVVKQTIFIPALNITTCHDVLPEQLLVGDMFNYFLSLAIGVFLFPAFLTASAYVLMIRMLRSSAMDENSEKKRKRAIKLIVTVLAMYLICFTPSNLLLVVHYFLIKSQGQSHVYALYIVALCLSTLNSCIDPFVYYFVSHDFRDHAKNALLCRSVRTVKQMQVSLTSKKHSRKSSSYSSSSTTVKTSY

SEQ ID NO: 32911 - protein, 57 aa, Artificial Sequence
  Synthetic polypeptide
GALPPGSHPVWDEPVDPLKEEALLVRLMAHPTSLEKELQLKQSFLWMSFLHLSSLEN

SEQ ID NO: 32912 - protein, 30 aa, Artificial Sequence
  Synthetic polypeptide
EGRRPSARQPPRLRSEEPFHPAVTPSGTNQ

SEQ ID NO: 32913 - protein, 136 aa, Artificial Sequence
  Synthetic polypeptide
GASLPGRPSSEMWGAPLPHRPVWDVRSASARPRPRLGGEERLCPAAPSEKGGDPPPGNRPVSEVRSPSTRQSPRLGREERLRQAATPSGREEPVDPLKEEALLVRLMAHPTSLEKELQLKQSFLWMSFLHLSSLEN

SEQ ID NO: 32914 - protein, 29 aa, Artificial Sequence
  Synthetic polypeptide
GALPPGSHPVWDVRSVSARQPPRPGGRNQ

SEQ ID NO: 32915 - protein, 383 aa, Artificial Sequence
  Synthetic polypeptide
GASPPGSHPVREGGTSRSSKGRSLIGKVDGTSHVTGKGVTVETVFSVDEFSASVLTGKLTTVFLPIVYTIVFVVGLPSNGMALWVFLFRTKKKHPAVIYMANLALADLLSVIWFPLKIAYHIHGNNWIYGEALCNVLIGFFYGNMYCSILFMTCLSVQRYWVIVNPMGHSRKKANIAIGISLAIWLLILLVTIPLYVVKQTIFIPALNITTCHDVLPEQLLVGDMFNYFLSLAIGVFLFPAFLTASAYVLMIRMLRSSAMDENSEKKRKRAIKLIVTVLAMYLICFTPSNLLLVVHYFLIKSQGQSHVYALYIVALCLSTLNSCIDPFVYYFVSHDFRDHAKNALLCRSVRTVKQMQVSLTSKKHSRKSSSYSSSSTTVKTSY

SEQ ID NO: 32916 - protein, 68 aa, Artificial Sequence
  Synthetic polypeptide
HRCSRLSGFQTSGLMLLPSLVLRLADIVSWDSSATIIIFTRFIVIQETILRQSLIHSDIRTGGKSPLT

SEQ ID NO: 32917 - protein, 7 aa, Artificial Sequence
  Synthetic polypeptide
SYSQDSS

SEQ ID NO: 32918 - protein, 558 aa, Artificial Sequence
  Synthetic polypeptide
NKKAVEVQICPCFLSWDVHHLLPLTSVLPALRLSDFGTYATAFPGSQTCRHRIMGLLSHHNHIHKIHRDSGDNSQTEPHSFRYKNRRKESIDVKSISSRGSDAPSLQNRRYPSMARIHSMTIEAPITKVINIINAAQENSPVTVAEALDRVLEILRTTELYSPQLGTKDEDPHTSDLVGGLMTDGLRRLSGNEYVFTKNVHQSHSHLAMPITINDVPPCISQLLDNEESWDFNIFELEAITHKRPLVYLGLKVFSRFGVCEFLNCSETTLRAWFQVIEANYHSSNAYHNSTHAADVLHATAFFLGKERVKGSLDQLDEVAALIAATVHDVDHPGRTNSFLCNAGSELAVLYNDTAVLESHHTALAFQLTVKDTKCNIFKNIDRNHYRTLRQAIIDMVLATEMTKHFEHVNKFVNSINKPMAAEIEGSDCECNPAGKNFPENQILIKRMMIKCADVANPCRPLDLCIEWAGRISEEYFAQTDEEKRQGLPVVMPVFDRNTCSIPKSQISFIDYFITDMFDAWDAFAHLPALMQHLADNYKHWKTLDDLKCKSLRLPSDS

SEQ ID NO: 32919 - protein, 503 aa, Artificial Sequence
  Synthetic polypeptide
NKKAVEVQICPCFLSWDVHHLLPLTSVLPALRLSDFGTYATAFPGSQTCRHRIMGLLSHHNHIHKIHRDSGDNSQTEPHSFRYKNRRKESIDVKSISSRGSDAPSLQNRRYPSMARIHSMTIEAPITKDGLRRLSGNEYVFTKNVHQSHSHLAMPITINDVPPCISQLLDNEESWDFNIFELEAITHKRPLVYLGLKVFSRFGVCEFLNCSETTLRAWFQVIEANYHSSNAYHNSTHAADVLHATAFFLGKERVKGSLDQLDEVAALIAATVHDVDHPGRTNSFLCNAGSELAVLYNDTAVLESHHTALAFQLTVKDTKCNIFKNIDRNHYRTLRQAIIDMVLATEMTKHFEHVNKFVNSINKPMAAEIEGSDCECNPAGKNFPENQILIKRMMIKCADVANPCRPLDLCIEWAGRISEEYFAQTDEEKRQGLPVVMPVFDRNTCSIPKSQISFIDYFITDMFDAWDAFAHLPALMQHLADNYKHWKTLDDLKCKSLRLPSDS

SEQ ID NO: 32920 - protein, 14 aa, Artificial Sequence
  Synthetic polypeptide
GLLSHVKLNLLYRQ

SEQ ID NO: 32921 - protein, 481 aa, Artificial Sequence
  Synthetic polypeptide
WVYQGFPLLRLPHFLLPLPDKKWLSPPTMILRPPQPCETKSPLQTIGEEQTQNPYTELLVLKAHHDIVRFLVQLDDYRFASAGDDGIVVVWNAQTGEKLLELNGHTQKITAIITFPSLESCEEKNQLILTASADRTVIVWDGDTTRQVQRISCFQSTVKCLTVLQRLDVWLSGGNDLCVWNRKLDLLCKTSHLSDTGISALVEIPKNCVVAAVGKELIIFRLVAPTEGSLEWDILEVKRLLDHQDNILSLINVNDLSFVTGSHVGELIIWDALDWTMQAYERNFWDPSPQLDTQQEIKLCQKSNDISIHHFTCDEENVFAAVGRGLYVYSLQMKRVIACQKTAHDSNVLHVARLPNRQLISCSEDGSVRIWELREKQQLAAEPVPTGFFNMWGFGRVSKQASQPVKKQQENATSCSLELIGDLIGHSSSVEMFLYFEDHGLVTCSADHLIILWKNGERESGLRSLRLFQKLEENGDLYLAV

SEQ ID NO: 32922 - protein, 423 aa, Artificial Sequence
  Synthetic polypeptide
WVYQGFPLLRLPHFLLPLPDKKWLSPPTMILRPPQPCETKSPLQTIGEEQTQNPYTELLVLKAHHDIVRFLVQLDDYRFASAGDDGIVVVWNAQTGEKLLELNGHTQKITAIITFPSLESCEEKNQLILTASADRTVIVWDGDTTRQVQRISCFQSTVKCLTVLQRLDVWLSGGNDLCVWNRKLDLLCKTSHLSDTDLSFVTGSHVGELIIWDALDWTMQAYERNFWDPSPQLDTQQEIKLCQKSNDISIHHFTCDEENVFAAVGRGLYVYSLQMKRVIACQKTAHDSNVLHVARLPNRQLISCSEDGSVRIWELREKQQLAAEPVPTGFFNMWGFGRVSKQASQPVKKQQENATSCSLELIGDLIGHSSSVEMFLYFEDHGLVTCSADHLIILWKNGERESGLRSLRLFQKLEENGDLYLAV

SEQ ID NO: 32923 - protein, 198 aa, Artificial Sequence
  Synthetic polypeptide
WVYQGFPLLRLPHFLLPLPDKKWLSPPTMILRPPQPCETKSPLQTIGEEQTQNPYTELLVLKAHHDIVRFLVQLDDYRFASAGDDGIVVVWNAQTGEKLLELNGHTQKITAIITFPSLESCEEKNQLILTASADRTVIVWDGDTTRQVQRISCFQSTVKCLTVLQRLDVWLSGGNDLCVWNRKLDLLCKTSHLSDTGW

SEQ ID NO: 32924 - protein, 142 aa, Artificial Sequence
  Synthetic polypeptide
WVYQGFPLLRLPHFLLPLPDKKWLSPPTMILRPPQPCETKSPLQTIDLSFVTGSHVGELIIWDALDWTMQAYERNFWDPSPQLDTQQEIKLCQKSNDISIHHFTCDEENVFAAVGRGLYVYSLQMKRVIACQKTAHDSNVLH

SEQ ID NO: 32925 - protein, 179 aa, Artificial Sequence
  Synthetic polypeptide
WVYQGFPLLRLPHFLLPLPDKKWLSPPTMILRPPQPCETKSPLQTIGEEQTQNPYTELLVLKAHHDIVRFLVQLDDYRFASAGDDGIVVVWNAQTGEKLLELNGHTQKITAIITFPSLESCEEKNQLILTASADRTVIVWDGDTTRQVQRISCFQSTVKVLVLWLKYLRTVLWQQLAKN

SEQ ID NO: 32926 - protein, 173 aa, Artificial Sequence
  Synthetic polypeptide
WVYQGFPLLRLPHFLLPLPDKKWLSPPTMILRPPQPCETKSPLQTIGEEQTQNPYTELLVLKAHHDIVRFLVQLDDYRFASAGDDGIVVVWNAQTGEKLLELNGHTQKITAIITFPSLESCEEKNQLILTASADRTVIVWDGDTTRQVQRISCFQSTVKVGSTHRRITRMGYS

SEQ ID NO: 32927 - protein, 83 aa, Artificial Sequence
  Synthetic polypeptide
WVYQGFPLLRLPHFLLPLPDKKWLSPPTMILRPPQPCETKSPLQTIGEEQTQNPYTELLVLKAHHDIVRFLVQLDDYRQGKNF

SEQ ID NO: 32928 - protein, 211 aa, Artificial Sequence
  Synthetic polypeptide
WVYQGFPLLRLPHFLLPLPDKKWLSPPTMILRPPQPCETKSPLQTIGEEQTQNPYTELLVLKAHHDIVRFLVQLDDYRFASAGDDGIVVVWNAQTGEKLLELNGHTQKITAIITFPSLESCEEKNQLILTASADRTVIVWDGDTTRQVQRISCFQSTVKRLDVWLSGGNDLCVWNRKLDLLCKTSHLSDTGISALVEIPKNCVVAAVGKEL

SEQ ID NO: 32929 - protein, 46 aa, Artificial Sequence
  Synthetic polypeptide
WVYQGFPLLRLPHFLLPLPDKKWLSPPTMILRPPQPCETKSPLQTI

SEQ ID NO: 32930 - protein, 180 aa, Artificial Sequence
  Synthetic polypeptide
WVYQGFPLLRLPHFLLPLPDKKWLSPPTMILRPPQPCETKSPLQTIGEEQTQNPYTELLVLKAHHDIVRFLVQLDDYRFASAGDDGIVVVWNAQTGEKLLELNGHTQKITAIITFPSLESCEEKNQLILTASADRTVIVWDGDTTRQVQRISCFQSTVKCLTVLQRLDVWLSGGNDLCVW

SEQ ID NO: 32931 - protein, 175 aa, Artificial Sequence
  Synthetic polypeptide
WVYQGFPLLRLPHFLLPLPDKKWLSPPTMILRPPQPCETKSPLQTIGEEQTQNPYTELLVLKAHHDIVRFLVQLDDYRFASAGDDGIVVVWNAQTGEKLLELNGHTQKITAIITFPSLESCEEKNQLILTASADRTVIVWDGDTTRQVQRISCFQSTVKCLTVLQRLDVWLSGGN

SEQ ID NO: 32932 - protein, 88 aa, Artificial Sequence
  Synthetic polypeptide
WVYQGFPLLRLPHFLLPLPDKKWLSPPTMILRPPQPCETKSPLQTIGEEQTQNPYTELLVLKAHHDIVRFLVQLDDYSLSSTCCFLTF

SEQ ID NO: 32933 - protein, 24 aa, Artificial Sequence
  Synthetic polypeptide
GLLSHVKLYERCRRASGPPGGGEV

SEQ ID NO: 32934 - protein, 314 aa, Artificial Sequence
  Synthetic polypeptide
NCMKDAAELLGHREAVKCRLGVGGSDPGGHPGDLAPNSDPVEGATLLPGEDITTVGSTPASLAVSAKDPDKQPGPQGGPNPSQAGQQQGQQKQKRHRTRFTPAQLNELERSFAKTHYPDIFMREELALRIGLTESRVQVWFQNRRAKWKKRKKTTNVFRAPGTLLPTPGLPQFPSAAAAAAAAMGDSLCSFHANDTRWAAAAMPGVSQLPLPPALGRQQAMAQSLSQCSLAAGPPPNSMGLSNSLAGSNGAGLQSHLYQPAFPGMVPASLPGPSNVSGSPQLCSSPDSSDVWRGTSIASLRRKALEHTVSMSFT

SEQ ID NO: 32935 - protein, 40 aa, Artificial Sequence
  Synthetic polypeptide
WVYQGFPLLRLPHFLLPLPDKKWLSPPTMILRPPQPCETV

SEQ ID NO: 32936 - protein, 24 aa, Artificial Sequence
  Synthetic polypeptide
SQHFGRLRKMKKTWKKLRNIKKHV

SEQ ID NO: 32937 - protein, 42 aa, Artificial Sequence
  Synthetic polypeptide
QVQWLMPVIPALWEAEENEKDLEEAEEYKEARLVLDSVKLEA

SEQ ID NO: 32938 - protein, 31 aa, Artificial Sequence
  Synthetic polypeptide
RKYSNFVLLIFGFLSTSMGLKHIESADTGVI

SEQ ID NO: 32939 - protein, 331 aa, Artificial Sequence
  Synthetic polypeptide
NILSQQILELFETCQQQISDLKKKELCRTQLQREIQLLFPQSRLFLVGSSLNGFGTRSSDGDLCLVVKEEPCFFQVNQKTEARHILTLVHKHFCTRLSGYIERPQLIRAKVPIVKFRDKVSCVEFDLNVNNIVGIRNTFLLRTYAYLENRVRPLVLVIKKWASHHQINDASRGTLSSYSLVLMVLHYLQTLPEPILPSLQKIYPESFSPAIQLHLVHQAPCNVPPYLSKNESNLGDLLLGFLKYYATEFDWNSQMISVREAKAIPRPDGIEWRNKYICVEEPFDGTNTARAVHEKQKFDMIKDQFLKSWHRLKNKRDLNSILPVRAAVLKR

SEQ ID NO: 32940 - protein, 19 aa, Artificial Sequence
  Synthetic polypeptide
QLCFTHLWVPINQHGSETY

SEQ ID NO: 32941 - protein, 327 aa, Artificial Sequence
  Synthetic polypeptide
NILSQQILELFETCQQQISDLKKKELCRTQLQREIQLLFPQSRLFLVGSSLNGFGTRSSDGDLCLVVKEEPVNQKTEARHILTLVHKHFCTRLSGYIERPQLIRAKVPIVKFRDKVSCVEFDLNVNNIVGIRNTFLLRTYAYLENRVRPLVLVIKKWASHHQINDASRGTLSSYSLVLMVLHYLQTLPEPILPSLQKIYPESFSPAIQLHLVHQAPCNVPPYLSKNESNLGDLLLGFLKYYATEFDWNSQMISVREAKAIPRPDGIEWRNKYICVEEPFDGTNTARAVHEKQKFDMIKDQFLKSWHRLKNKRDLNSILPVRAAVLKR

SEQ ID NO: 32942 - protein, 288 aa, Artificial Sequence
  Synthetic polypeptide
NILSQQILELFETCQQQISDLKKKELCRTQLQREIQLLFPQSRLFLVGSSLNGFGTRSSDGDLCLVVKEEPCFFQVNQKTEARHILTLVHKHFCTRLSGYIERPQLIRAKVPIVKFRDKVSCVEFDLNVNNIVGIRNTFLLRTYAYPLPEPILPSLQKIYPESFSPAIQLHLVHQAPCNVPPYLSKNESNLGDLLLGFLKYYATEFDWNSQMISVREAKAIPRPDGIEWRNKYICVEEPFDGTNTARAVHEKQKFDMIKDQFLKSWHRLKNKRDLNSILPVRAAVLKR

SEQ ID NO: 32943 - protein, 53 aa, Artificial Sequence
  Synthetic polypeptide
ADVSLLVLLYSCTLYIKLHVMFLLTSQRMNQTLGTSYWAFLNIMLQNLTGIVK

SEQ ID NO: 32944 - protein, 128 aa, Artificial Sequence
  Synthetic polypeptide
CESFSPAIQLHLVHQAPCNVPPYLSKNESNLGDLLLGFLKYYATEFDWNSQMISVREAKAIPRPDGIEWRNKYICVEEPFDGTNTARAVHEKQKFDMIKDQFLKSWHRLKNKRDLNSILPVRAAVLKR

SEQ ID NO: 32945 - protein, 27 aa, Artificial Sequence
  Synthetic polypeptide
DVEALQKDLAHKMQRIWPRMYMMPLCK

SEQ ID NO: 32946 - protein, 19 aa, Artificial Sequence
  Synthetic polypeptide
KHFKRTWHIRCKEYGQGCT

SEQ ID NO: 32947 - protein, 14 aa, Artificial Sequence
  Synthetic polypeptide
GLPSHAELAFHLLP

SEQ ID NO: 32948 - protein, 31 aa, Artificial Sequence
  Synthetic polypeptide
DVPCFPFTFCHDCKFPEASPAMQNLPFTSCH

SEQ ID NO: 32949 - protein, 47 aa, Artificial Sequence
  Synthetic polypeptide
EWQFLLHALSLLLPCKMCLASPSPSAMIVSFLRPPQPCRTCLSPPAM

SEQ ID NO: 32950 - protein, 27 aa, Artificial Sequence
  Synthetic polypeptide
CSNCPAESSHHRTSPIHSSHVPFTSCH

SEQ ID NO: 32951 - protein, 36 aa, Artificial Sequence
  Synthetic polypeptide
GHHYNSTVNAATAQLSLPIIGRPQSIPAMCLSPPAM

SEQ ID NO: 32952 - protein, 20 aa, Artificial Sequence
  Synthetic polypeptide
VFPSSDVPNPFQPCAFHLLP

SEQ ID NO: 32953 - protein, 28 aa, Artificial Sequence
  Synthetic polypeptide
CSNCPAESSHHRTSPIHSSHEVPFTSCH

SEQ ID NO: 32954 - protein, 37 aa, Artificial Sequence
  Synthetic polypeptide
GHHYNSTVNAATAQLSLPIIGRPQSIPAMKCLSPPAM

SEQ ID NO: 32955 - protein, 34 aa, Artificial Sequence
  Synthetic polypeptide
CSNCPAESSHHRTSPIHSSHDGVPLCCPGWSTVA

SEQ ID NO: 32956 - protein, 65 aa, Artificial Sequence
  Synthetic polypeptide
GHHYNSTVNAATAQLSLPIIGRPQSIPAMMESHSVAQAGVQWHDLGSLQPPPPRCQAILLPQPPK

SEQ ID NO: 32957 - protein, 25 aa, Artificial Sequence
  Synthetic polypeptide
CSNCPAESSHHRTSPIHSSHETINA

SEQ ID NO: 32958 - protein, 34 aa, Artificial Sequence
  Synthetic polypeptide
GHHYNSTVNAATAQLSLPIIGRPQSIPAMKLSML

SEQ ID NO: 32959 - protein, 20 aa, Artificial Sequence
  Synthetic polypeptide
CCFPACLHLFCSPWIKGILE

SEQ ID NO: 32960 - protein, 114 aa, Artificial Sequence
  Synthetic polypeptide
AHCGDLLLRKKNISFKILLLIDKAPGHPRALMEMCKEIDAVFLHACIYSAARGSKGSWSENILEYFLRNSQITAEDGAEITWYHAANHKAQTNEALKKTRFHRVGQTGLELLTS

SEQ ID NO: 32961 - protein, 35 aa, Artificial Sequence
  Synthetic polypeptide
WRCAKRLMLFSCMLASILQPVDQRDLGVKIYWNIF

SEQ ID NO: 32962 - protein, 323 aa, Artificial Sequence
  Synthetic polypeptide
AHCGDLLLRKKNISFKILLLIDKAPGHPRALMEMCKEIDAVFLHACIYSAARGSKGSWSENILEYFLRNSQITAEDGAEITWYHAANHKAQTNEALKSTAHMIEADVLLPSDGSEHSQPIMAHPPETNSDNTLQEWLTEVMKSNKGIKLDFKSLAVVEPSMMLLENVKRHLKRPVWINADILPGPNGNSKVIDAKPFLDTVISFFPDVTFSLGWTTGWHPEKVNEGYSWTMVKEMEYICNELSQPVTFPVRAALVRQSCSQLLWLLKKSNRYSLTIWTGKNDNYSVEDLLYIRDHFDKKQVFYDILEPQNHEFKQAIGIKVNL

SEQ ID NO: 32963 - protein, 25 aa, Artificial Sequence
  Synthetic polypeptide
NHHFVKISALPCSLQHYLQWPRILE

SEQ ID NO: 32964 - protein, 75 aa, Artificial Sequence
  Synthetic polypeptide
RYLHSHVHCSIIYSGQGSWSENILEYFLRNSQITAEDGAEITWYHAANHKAQTNEALKKTRFHRVGQTGLELLTS

SEQ ID NO: 32965 - protein, 49 aa, Artificial Sequence
  Synthetic polypeptide
LYNSAIPFPGTYPKEMKSPLCKDICTPMFIAALFTVAKDLGVKIYWNIF

SEQ ID NO: 32966 - protein, 284 aa, Artificial Sequence
  Synthetic polypeptide
RYLHSHVHCSIIYSGQGSWSENILEYFLRNSQITAEDGAEITWYHAANHKAQTNEALKSTAHMIEADVLLPSDGSEHSQPIMAHPPETNSDNTLQEWLTEVMKSNKGIKLDFKSLAVVEPSMMLLENVKRHLKRPVWINADILPGPNGNSKVIDAKPFLDTVISFFPDVTFSLGWTTGWHPEKVNEGYSWTMVKEMEYICNELSQPVTFPVRAALVRQSCSQLLWLLKKSNRYSLTIWTGKNDNYSVEDLLYIRDHFDKKQVFYDILEPQNHEFKQAIGIKVNL

SEQ ID NO: 32967 - protein, 18 aa, Artificial Sequence
  Synthetic polypeptide
KMNKSRSNVQHEDSRILE

SEQ ID NO: 32968 - protein, 71 aa, Artificial Sequence
  Synthetic polypeptide
TSQDLMCNMRTPGSWSENILEYFLRNSQITAEDGAEITWYHAANHKAQTNEALKKTRFHRVGQTGLELLTS

SEQ ID NO: 32969 - protein, 14 aa, Artificial Sequence
  Synthetic polypeptide
GLQDLGVKIYWNIF

SEQ ID NO: 32970 - protein, 280 aa, Artificial Sequence
  Synthetic polypeptide
TSQDLMCNMRTPGSWSENILEYFLRNSQITAEDGAEITWYHAANHKAQTNEALKSTAHMIEADVLLPSDGSEHSQPIMAHPPETNSDNTLQEWLTEVMKSNKGIKLDFKSLAVVEPSMMLLENVKRHLKRPVWINADILPGPNGNSKVIDAKPFLDTVISFFPDVTFSLGWTTGWHPEKVNEGYSWTMVKEMEYICNELSQPVTFPVRAALVRQSCSQLLWLLKKSNRYSLTIWTGKNDNYSVEDLLYIRDHFDKKQVFYDILEPQNHEFKQAIGIKVNL

SEQ ID NO: 32971 - protein, 252 aa, Artificial Sequence
  Synthetic polypeptide
NGFPHTQNSIETWHRRSESLIGNTHAGTAHMIEADVLLPSDGSEHSQPIMAHPPETNSDNTLQEWLTEVMKSNKGIKLDFKSLAVVEPSMMLLENVKRHLKRPVWINADILPGPNGNSKVIDAKPFLDTVISFFPDVTFSLGWTTGWHPEKVNEGYSWTMVKEMEYICNELSQPVTFPVRAALVRQSCSQLLWLLKKSNRYSLTIWTGKNDNYSVEDLLYIRDHFDKKQVFYDILEPQNHEFKQAIGIKVNL

SEQ ID NO: 32972 - protein, 9 aa, Artificial Sequence
  Synthetic polypeptide
GILMQVLLT

SEQ ID NO: 32973 - protein, 37 aa, Artificial Sequence
  Synthetic polypeptide
VHVKWISTYPKQHRNMAQKIGKFNREYSCRYCSHDRG

SEQ ID NO: 32974 - protein, 7 aa, Artificial Sequence
  Synthetic polypeptide
EAEVLLT

SEQ ID NO: 32975 - protein, 13 aa, Artificial Sequence
  Synthetic polypeptide
HFERQRYCSHDRG

SEQ ID NO: 32976 - protein, 242 aa, Artificial Sequence
  Synthetic polypeptide
PGVVALTWNLSTLRGRGTAHMIEADVLLPSDGSEHSQPIMAHPPETNSDNTLQEWLTEVMKSNKGIKLDFKSLAVVEPSMMLLENVKRHLKRPVWINADILPGPNGNSKVIDAKPFLDTVISFFPDVTFSLGWTTGWHPEKVNEGYSWTMVKEMEYICNELSQPVTFPVRAALVRQSCSQLLWLLKKSNRYSLTIWTGKNDNYSVEDLLYIRDHFDKKQVFYDILEPQNHEFKQAIGIKVNL

SEQ ID NO: 32977 - protein, 39 aa, Artificial Sequence
  Synthetic polypeptide
LIPSLRPAYPHHICCPPVSHLIAVTVIRLTDHKKKVWQL

SEQ ID NO: 32978 - protein, 30 aa, Artificial Sequence
  Synthetic polypeptide
QITRRRSGSCRTIHDALGKCEEASEASCMD

SEQ ID NO: 32979 - protein, 187 aa, Artificial Sequence
  Synthetic polypeptide
SLNSRHSYQIDRSQEEGLAVVEPSMMLLENVKRHLKRPVWINADILPGPNGNSKVIDAKPFLDTVISFFPDVTFSLGWTTGWHPEKVNEGYSWTMVKEMEYICNELSQPVTFPVRAALVRQSCSQLLWLLKKSNRYSLTIWTGKNDNYSVEDLLYIRDHFDKKQVFYDILEPQNHEFKQAIGIKVNL

SEQ ID NO: 32980 - protein, 34 aa, Artificial Sequence
  Synthetic polypeptide
GEKSLSRHPSVFFLYCPHYIIFQEDQLYKKKEKL

SEQ ID NO: 32981 - protein, 47 aa, Artificial Sequence
  Synthetic polypeptide
CRSEGRNHYHVILLFSSCIARITSSSKKTNCTRRKKNCNKKWKAPCD

SEQ ID NO: 32982 - protein, 321 aa, Artificial Sequence
  Synthetic polypeptide
ENDDAEVRGEITITSSFCFLLVLPALHHLPRRPTVQEERKIVIKNGRHPVIDVLLGEQDQYVPNNTDLSEDSERVMIITGPNMGGKSSYIKQVALITIMAQIGSYVPAEEATIGIVDGIFTRMGAADNIYKGQSTFMEELTDTAEIIRKATSQSLVILDELGRGTSTHDGIAIAYATLEYFIRDVKSLTLFVTHYPPVCELEKNYSHQVGNYHMGFLVSEDESKLDPGAAEQVPDFVTFLYQITRGIAARSYGLNVAKLADVPGEILKKAAHKSKELEGLINTKRKRLKYFAKLWTMHNAQDLQKWTEEFNMEETQTSLLH

SEQ ID NO: 32983 - protein, 32 aa, Artificial Sequence
  Synthetic polypeptide
GLVWWFMPVIPALWEAKAQQNKSLILSPSFTK

SEQ ID NO: 32984 - protein, 14 aa, Artificial Sequence
  Synthetic polypeptide
SQHFGRPRRSRTSP

SEQ ID NO: 32985 - protein, 110 aa, Artificial Sequence
  Synthetic polypeptide
PGMVVHACNPSTLGGQGAAEQVPDFVTFLYQITRGIAARSYGLNVAKLADVPGEILKKAAHKSKELEGLINTKRKRLKYFAKLWTMHNAQDLQKWTEEFNMEETQTSLLH

SEQ ID NO: 32986 - protein, 55 aa, Artificial Sequence
  Synthetic polypeptide
VGLGSDQECCSSSQSSARKHSPRRWHASRSCTTRVLSAFYVTSVPWRSKAPIEDT

SEQ ID NO: 32987 - protein, 273 aa, Artificial Sequence
  Synthetic polypeptide
DWALIKSAAAAPSPVLGNIPPGDGMPVGPVPPGFFQPFMSPRYPGGPRPPLRIPNQALGGVPGSQPLLPSGMDPTRQQGHPNMGGPMQRMTPPRGMVPLGPQNYGGAMRPPLNALGGPGMPGMNMGPGGGRPWPNPTNANSIPYSSASPGNYVGPPGGGGPPGTPIMPSPADSTNSGDNMYTLMNAVPPGPNRPNFPMGPGSDGPMGGLGGMESHHMNGSLGSGDMDSISKNSPNNMSLSNQPGTPRDDGEMGGNFLNPFQSESYSPSMTMSV

SEQ ID NO: 32988 - protein, 11 aa, Artificial Sequence
  Synthetic polypeptide
SRVLQQLPVQC

SEQ ID NO: 32989 - protein, 281 aa, Artificial Sequence
  Synthetic polypeptide
DWALIKSAAAAPSPVLGNIPPGDGMPVGPVPPGFFQPFMSPRYPGGPRPPLRIPNQALGGVPGSQPLLPSGMDPTRQQGHPNMGGPMQRMTPPRGMVPLGPQSDPWLSLQNYGGAMRPPLNALGGPGMPGMNMGPGGGRPWPNPTNANSIPYSSASPGNYVGPPGGGGPPGTPIMPSPADSTNSGDNMYTLMNAVPPGPNRPNFPMGPGSDGPMGGLGGMESHHMNGSLGSGDMDSISKNSPNNMSLSNQPGTPRDDGEMGGNFLNPFQSESYSPSMTMSV

SEQ ID NO: 32990 - protein, 270 aa, Artificial Sequence
  Synthetic polypeptide
DWALIKSAAAAPSPVLGNIPPGDGMPVGPVPPGFFQPFMSPRYPGGPRPPLRIPNQALGGVPGSQPLLPSGMDPTRQQGHPNMGGPMQRMTPPRGMVPLGPQNYGGAMRPPLNALGGPGMPGMNMGPGGGRPWPNPTNANSIPYSSASPGNYVGPPGGGGPPGTPIMPSPADSTNSGDNMYTLMNAVPPGPNRPNFPMGPGSDGPMGGLGGMESHHMNGSLGKAFQFDNSPNNMSLSNQPGTPRDDGEMGGNFLNPFQSESYSPSMTMSV

SEQ ID NO: 32991 - protein, 111 aa, Artificial Sequence
  Synthetic polypeptide
VGLGSDQECCSSSQSSARKHSPRRWHASRSCTTRVLSGTWRCPRKSAITPQWNGSNSTTRTSKYGWANAENDSSKRNGALRTTELWRCNETPTECFRWPWNAWNEHGSRWW

SEQ ID NO: 32992 - protein, 253 aa, Artificial Sequence
  Synthetic polypeptide
DWALIKSAAAAPSPVLGNIPPGDGMPVGPVPPGFFQALGGVPGSQPLLPSGMDPTRQQGHPNMGGPMQRMTPPRGMVPLGPQNYGGAMRPPLNALGGPGMPGMNMGPGGGRPWPNPTNANSIPYSSASPGNYVGPPGGGGPPGTPIMPSPADSTNSGDNMYTLMNAVPPGPNRPNFPMGPGSDGPMGGLGGMESHHMNGSLGSGDMDSISKNSPNNMSLSNQPGTPRDDGEMGGNFLNPFQSESYSPSMTMSV

SEQ ID NO: 32993 - protein, 124 aa, Artificial Sequence
  Synthetic polypeptide
DWALIKSAAAAPSPVLGNIPPGDGMPVGPVPPGFFQPFMSPRYPGGPRPPLRIPNQALGGVPGSQPLLPSGMDPTRQQGHPNMGGPMQRMTPPRGMVPLGPQNYGGAMRPPLNALGGPGMPGMN

SEQ ID NO: 32994 - protein, 14 aa, Artificial Sequence
  Synthetic polypeptide
TCILGSLLCSSRET

SEQ ID NO: 32995 - protein, 303 aa, Artificial Sequence
  Synthetic polypeptide
GLPSHAELVFWDLYCAAPERRETCEHSSEAKAFHDYSAAAAPSPVLGNIPPGDGMPVGPVPPGFFQPFMSPRYPGGPRPPLRIPNQALGGVPGSQPLLPSGMDPTRQQGHPNMGGPMQRMTPPRGMVPLGPQNYGGAMRPPLNALGGPGMPGMNMGPGGGRPWPNPTNANSIPYSSASPGNYVGPPGGGGPPGTPIMPSPADSTNSGDNMYTLMNAVPPGPNRPNFPMGPGSDGPMGGLGGMESHHMNGSLGSGDMDSISKNSPNNMSLSNQPGTPRDDGEMGGNFLNPFQSESYSPSMTMSV

SEQ ID NO: 32996 - protein, 72 aa, Artificial Sequence
  Synthetic polypeptide
GASPFAQLSFFSMLSPCESAMDSKLPEASPAMLNLYFGISTVQLQRDVKHVNTQVKQKPSMITVLQQLPVQC

SEQ ID NO: 32997 - protein, 240 aa, Artificial Sequence
  Synthetic polypeptide
GLPSHAELVFWDLYCAAPERRETCEHSSEAKAFHDYPFMSPRYPGGPRPPLRIPNQALGGVPGSQPLLPSGMDPTRQQGHPNMGGPMQRMTPPRGMVPLGPQNYGGAMRPPLNALGGPGMPGMNMGPGGGRPWPNPTNANSIPYSSASPGNYVGPPGGGGPPGTPIMPSPADSTNSGDNMYTLMNAVPPGPNRPNFPMGPGSDGPMGGLGGMESHHMNGSLGSGDMDSISKYSPSMTMSV

SEQ ID NO: 32998 - protein, 77 aa, Artificial Sequence
  Synthetic polypeptide
GASPFAQLSFFSMLSPCESAMDSKLPEASPAMLNLYFGISTVQLQRDVKHVNTQVKQKPSMITLLCHLGTLEVQGPH

SEQ ID NO: 32999 - protein, 273 aa, Artificial Sequence
  Synthetic polypeptide
GLPSHAELVFWDLYCAAPERRETCEHSSEAKAFHDYPFMSPRYPGGPRPPLRIPNQALGGVPGSQPLLPSGMDPTRQQGHPNMGGPMQRMTPPRGMVPLGPQNYGGAMRPPLNALGGPGMPGMNMGPGGGRPWPNPTNANSIPYSSASPGNYVGPPGGGGPPGTPIMPSPADSTNSGDNMYTLMNAVPPGPNRPNFPMGPGSDGPMGGLGGMESHHMNGSLGSGDMDSISKNSPNNMSLSNQPGTPRDDGEMGGNFLNPFQSESYSPSMTMSV

SEQ ID NO: 33000 - protein, 283 aa, Artificial Sequence
  Synthetic polypeptide
GLPSHAELVFWDLYCAAPERRETCEHSSEAKAFHDYSAAAAPSPVLGNIPPGDGMPVGPVPPGFFQALGGVPGSQPLLPSGMDPTRQQGHPNMGGPMQRMTPPRGMVPLGPQNYGGAMRPPLNALGGPGMPGMNMGPGGGRPWPNPTNANSIPYSSASPGNYVGPPGGGGPPGTPIMPSPADSTNSGDNMYTLMNAVPPGPNRPNFPMGPGSDGPMGGLGGMESHHMNGSLGSGDMDSISKNSPNNMSLSNQPGTPRDDGEMGGNFLNPFQSESYSPSMTMSV

SEQ ID NO: 33001 - protein, 281 aa, Artificial Sequence
  Synthetic polypeptide
GLPSHAELVFWDLYCAAPERRETCEHSSEAKAFHDYPFMSPRYPGGPRPPLRIPNQALGGVPGSQPLLPSGMDPTRQQGHPNMGGPMQRMTPPRGMVPLGPQSDPWLSLQNYGGAMRPPLNALGGPGMPGMNMGPGGGRPWPNPTNANSIPYSSASPGNYVGPPGGGGPPGTPIMPSPADSTNSGDNMYTLMNAVPPGPNRPNFPMGPGSDGPMGGLGGMESHHMNGSLGSGDMDSISKNSPNNMSLSNQPGTPRDDGEMGGNFLNPFQSESYSPSMTMSV

SEQ ID NO: 33002 - protein, 154 aa, Artificial Sequence
  Synthetic polypeptide
GLPSHAELVFWDLYCAAPERRETCEHSSEAKAFHDYSAAAAPSPVLGNIPPGDGMPVGPVPPGFFQPFMSPRYPGGPRPPLRIPNQALGGVPGSQPLLPSGMDPTRQQGHPNMGGPMQRMTPPRGMVPLGPQNYGGAMRPPLNALGGPGMPGMN

SEQ ID NO: 33003 - protein, 15 aa, Artificial Sequence
  Synthetic polypeptide
GQCILGSLLCSSRET

SEQ ID NO: 33004 - protein, 297 aa, Artificial Sequence
  Synthetic polypeptide
ASVFWDLYCAAPERRETCEHSSEAKAFHDYSAAAAPSPVLGNIPPGDGMPVGPVPPGFFQPFMSPRYPGGPRPPLRIPNQALGGVPGSQPLLPSGMDPTRQQGHPNMGGPMQRMTPPRGMVPLGPQNYGGAMRPPLNALGGPGMPGMNMGPGGGRPWPNPTNANSIPYSSASPGNYVGPPGGGGPPGTPIMPSPADSTNSGDNMYTLMNAVPPGPNRPNFPMGPGSDGPMGGLGGMESHHMNGSLGSGDMDSISKNSPNNMSLSNQPGTPRDDGEMGGNFLNPFQSESYSPSMTMSV

SEQ ID NO: 33005 - protein, 39 aa, Artificial Sequence
  Synthetic polypeptide
PVYFGISTVQLQRDVKHVNTQVKQKPSMITVLQQLPVQC

SEQ ID NO: 33006 - protein, 234 aa, Artificial Sequence
  Synthetic polypeptide
ASVFWDLYCAAPERRETCEHSSEAKAFHDYPFMSPRYPGGPRPPLRIPNQALGGVPGSQPLLPSGMDPTRQQGHPNMGGPMQRMTPPRGMVPLGPQNYGGAMRPPLNALGGPGMPGMNMGPGGGRPWPNPTNANSIPYSSASPGNYVGPPGGGGPPGTPIMPSPADSTNSGDNMYTLMNAVPPGPNRPNFPMGPGSDGPMGGLGGMESHHMNGSLGSGDMDSISKYSPSMTMSV

SEQ ID NO: 33007 - protein, 44 aa, Artificial Sequence
  Synthetic polypeptide
PVYFGISTVQLQRDVKHVNTQVKQKPSMITLLCHLGTLEVQGPH

SEQ ID NO: 33008 - protein, 267 aa, Artificial Sequence
  Synthetic polypeptide
ASVFWDLYCAAPERRETCEHSSEAKAFHDYPFMSPRYPGGPRPPLRIPNQALGGVPGSQPLLPSGMDPTRQQGHPNMGGPMQRMTPPRGMVPLGPQNYGGAMRPPLNALGGPGMPGMNMGPGGGRPWPNPTNANSIPYSSASPGNYVGPPGGGGPPGTPIMPSPADSTNSGDNMYTLMNAVPPGPNRPNFPMGPGSDGPMGGLGGMESHHMNGSLGSGDMDSISKNSPNNMSLSNQPGTPRDDGEMGGNFLNPFQSESYSPSMTMSV

SEQ ID NO: 33009 - protein, 277 aa, Artificial Sequence
  Synthetic polypeptide
ASVFWDLYCAAPERRETCEHSSEAKAFHDYSAAAAPSPVLGNIPPGDGMPVGPVPPGFFQALGGVPGSQPLLPSGMDPTRQQGHPNMGGPMQRMTPPRGMVPLGPQNYGGAMRPPLNALGGPGMPGMNMGPGGGRPWPNPTNANSIPYSSASPGNYVGPPGGGGPPGTPIMPSPADSTNSGDNMYTLMNAVPPGPNRPNFPMGPGSDGPMGGLGGMESHHMNGSLGSGDMDSISKNSPNNMSLSNQPGTPRDDGEMGGNFLNPFQSESYSPSMTMSV

SEQ ID NO: 33010 - protein, 275 aa, Artificial Sequence
  Synthetic polypeptide
ASVFWDLYCAAPERRETCEHSSEAKAFHDYPFMSPRYPGGPRPPLRIPNQALGGVPGSQPLLPSGMDPTRQQGHPNMGGPMQRMTPPRGMVPLGPQSDPWLSLQNYGGAMRPPLNALGGPGMPGMNMGPGGGRPWPNPTNANSIPYSSASPGNYVGPPGGGGPPGTPIMPSPADSTNSGDNMYTLMNAVPPGPNRPNFPMGPGSDGPMGGLGGMESHHMNGSLGSGDMDSISKNSPNNMSLSNQPGTPRDDGEMGGNFLNPFQSESYSPSMTMSV

SEQ ID NO: 33011 - protein, 148 aa, Artificial Sequence
  Synthetic polypeptide
ASVFWDLYCAAPERRETCEHSSEAKAFHDYSAAAAPSPVLGNIPPGDGMPVGPVPPGFFQPFMSPRYPGGPRPPLRIPNQALGGVPGSQPLLPSGMDPTRQQGHPNMGGPMQRMTPPRGMVPLGPQNYGGAMRPPLNALGGPGMPGMN

SEQ ID NO: 33012 - protein, 2 aa, Artificial Sequence
  Synthetic polypeptide
KG

SEQ ID NO: 33013 - protein, 344 aa, Artificial Sequence
  Synthetic polypeptide
HLKRLALYVYEYLLHVGAQKSAQTFLSEIRWEKNITLGEPPGFLHSWWCVFWDLYCAAPERRETCEHSSEAKAFHDYSAAAAPSPVLGNIPPGDGMPVGPVPPGFFQPFMSPRYPGGPRPPLRIPNQALGGVPGSQPLLPSGMDPTRQQGHPNMGGPMQRMTPPRGMVPLGPQNYGGAMRPPLNALGGPGMPGMNMGPGGGRPWPNPTNANSIPYSSASPGNYVGPPGGGGPPGTPIMPSPADSTNSGDNMYTLMNAVPPGPNRPNFPMGPGSDGPMGGLGGMESHHMNGSLGSGDMDSISKNSPNNMSLSNQPGTPRDDGEMGGNFLNPFQSESYSPSMTMSV

SEQ ID NO: 33014 - protein, 58 aa, Artificial Sequence
  Synthetic polypeptide
MSCPQRVLLYLSLSLSQQNLILCYVFIYFLCSSSLKAETLPVFTPVSLALKKVSTLRI

SEQ ID NO: 33015 - protein, 281 aa, Artificial Sequence
  Synthetic polypeptide
HLKRLALYVYEYLLHVGAQKSAQTFLSEIRWEKNITLGEPPGFLHSWWCVFWDLYCAAPERRETCEHSSEAKAFHDYPFMSPRYPGGPRPPLRIPNQALGGVPGSQPLLPSGMDPTRQQGHPNMGGPMQRMTPPRGMVPLGPQNYGGAMRPPLNALGGPGMPGMNMGPGGGRPWPNPTNANSIPYSSASPGNYVGPPGGGGPPGTPIMPSPADSTNSGDNMYTLMNAVPPGPNRPNFPMGPGSDGPMGGLGGMESHHMNGSLGSGDMDSISKYSPSMTMSV

SEQ ID NO: 33016 - protein, 314 aa, Artificial Sequence
  Synthetic polypeptide
HLKRLALYVYEYLLHVGAQKSAQTFLSEIRWEKNITLGEPPGFLHSWWCVFWDLYCAAPERRETCEHSSEAKAFHDYPFMSPRYPGGPRPPLRIPNQALGGVPGSQPLLPSGMDPTRQQGHPNMGGPMQRMTPPRGMVPLGPQNYGGAMRPPLNALGGPGMPGMNMGPGGGRPWPNPTNANSIPYSSASPGNYVGPPGGGGPPGTPIMPSPADSTNSGDNMYTLMNAVPPGPNRPNFPMGPGSDGPMGGLGGMESHHMNGSLGSGDMDSISKNSPNNMSLSNQPGTPRDDGEMGGNFLNPFQSESYSPSMTMSV

SEQ ID NO: 33017 - protein, 324 aa, Artificial Sequence
  Synthetic polypeptide
HLKRLALYVYEYLLHVGAQKSAQTFLSEIRWEKNITLGEPPGFLHSWWCVFWDLYCAAPERRETCEHSSEAKAFHDYSAAAAPSPVLGNIPPGDGMPVGPVPPGFFQALGGVPGSQPLLPSGMDPTRQQGHPNMGGPMQRMTPPRGMVPLGPQNYGGAMRPPLNALGGPGMPGMNMGPGGGRPWPNPTNANSIPYSSASPGNYVGPPGGGGPPGTPIMPSPADSTNSGDNMYTLMNAVPPGPNRPNFPMGPGSDGPMGGLGGMESHHMNGSLGSGDMDSISKNSPNNMSLSNQPGTPRDDGEMGGNFLNPFQSESYSPSMTMSV

SEQ ID NO: 33018 - protein, 322 aa, Artificial Sequence
  Synthetic polypeptide
HLKRLALYVYEYLLHVGAQKSAQTFLSEIRWEKNITLGEPPGFLHSWWCVFWDLYCAAPERRETCEHSSEAKAFHDYPFMSPRYPGGPRPPLRIPNQALGGVPGSQPLLPSGMDPTRQQGHPNMGGPMQRMTPPRGMVPLGPQSDPWLSLQNYGGAMRPPLNALGGPGMPGMNMGPGGGRPWPNPTNANSIPYSSASPGNYVGPPGGGGPPGTPIMPSPADSTNSGDNMYTLMNAVPPGPNRPNFPMGPGSDGPMGGLGGMESHHMNGSLGSGDMDSISKNSPNNMSLSNQPGTPRDDGEMGGNFLNPFQSESYSPSMTMSV

SEQ ID NO: 33019 - protein, 195 aa, Artificial Sequence
  Synthetic polypeptide
HLKRLALYVYEYLLHVGAQKSAQTFLSEIRWEKNITLGEPPGFLHSWWCVFWDLYCAAPERRETCEHSSEAKAFHDYSAAAAPSPVLGNIPPGDGMPVGPVPPGFFQPFMSPRYPGGPRPPLRIPNQALGGVPGSQPLLPSGMDPTRQQGHPNMGGPMQRMTPPRGMVPLGPQNYGGAMRPPLNALGGPGMPGMN

SEQ ID NO: 33020 - protein, 28 aa, Artificial Sequence
  Synthetic polypeptide
MLTHREKWNIQYLGNPFLYFIPARRMNS

SEQ ID NO: 33021 - protein, 23 aa, Artificial Sequence
  Synthetic polypeptide
HIGKNGTSNTWATLFCTSSLQDE

SEQ ID NO: 33022 - protein, 72 aa, Artificial Sequence
  Synthetic polypeptide
GKMEHPILGQPFFVLHPCKTNEFMTPVLKNSQKINKNVNYITSWLSIVGPVVGLNLPLSYAKATSQDERNVP

SEQ ID NO: 33023 - protein, 36 aa, Artificial Sequence
  Synthetic polypeptide
GKMEHPILGQPFFVLHPCKTNEFMTPVLKNSQKINK

SEQ ID NO: 33024 - protein, 4 aa, Artificial Sequence
  Synthetic polypeptide
QSCL

SEQ ID NO: 33025 - protein, 19 aa, Artificial Sequence
  Synthetic polypeptide
AEIAPLLSSLGDRVVFEAW

SEQ ID NO: 33026 - protein, 232 aa, Artificial Sequence
  Synthetic polypeptide
SQLLRRLRQENCLNLGGGGCGELRSRHCSPAWVTELSLKLGDAGNPRSLAIRFILTNYNKLSIQSWFSLRRVEIISNNSIQAVFNPTGVYAPSGYSYRCQRVGSLQQDQALLLPSDTDDGSSLWEVTFIDFQIQGFAIKGGRFTKAQDCASSFSPAFLIGLAMSLILLLVLAYALHMLIYLRYLDQQYDLIASPAHFSQLKARDTAEEKELLRSQGAECYKLRSQQISKIYV

SEQ ID NO: 33027 - protein, 35 aa, Artificial Sequence
  Synthetic polypeptide
MEGAKEADDAPSISTLGLQQETTEPMKTDSAESED

SEQ ID NO: 33028 - protein, 47 aa, Artificial Sequence
  Synthetic polypeptide
MNGTNWKLQKQALLYISGVWLKWKVPRKQMMPRVYLHLGCNKKQQSP

SEQ ID NO: 33029 - protein, 28 aa, Artificial Sequence
  Synthetic polypeptide
MEQTGNSRNKPFFIFLVFGLNGRCQGSR

SEQ ID NO: 33030 - protein, 56 aa, Artificial Sequence
  Synthetic polypeptide
VNKSLKKNQNPKPVLCVDGRFKMEHFASNVKIEFLNQRFPKKLMTWQWKKGNMLVN

SEQ ID NO: 33031 - protein, 4 aa, Artificial Sequence
  Synthetic polypeptide
KSSF

SEQ ID NO: 33032 - protein, 299 aa, Artificial Sequence
  Synthetic polypeptide
NGTLCLKCKNRVSESEISQEADDMAMEKGKYVGELRKALLSGAGPADVYTFNFSKESCYFFFEKNLKDVSFRLGSFNLEKVENPAEVIRELICYCLDTIAENQAKNEHLQKENERLLRDWNDVQGRFEKCVSAKEALETDLYKRFILVLNEKKTKIRSLHNKLLNAAQEREKDIKQEGETAICSEMTADRDPVYDESTDEESENQTDLSGLASAAVSKDDSIISSLDVTDIAPSRKRRQRMQRNLGTEPKMAPQENQLQEKEKPDSSLPETSKKEHISAENMSLETLRNSSPEDLFDEI

SEQ ID NO: 33033 - protein, 301 aa, Artificial Sequence
  Synthetic polypeptide
NGTLCLKCKNRVSESEISQEADDMAMEKGKYVGELRKALLSGAGPADVYTFNFSKESCYFFFEKNLKDVSFRLGSFNLEKVENPAEVIRELICYCLDTIAENQAKNEHLQKENERLLRDWNDVQGRFEKCVSAKEALETDLYKRFILVLNEKKTKIRSLHNKLLNAAQEREKDIKQEGETAICSEMTADRDPVYDESTDEESENQTDLSGLASAAVSKDDSIISSLDVTDIAPSRKRRQRMQRNLGTEPKMAPQENQLQEKENSRPDSSLPETSKKEHISAENMSLETLRNSSPEDLFDEI

SEQ ID NO: 33034 - protein, 85 aa, Artificial Sequence
  Synthetic polypeptide
GQARWLMPVIPPLWGAEVIFVIPIHVKMEVSVCQDWLMVPFPVSVQMASQTPTVLVLWRLHQMKKNQLQQVPALLIHAIMEEPVK

SEQ ID NO: 33035 - protein, 8 aa, Artificial Sequence
  Synthetic polypeptide
SHHFGGPR

SEQ ID NO: 33036 - protein, 474 aa, Artificial Sequence
  Synthetic polypeptide
PGAVAHACNPTTLGGRGDICDPNPCENGGICLPGLADGSFSCECPDGFTDPNCSSVVEVASDEEEPTSAGPCTPNPCHNGGTCEISEAYRGDTFIGYVCKCPRGFNGIHCQHNINECEVEPCKNGGICTDLVANYSCECPGEFMGRNCQYKCSGPLGIEGGIISNQQITASSTHRALFGLQKWYPYYARLNKKGLINAWTAAENDRWPWIQINLQRKMRVTGVITQGAKRIGSPEYIKSYKIAYSNDGKTWAMYKVKGTNEDMVFRGNIDNNTPYANSFTPPIKAQYVRLYPQVCRRHCTLRMELLGCELSGCSEPLGMKSGHIQDYQITASSIFRTLNMDMFTWEPRKARLDKQGKVNAWTSGHNDQSQWLQVDLLVPTKVTGIITQGAKDFGHVQFVGSYKLAYSNDGEHWTVYQDEKQRKDKVFQGNFDNDTHRKNVIDPPIYARHIRILPWSWYGRITLRSELLGCTEEE

SEQ ID NO: 33037 - protein, 75 aa, Artificial Sequence
  Synthetic polypeptide
GQARWLMPVIPPLWGAEVIFVIPIHVKMEVSVCQDWLMVPFPVSVQMASQTPTVLVLWRLVPALLIHAIMEEPVK

SEQ ID NO: 33038 - protein, 464 aa, Artificial Sequence
  Synthetic polypeptide
PGAVAHACNPTTLGGRGDICDPNPCENGGICLPGLADGSFSCECPDGFTDPNCSSVVEVGPCTPNPCHNGGTCEISEAYRGDTFIGYVCKCPRGFNGIHCQHNINECEVEPCKNGGICTDLVANYSCECPGEFMGRNCQYKCSGPLGIEGGIISNQQITASSTHRALFGLQKWYPYYARLNKKGLINAWTAAENDRWPWIQINLQRKMRVTGVITQGAKRIGSPEYIKSYKIAYSNDGKTWAMYKVKGTNEDMVFRGNIDNNTPYANSFTPPIKAQYVRLYPQVCRRHCTLRMELLGCELSGCSEPLGMKSGHIQDYQITASSIFRTLNMDMFTWEPRKARLDKQGKVNAWTSGHNDQSQWLQVDLLVPTKVTGIITQGAKDFGHVQFVGSYKLAYSNDGEHWTVYQDEKQRKDKVFQGNFDNDTHRKNVIDPPIYARHIRILPWSWYGRITLRSELLGCTEEE

SEQ ID NO: 33039 - protein, 387 aa, Artificial Sequence
  Synthetic polypeptide
NAETPCTRETTKTRAEMDTRSGSQCSVTPEAIRNNEELVLPPRISRVNGWSLPLHYFRVVTWAVFVGLSLATFRIFIPLLPHSWKYIAYVVTGGIFSFHLVVHLIASCIDPADSNVRLMKNYSQPMPLFDRSKHAHVIQNQFCHLCKVTVNKKTKHCISCNKCVSGFDHHCKWINNCVGSRNYWFFFSTVASATAGMLCLIAILLYVLVQYLVNPRVLRTDPRYEDVKNMNTWLLFLPLFPVQVQTLIVVIIRMLVLLLDLLGLVQLGQLLIFHIYLKAKKMTTFEYLINTRKEESSKHQAVRKDPYVQMDKGFLQQGAGALGSSAQGVKAKSSLLIYKCPCHFCTSVNQDGDSKAQEADDAPSTSTLGLQQETTEPMKTDSAESED

SEQ ID NO: 33040 - protein, 64 aa, Artificial Sequence
  Synthetic polypeptide
ASDRIPELRGWPVKQLAKMLRLPALARLRKHVLKWTPAPGASVPSPQKPYATMKSWSCRPASPE

SEQ ID NO: 33041 - protein, 428 aa, Artificial Sequence
  Synthetic polypeptide
NAETPCTRETTKTRAEMDTRSGSQCSVTPEAILNNEKLVLPPRISRVNGWSLPLHYFQVVTWAVFVGLSSATFGIFIPFLPHAWKYIAYVVTGGIFSFHLVVHLIASCIDPADSNVRLMKNYSQPMPLFDRSKHAHVIQNQFCHLCKVTVNKKTKHCISCNKCVSGFDHHCKWINNCVGSRNYWFFFSTVASATAGMLCLIAILLYVLVQYLVNPGVLRTDPRYEDVKNMNTWLLFLPLFPVQVQTLIVVIIGMLVLLLDFLGLVHLGQLLIFHIYLKAKKMTTFEYLINNRKEESSKHQAVRKDPYVQMDKGVLQQGAGALGSSAQGVKAKSSLLIHKHLCHFCTSVNQDGDSTAREGDEDPCPSALGAKARNSRLICRRLCQFSTRVHPDGGSMAQEADDAPSISTLGLQQETTEPMKTDSAESED

SEQ ID NO: 33042 - protein, 64 aa, Artificial Sequence
  Synthetic polypeptide
ASDRIPELRGWPVKQLAKMLRLPALARLRKHVLKWTPAPGASVPSPQKPYSIMKSWSCRPASPE

SEQ ID NO: 33043 - protein, 53 aa, Artificial Sequence
  Synthetic polypeptide
ILDFQPPEWGEISFCSLKLLRLRWTPAPGASVPSPQKPYSIMKSWSCRPASPE

SEQ ID NO: 33044 - protein, 23 aa, Artificial Sequence
  Synthetic polypeptide
NYSVSDGHPLREPVFRHPRSHTQ

SEQ ID NO: 33045 - protein, 494 aa, Artificial Sequence
  Synthetic polypeptide
GREGDEGPCRPGLSQQRPLTLPAPPRENTVSVPSVGCSRKVPPWKLSAPLARHQTCWLLNLGLPASRMGRNKFLFFKITPSQMDTRSGSQCSVTPEAILNNEKLVLPPRISRVNGWSLPLHYFQVVTWAVFVGLSSATFGIFIPFLPHAWKYIAYVVTGGIFSFHLVVHLIASCIDPADSNVRLMKNYSQPMPLFDRSKHAHVIQNQFCHLCKVTVNKKTKHCISCNKCVSGFDHHCKWINNCVGSRNYWFFFSTVASATAGMLCLIAILLYVLVQYLVNPGVLRTDPRYEDVKNMNTWLLFLPLFPVQVQTLIVVIIGMLVLLLDFLGLVHLGQLLIFHIYLKAKKMTTFEYLINNRKEESSKHQAVRKDPYVQMDKGVLQQGAGALGSSAQGVKAKSSLLIHKHLCHFCTSVNQDGDSTAREGDEDPCPSALGAKARNSRLICRRLCQFSTRVHPDGGSMAQEADDAPSISTLGLQQETTEPMKTDSAESED

SEQ ID NO: 33046 - protein, 36 aa, Artificial Sequence
  Synthetic polypeptide
DVSLTSVSHSRKFIELKSGLLGTPFDSWEGEEGAGP

SEQ ID NO: 33047 - protein, 102 aa, Artificial Sequence
  Synthetic polypeptide
SSSLVFWEPHLIAGKVKKELDPDDSHLNLDETTKLLQDLHEAQAERGGSRPSSNLSSLSNASERDQHHLGSPSRLSVGEQPDVTHDPYEFLQSPEPAASAKT

SEQ ID NO: 33048 - protein, 3 aa, Artificial Sequence
  Synthetic polypeptide
LGR

SEQ ID NO: 33049 - protein, 34 aa, Artificial Sequence
  Synthetic polypeptide
QKGCDRYTAGCYHGDGQCHAEDYTSLFSCSMATL

SEQ ID NO: 33050 - protein, 532 aa, Artificial Sequence
  Synthetic polypeptide
HVLAPTAIAEHAGSPKPLRKREPETWQANKKGVIGIQLVVTMVMASVMQKIIPHYSLARWLLCNGSLRWYQHPTEEELRILAGKQQKGKTKKDRKYNGHIESKPLTIPKDIDLHLETKSVTEVDTLALHYFPEYQWLVDFTVAATVVYLVTEVYYNFMKPTQEMNISLVWCLLVLSFAIKVLFSLTTHYFKVEDGGERSVCVTFGFFFFVKAMAVLIVTENYLEFGLETGFTNFSDSAMQFLEKQGLESQSPVSKLTFKFFLAIFCSFIGAFLTFPGLRLAQMHLDALNLATEKITQTLLHINFLAPLFMVLLWVKPITKDYIMNPPLGKESIPLMTEATFDTLRLWLIILLCALRLAMMRSHLQAYLNLAQKCVDQMKKEAGRISTVELQKMVARVFYYLCVIALQYVAPLVMLLHTTLLLKTLGNHSWGIYPESISTLPVDNSLLSNSVYSELPSAEGKMKHNARQGPAVPPGMQAYGAAPFEDLQLDFTEMPKCGGNKYLLVLVCTFSGWVEAYPTRTEKACEITHVLL

SEQ ID NO: 33051 - protein, 24 aa, Artificial Sequence
  Synthetic polypeptide
QSMQGHQSHSGRGNQKPGKLTKRV

SEQ ID NO: 33052 - protein, 151 aa, Artificial Sequence
  Synthetic polypeptide
HVLAPTAIAEHAGSPKPLRKREPETWQANKKGVIGIQLVVTMVMASVMQKIIPHYSLARWLLCNGSLRWYQHPTEEELRILAGKQQKGKTKKDRKYNGHIESKPLTIPKDIDLHLETKSVTEVDTLGGLLKNDVDVLDYTLVEVNQNTYAT

SEQ ID NO: 33053 - protein, 517 aa, Artificial Sequence
  Synthetic polypeptide
HVLAPTAIAEHAGSPKPLRKREPETWQANKKGVIGIQLVVTMVMASVMQKIIPHYSLARWLLCNGSLRWYQHPTEEELRILAGKQQKGKTKKDRKYNGHIESKPLTIPKDIDLHLETKSVTEVDTLALHYFPEYQWLVDFTVAATVVYLVTEVYYNFMKPTQEMNISLVWCLLVLSFAIKVLFSLTTHYFKVEDGGERSVCVTFGFFFFVKAMAVLIVTENYLEFGLETGFTNFSDSAMQFLEKQGLESQSPVSKLTFKFFLAIFCSFIGAFLTFPGLRLAQMHLDALNLATEKITQTLLHINFLAPLFMVLLWVKPITKDYIMNPPLGKESIPLMTEATFDTLRLWLIILLCALRLAMMRSHLQAYLNLAQKCVDQMKKEAGRISTVELQKMVARVFYYLCVIALQYVAPLVMLLHTTLLLKTLGNHSWGIYPESISTLPVDNSLLSNSVYSELPSAEGKMKVTVTQITVALSSLKNIFTPLLFRGLLSFLTWWIAACLFSTSLFGLFYHQYLTVA

SEQ ID NO: 33054 - protein, 183 aa, Artificial Sequence
  Synthetic polypeptide
HVLAPTAIAEHAGSPKPLRKREPETWQANKKGVIGIQLVVTMVMASVMQKIIPHYSLARWLLCNGSLRWYQHPTEEELRILAGKQQKGKTKKDRKYNGHIESKPLTIPKDIDLHLETKSVTEVDTLALHYFPEYQWLVDFTVAATVVYLVTEVYYNFMKPTQEMNISLVWCLLVLSFAIRRWW

SEQ ID NO: 33055 - protein, 456 aa, Artificial Sequence
  Synthetic polypeptide
GLPSRVELCQVDLSALSREQTHKLELQLEEGEGHLVLLVTLTASATVSISDLSVNSLEDQKEREEILKRYSPLRIFHNLKDVGFLQVKVIRAEGLMAADVTGKSDPFCVVELNNDRLLTHTVYKNLNPEWNKVFTFNIKDIHSVLEVTVYDEDRDRSADFLGKVAIPLLSIQNGEQKAYVLKNKQLTGPTKGVIYLEIDVIFNAVKASLRTLIPKEQKYIEEENRLSKQLLLRNFIRMKRCVMVLVNAAYYVNSCFDWDSPPRSLAAFVLFLFVVWNFELYMIPLVLLLLLTWNYFLIISGKDNRQRDTVVEDMLEDEEEEDDKDDKDSEKKGFINKIYAIQEVCVSVQNILDEVASFGERIKNTFNWTVPFLSWLAIVALCVFTAILYCIPLRYIVLVWGINKFTKKLRSPYAIDNNELLDFLSRVPSDVQVVQYQELKPDPSHSPYKRKKNNLG

SEQ ID NO: 33056 - protein, 52 aa, Artificial Sequence
  Synthetic polypeptide
LCSSFAFCHDCEASPAVWNCARSTCQPSVGNRRTSWSCSWKRVRDTWCCWSL

SEQ ID NO: 33057 - protein, 40 aa, Artificial Sequence
  Synthetic polypeptide
TCPLACHLRRHNFAPHSPSAMIVRPPQPCGTVPGRPVSPQ

SEQ ID NO: 33058 - protein, 416 aa, Artificial Sequence
  Synthetic polypeptide
GLPSRVELCQVDLSALSREQTHKLELQLEEGEGHLVLLVTLTASATVSISDLSVNSLEDQKEREEILKRYSPLRIFHNLKDVGFLQVKVIRAEGLMAADVTGKSDPFCVVELNNDRLLTHTVYKNLNPEWNKVFTFNIKDIHSVLEVTVYDEDRDRSADFLGKVAIPLLSIQNGEQKAYVLKNKQLTGPTKGVIYLEIDVIFNAVKASLRTLIPKEQKYIEEENRLSKQLLLRNFIRMKRCVMVLVNAAYYVNSCFDWDSPPRSLAAFVVVEDMLEDEEEEDDKDDKDSEKKGFINKIYAIQEVCVSVQNILDEVASFGERIKNTFNWTVPFLSWLAIVALCVFTAILYCIPLRYIVLVWGINKFTKKLRSPYAIDNNELLDFLSRVPSDVQVVQYQELKPDPSHSPYKRKKNNLG

SEQ ID NO: 33059 - protein, 420 aa, Artificial Sequence
  Synthetic polypeptide
GLPSRVELCQVDLSALSREQTHKLELQLEEGEGHLVLLVTLTASATVSISDLSVNSLEDQKEREEILKRYSPLRIFHNLKDVGFLQVKVIRAEGLMAADVTGKSDPFCVVELNNDRLLTHTVYKNLNPEWNKVFTFNIKDIHSVLEVTVYDEDRDRSADFLGKVAIPLLSIQNGEQKAYVLKNKQLTGPTKGVIYLEIDVIFNAVKASLRTLIPKEQKYIEEENRLSKQLLLRNFIRMKRCVMVLVNAAYYVNSCFDWDSPPRSLAAFVLFLFVVWNFELYMIPLVLLLLLTWNYFLIISGKDNRQRDTVVEDMLEDEEEEDDKDDKDSEKKGFINKIYAIQEVCVSVQNILDEVASFGERIKNTFNWTVPFLSWLAIVALCVFTAILYCIPLRYIVLVWGINKFTKKLRSPYAIDNNEL

SEQ ID NO: 33060 - protein, 285 aa, Artificial Sequence
  Synthetic polypeptide
GLPSRVELCQVDLSALSREQTHKLELQLEEGEGHLVLLVTLTASATVSISDLSVNSLEDQKEREEILKRYSPLRIFHNLKDVGFLQVKVIRAEGLMAADVTGKSDPFCVVELNNDRLLTHTVYKNLNPEWNKVFTFNIKDIHSVLEVTVYDEDRDRSADFLGKVAIPLLSIQNGEQKAYVLKNKQLTGPTKGVIYLEIDVIFNAVKASLRTLIPKEQKYIEEENRLSKQLLLRNFIRMKRCVMVLVNAAYYVNSCFDWDSPPRSLAAFVLFLFVVWNFELYMIPL

SEQ ID NO: 33061 - protein, 278 aa, Artificial Sequence
  Synthetic polypeptide
GLPSRVELCQVDLSALSREQTHKLELQLEEGEGHLVLLVTLTASATVSISDLSVNSLEDQKEREEILKRYSPLRIFHNLKDVGFLQVKVIRAEGLMAADVTGKSDPFCVVELNNDRLLTHTVYKNLNPEWNKVFTFNIKDIHSVLEVTVYDEDRDRSADFLGKVAIPLLSIQNGEQKAYVLKNKQLTGPTKGVIYLEIDVIFNAVKASLRTLIPKEQKYIEEENRLSKQLLLRNFIRMKRCVMVLVNAAYYVNSCFDWDSPPRSLAAFVALYGTFINV

SEQ ID NO: 33062 - protein, 270 aa, Artificial Sequence
  Synthetic polypeptide
GLPSRVELCQVDLSALSREQTHKLELQLEEGEGHLVLLVTLTASATVSISDLSVNSLEDQKEREEILKRYSPLRIFHNLKDVGFLQVKVIRAEGLMAADVTGKSDPFCVVELNNDRLLTHTVYKNLNPEWNKVFTFNIKDIHSVLEVTVYDEDRDRSADFLGKVAIPLLSIQNGEQKAYVLKNKQLTGPTKGVIYLEIDVIFNAVKASLRTLIPKEQKYIEEENRLSKQLLLRNFIRMKRCVMVLVNAAYYVNSCFDWDSPPRSLAAFVV

SEQ ID NO: 33063 - protein, 39 aa, Artificial Sequence
  Synthetic polypeptide
YQLLRRLRQENCFNPGGRCCGGSNMAQVDKNTAGTRCRK

SEQ ID NO: 33064 - protein, 1443 aa, Artificial Sequence
  Synthetic polypeptide
GRRIASTQEADVVVARTWHKLIKTRQEQGAENEELHQLWRKLTQFLAESTEDQNNETQQLLFTAFENALGLSDKIPSEDHQVLYRHFIQSLSKFPHESARLKKACEGMINIYPTVQYPLEVLCLHLIESGNLTDEGQQYCCRLVEMDSKSGPGLIGLGIKALQDKKYEDAVRNLTEGLKESPVCTSGWYHLAEAQVKMHRPKEAVLSCSQALKIVDNLGASGNSLYQRNLCLHLKAEALIKLSDYDSSEEAIRTLDQISDADNIPGLLVLKSLAYRNKGSFDEAAKIMEDLLSSYPDLAEVHALEALIHFTKKDYLQAEKCFQRALEKDTEVAEYHYQLGLTYWFMGEETRKDKTKALTHFLKAARLDTYMGKVFCYLGHYYRDVVGDKNRARGCYRKAFELDDTDAESGAAAVDLSVELEDMEMALAILTTVTQKASAGTAKWAWLRRGLYYLKAGQHSQAVADLQAALRADPKDFNCWESLGEAYLSRGGYTTALKSFTKASELNPESIYSVFKVAAIQQILGKYKEAVAQYQMIIKKKEDYVPALKGLGECHLMMAKAALVDYLDGKAVDYIEKALEYFTCALQHRADVSCLWKLAGDACTCLYAVAPSKVNVHVLGVLLGQKEGKQVLKKNELLHLGGRCYGRALKLMSTSNTWCDLGINYYRQAQHLAETGSNMNDLKELLEKSLHCLKKAVRLDSNNHLYWNALGVVACYSGIGNYALAQHCFIKSIQSEQINAVAWTNLGVLYLTNENIEQAHEAFKMAQSLDPSYLMCWIGQALIAEAVGSYDTMDLFRHTTELNMHTEGALGYAYWVCTTLQDKSNRETELYQYNILQMNAIPAAQVILNKYVERIQNYAPAFTMLGYLNEHLQLKKEAANAYQRAILLLQTAEDQDTYNVAIRNYGRLLCSTGEYDKAIQAFKSTPLEVLEDIIGFALALFMKGLYKESSKAYERALSIVESEQDKAHILTALAITEYKQGKTDVAKTLLFKCSILKEPTTESLQALCALGLAMQDATLSKAALNELLKHIKHKDSNYQRCLLTSAIYALQGRSVAVQKQISKAVHSNPGDPALWSLLSRVVAQYAQRNAKGGVVAGNVAHILDSNHGKKALLYTAVNQLAMGSSSAEDEKNTALKTIQKAALLSPGDPAIWAGLMAACHADDKLALVNNTQPKRIDLYLALLSAVSASIKDEKFFENYNQSLEKWSLSQAVTGLIDTGRISEAETLCTKNLKSNPDQPAVILLLRQVQCKPLLESQKPLPDAVLEELQKTVMSNSTSVPAWQWLAHVYQSQGMMRAAEMCYRKSLQLASQRGSWSGKLSSLLRLALLALKVCMANISNDHWPSLVQEATTEALKLCFCPLAVLLQALLQFKRKMGARETRRLLERVVYQPGYPKSIASTARWYLLRHLYAKDDYELIDVLVNNAKTHGDTRALELNQRLSSQ

SEQ ID NO: 33065 - protein, 41 aa, Artificial Sequence
  Synthetic polypeptide
KYKISWAWWRMPVIPATQEAEAGELLQPRRQMLWWLEHGTS

SEQ ID NO: 33066 - protein, 538 aa, Artificial Sequence
  Synthetic polypeptide
GRRIASTQEADVVVARTWHKLIKTRQEQGAENEELHQLWRKLTQFLAESTEDQNNETQQLLFTAFENALGLSDKIPSEDHQVLYRHFIQSLSKFPHESARLKKACEGMINIYPTVQYPLEVLCLHLIESGNLTDEGQQYCCRLVEMDSKSGPGLIGLGIKALQDKKYEDAVRNLTEGLKESPVCTSGWYHLAEAQVKMHRPKEAVLSCSQALKIVDNLGASGNSLYQRNLCLHLKAEALIKLSDYDSSEEAIRTLDQISDADNIPGLLVLKSLAYRNKGSFDEAAKIMEDLLSSYPDLAEVHALEALIHFTKKDYLQAEKCFQRALEKDTEVAEYHYQLGLTYWFMGEETRKDKTKALTHFLKAARLDTYMGKVFCYLGHYYRDVVGDKNRARGCYRKAFELDDTDAESGAAAVDLSVELEDMEMALAILTTVTQKASAGTAKWAWLRRGLYYLKAGQHSQAVADLQAALRADPKDFNCWESLGEAYLSRGGYTTALKSFTKASELNPESIYSVFKVAAIQQILGKYKEAVAQYQMII

SEQ ID NO: 33067 - protein, 56 aa, Artificial Sequence
  Synthetic polypeptide
NPISTKNTKISQAWWWAPAQLLGRLSQENRLNLEYRGCSEPRLCHWTPALVTGMEG

SEQ ID NO: 33068 - protein, 59 aa, Artificial Sequence
  Synthetic polypeptide
QGWKVNISSRKSGSETSFYQLYEDTWDFLSECLHKLSNLLPITRSNVEWPLHSLNRILE

SEQ ID NO: 33069 - protein, 507 aa, Artificial Sequence
  Synthetic polypeptide
TEIVPLDSSLGDRDGRLTFHPGSQVVKLPFINFMKTRGTSFLNAYTNSPICCPSRAAMWSGLFTHLTESWNNFKGLDPNYTTWMDVMERHGYRTQKFGKLDYTSGHHSISNRVEAWTRDVAFLLRQEGRPMVNLIRNRTKVRVMERDWQNTDKAVNWLRKEAINYTEPFVIYLGLNLPHPYPSPSSGENFGSSTFHTSLYWLEKVSHDAIKIPKWSPLSEMHPVDYYSSYTKNCTGRFTKKEIKNIRAFYYAMCAETDAMLGEIILALHQLDLLQKTIVIYSSDHGELAMEHRQFYKMSMYEASAHVPLLMMGPGIKAGLQVSNVVSLVDIYPTMLDIAGIPLPQNLSGYSLLPLSSETFKNEHKVKNLHPPWILSEFHGCNVNASTYMLRTNHWKYIAYSDGASILPQLFDLSSDPDELTNVAVKFPEITYSLDQKLHSIINYPKVSASVHQYNKEQFIKWKQSIGQNYSNVIANLRWHQDWQKEPRKYENAIDQWLKTHMNPRAV

SEQ ID NO: 33070 - protein, 124 aa, Artificial Sequence
  Synthetic polypeptide
TEIVPLDSSLGDRDGRLTFHPGSQVVKLPFINFMKTRGTSFLNAYTNSPICCPSRAAMWSGLFTHLTESWNNFKGLDPNYTTWMDVMERHGYRTQKFGKLDYTSGHHSIRHSERGSTNQRSEKV

SEQ ID NO: 33071 - protein, 366 aa, Artificial Sequence
  Synthetic polypeptide
TEIVPLDSSLGDRDGRLTFHPGSQVVKLPFINFMKTRGTSFLNAYTNSPICCPSRAAMWSGLFTHLTESWNNFKGLDPNYTTWMDVMERHGYRTQKFGKLDYTSGHHSISNRVEAWTRDVAFLLRQEGRPMVNLIRNRTKVRVMERDWQNTDKAVNWLRKEAINYTEPFVIYLGLNLPHPYPSPSSGENFGSSTFHTSLYWLEKVSHDAIKIPKWSPLSEMHPVDYYSSYTKNCTGRFTKKEIKNIRAFYYAMCAETDAMLGEIILALHQLDLLQKTIVIYSSDHGELAMEHRQFYKMSMYEASAHVPLLMMGPGIKAGLQVSNVVSLVDIYPTMLDEKTEVEISKLLAEVHMASGILLEFLCLRT

SEQ ID NO: 33072 - protein, 78 aa, Artificial Sequence
  Synthetic polypeptide
QGWKVNISSRKSGSETSFYQLYEDTWDFLSECLHKLSNLLPITRSNRVEAWTRDVAFLLRQEGRPMVNLIRNRTKVRV

SEQ ID NO: 33073 - protein, 89 aa, Artificial Sequence
  Synthetic polypeptide
TEIVPLDSSLGDRDGRLTFHPGSQVVKLPFINFMKTRGTSFLNAYTNSPICCPSRAVIVWKRGQEMLLSYSDKKAGPWLILSVTGLKSE

SEQ ID NO: 33074 - protein, 231 aa, Artificial Sequence
  Synthetic polypeptide
VLRRSGWLKVCSTSPFPPFLLLQPQMGGVVPASFSPSAMIRNFLRPPQKQNPVQPAELSIHIVALGNEGDTFHQDNRPSGLIRTYLGRSPLVSGDESSLLLNAASTVARPVFTEYQASAFGNVKLVVHDCPVWDIFDSDWYTSRNLIGGADIIVIKYNVNDKFSFHEVKDNYIPVIKRALNSVPVIIAAVGTRQNEELPCTCPLCTSDRGSCVSTTEGIQLAKELGATYLE

SEQ ID NO: 33075 - protein, 56 aa, Artificial Sequence
  Synthetic polypeptide
GLPRSRILYSLQNCPSTSWRWGTRGTHSTRTTGRRGLSALTWGEALWSPGTRAACC

SEQ ID NO: 33076 - protein, 95 aa, Artificial Sequence
  Synthetic polypeptide
KFPEASPEAESCTACRIVHPHRGAGERGGHIPPGQPAVGAYPHLPGEKPSGLRGREQLVAERGQHGRASGVHRVSGQCVWECQAGGPRLSRLGHI

SEQ ID NO: 33077 - protein, 161 aa, Artificial Sequence
  Synthetic polypeptide
VLRRSGWLKVCSTSPFPPFLLLQPQMGGVVPASFSPSAMIRNFLRPPQKQNPVQPAELSIHIVALGNEGDTFHQDNRPSGLIRTYLGRSPLVSGDESSLLLNAASTVARPVFTEYQASAFGNVKLVVHDCPVWVRKSSCSALRLKKLFFPFFSPSPFCPLP

SEQ ID NO: 33078 - protein, 121 aa, Artificial Sequence
  Synthetic polypeptide
KFPEASPEAESCTACRIVHPHRGAGERGGHIPPGQPAVGAYPHLPGEKPSGLRGREQLVAERGQHGRASGVHRVSGQCVWECQAGGPRLSRLGKEEQLLRAEAEEAFLSFFFPLPLLPTSV

SEQ ID NO: 33079 - protein, 668 aa, Artificial Sequence
  Synthetic polypeptide
VLRRSGWLKVCSTSPFPPFLLLQPQMGGVVPASFSPSAMIRNFLRPPQKQNPVQPAELSIHIVALGNEGDTFHQDNRPSGLIRTYLGRSPLVSGDESSLLLNAASTVARPVFTEYQASAFGNVKLVVHDCPVWDIFDSDWYTSRNLIGGADIIVIKYNVNDKFSFHEVKDNYIPVIKRALNSVPVIIAAVGTRQNEELPCTCPLCTSDRGSCVSTTEGIQLAKELGATYLELHSLDDFYIGKYFGGVLEYFMIQALNQKTSEKMKKRKMSNSFHGIRPPQLEQPEKMPVLKAEASHYNSDLNNLLFCCQCVDVVFYNPNLKKVVEAHKIVLCAVSHVFMLLFNVKSPTDIQDSSIIRTTQDLFAINRDTAFPGASHESSGNPPLRVIVKDALFCSCLSDILRFIYSGAFQWEELEEDIRKKLKDSGDVSNVIEKVKCILKTPGKINCLRNCKTYQARKPLWFYNTSLKFFLNKPMLADVVFEIQGTTVPAHRAILVARCEVMAAMFNGNYMEAKSVLIPVYGVSKETFLSFLEYLYTDSCCPAGIFQAMCLLICAEMYQVSRLQHICELFIITQLQSMPSRELASMNLDIVDLLKKAKFHHSDCLSTWLLHFIATNYLIFSQKPEFQDLSVEERSFVEKHRWPSNMYLKQLAEYRKYIHSRKCRCLVM

SEQ ID NO: 33080 - protein, 56 aa, Artificial Sequence; identical to SEQ ID NO: 33075
  Synthetic polypeptide

SEQ ID NO: 33081 - protein, 124 aa, Artificial Sequence
  Synthetic polypeptide
HLPLPSLPPAPATNGWRRASFLFTFCHDWKFPEASPEAESCTACRIVHPHRGAGERGGHIPPGQPAVGAYPHLPGEKPSGLRGREQLVAERGQHGRASGVHRVSGQCVWECQAGGPRLSRLGHI

SEQ ID NO: 33082 - protein, 231 aa, Artificial Sequence
  Synthetic polypeptide
VLRRSGWLKVCSTSPFPPFLLLQPQMGGDVPPSFSPSAMIGNFLRPPQKQNPVQPAELSIHIVALGNEGDTFHQDNRPSGLIRTYLGRSPLVSGDESSLLLNAASTVARPVFTEYQASAFGNVKLVVHDCPVWDIFDSDWYTSRNLIGGADIIVIKYNVNDKFSFHEVKDNYIPVIKRALNSVPVIIAAVGTRQNEELPCTCPLCTSDRGSCVSTTEGIQLAKELGATYLE

SEQ ID NO: 33083 - protein, 150 aa, Artificial Sequence
  Synthetic polypeptide
HLPLPSLPPAPATNGWRRASFLFTFCHDWKFPEASPEAESCTACRIVHPHRGAGERGGHIPPGQPAVGAYPHLPGEKPSGLRGREQLVAERGQHGRASGVHRVSGQCVWECQAGGPRLSRLGKEEQLLRAEAEEAFLSFFFPLPLLPTSV

SEQ ID NO: 33084 - protein, 161 aa, Artificial Sequence
  Synthetic polypeptide
VLRRSGWLKVCSTSPFPPFLLLQPQMGGDVPPSFSPSAMIGNFLRPPQKQNPVQPAELSIHIVALGNEGDTFHQDNRPSGLIRTYLGRSPLVSGDESSLLLNAASTVARPVFTEYQASAFGNVKLVVHDCPVWVRKSSCSALRLKKLFFPFFSPSPFCPLP

SEQ ID NO: 33085 - protein, 668 aa, Artificial Sequence
  Synthetic polypeptide
VLRRSGWLKVCSTSPFPPFLLLQPQMGGDVPPSFSPSAMIGNFLRPPQKQNPVQPAELSIHIVALGNEGDTFHQDNRPSGLIRTYLGRSPLVSGDESSLLLNAASTVARPVFTEYQASAFGNVKLVVHDCPVWDIFDSDWYTSRNLIGGADIIVIKYNVNDKFSFHEVKDNYIPVIKRALNSVPVIIAAVGTRQNEELPCTCPLCTSDRGSCVSTTEGIQLAKELGATYLELHSLDDFYIGKYFGGVLEYFMIQALNQKTSEKMKKRKMSNSFHGIRPPQLEQPEKMPVLKAEASHYNSDLNNLLFCCQCVDVVFYNPNLKKVVEAHKIVLCAVSHVFMLLFNVKSPTDIQDSSIIRTTQDLFAINRDTAFPGASHESSGNPPLRVIVKDALFCSCLSDILRFIYSGAFQWEELEEDIRKKLKDSGDVSNVIEKVKCILKTPGKINCLRNCKTYQARKPLWFYNTSLKFFLNKPMLADVVFEIQGTTVPAHRAILVARCEVMAAMFNGNYMEAKSVLIPVYGVSKETFLSFLEYLYTDSCCPAGIFQAMCLLICAEMYQVSRLQHICELFIITQLQSMPSRELASMNLDIVDLLKKAKFHHSDCLSTWLLHFIATNYLIFSQKPEFQDLSVEERSFVEKHRWPSNMYLKQLAEYRKYIHSRKCRCLVM

SEQ ID NO: 33086 - protein, 81 aa, Artificial Sequence
  Synthetic polypeptide
KEKVHPHRGAGERGGHIPPGQPAVGAYPHLPGEKPSGLRGREQLVAERGQHGRASGVHRVSGQCVWECQAGGPRLSRLGHI

SEQ ID NO: 33087 - protein, 176 aa, Artificial Sequence
  Synthetic polypeptide
KKRSIHIVALGNEGDTFHQDNRPSGLIRTYLGRSPLVSGDESSLLLNAASTVARPVFTEYQASAFGNVKLVVHDCPVWDIFDSDWYTSRNLIGGADIIVIKYNVNDKFSFHEVKDNYIPVIKRALNSVPVIIAAVGTRQNEELPCTCPLCTSDRGSCVSTTEGIQLAKELGATYLE

SEQ ID NO: 33088 - protein, 45 aa, Artificial Sequence
  Synthetic polypeptide
RKGPSTSWRWGTRGTHSTRTTGRRGLSALTWGEALWSPGTRAACC

SEQ ID NO: 33089 - protein, 107 aa, Artificial Sequence
  Synthetic polypeptide
KEKVHPHRGAGERGGHIPPGQPAVGAYPHLPGEKPSGLRGREQLVAERGQHGRASGVHRVSGQCVWECQAGGPRLSRLGKEEQLLRAEAEEAFLSFFFPLPLLPTSV

SEQ ID NO: 33090 - protein, 106 aa, Artificial Sequence
  Synthetic polypeptide
KKRSIHIVALGNEGDTFHQDNRPSGLIRTYLGRSPLVSGDESSLLLNAASTVARPVFTEYQASAFGNVKLVVHDCPVWVRKSSCSALRLKKLFFPFFSPSPFCPLP

SEQ ID NO: 33091 - protein, 613 aa, Artificial Sequence
  Synthetic polypeptide
KKRSIHIVALGNEGDTFHQDNRPSGLIRTYLGRSPLVSGDESSLLLNAASTVARPVFTEYQASAFGNVKLVVHDCPVWDIFDSDWYTSRNLIGGADIIVIKYNVNDKFSFHEVKDNYIPVIKRALNSVPVIIAAVGTRQNEELPCTCPLCTSDRGSCVSTTEGIQLAKELGATYLELHSLDDFYIGKYFGGVLEYFMIQALNQKTSEKMKKRKMSNSFHGIRPPQLEQPEKMPVLKAEASHYNSDLNNLLFCCQCVDVVFYNPNLKKVVEAHKIVLCAVSHVFMLLFNVKSPTDIQDSSIIRTTQDLFAINRDTAFPGASHESSGNPPLRVIVKDALFCSCLSDILRFIYSGAFQWEELEEDIRKKLKDSGDVSNVIEKVKCILKTPGKINCLRNCKTYQARKPLWFYNTSLKFFLNKPMLADVVFEIQGTTVPAHRAILVARCEVMAAMFNGNYMEAKSVLIPVYGVSKETFLSFLEYLYTDSCCPAGIFQAMCLLICAEMYQVSRLQHICELFIITQLQSMPSRELASMNLDIVDLLKKAKFHHSDCLSTWLLHFIATNYLIFSQKPEFQDLSVEERSFVEKHRWPSNMYLKQLAEYRKYIHSRKCRCLVM

SEQ ID NO: 33092 - protein, 32 aa, Artificial Sequence
  Synthetic polypeptide
KEKKSYLVHAHYVPQTEGAVLVQLKGSNLQKN

SEQ ID NO: 33093 - protein, 20 aa, Artificial Sequence
  Synthetic polypeptide
KKRRVTLYMPTMYLRQRELC

SEQ ID NO: 33094 - protein, 38 aa, Artificial Sequence
  Synthetic polypeptide
RKEELPCTCPLCTSDRGSCVSTTEGIQLAKELGATYLE

SEQ ID NO: 33095 - protein, 475 aa, Artificial Sequence
  Synthetic polypeptide
RKEELPCTCPLCTSDRGSCVSTTEGIQLAKELGATYLELHSLDDFYIGKYFGGVLEYFMIQALNQKTSEKMKKRKMSNSFHGIRPPQLEQPEKMPVLKAEASHYNSDLNNLLFCCQCVDVVFYNPNLKKVVEAHKIVLCAVSHVFMLLFNVKSPTDIQDSSIIRTTQDLFAINRDTAFPGASHESSGNPPLRVIVKDALFCSCLSDILRFIYSGAFQWEELEEDIRKKLKDSGDVSNVIEKVKCILKTPGKINCLRNCKTYQARKPLWFYNTSLKFFLNKPMLADVVFEIQGTTVPAHRAILVARCEVMAAMFNGNYMEAKSVLIPVYGVSKETFLSFLEYLYTDSCCPAGIFQAMCLLICAEMYQVSRLQHICELFIITQLQSMPSRELASMNLDIVDLLKKAKFHHSDCLSTWLLHFIATNYLIFSQKPEFQDLSVEERSFVEKHRWPSNMYLKQLAEYRKYIHSRKCRCLVM

SEQ ID NO: 33096 - protein, 32 aa, Artificial Sequence
  Synthetic polypeptide
RKEELPCTCPLCTSDRGSCVSTTEGIQLAKEL

SEQ ID NO: 33097 - protein, 59 aa, Artificial Sequence
  Synthetic polypeptide
RKEELPCTCPLCTSDRGSCVSTTEGIQLAKELGATYLELHSLDDFYIGKYFGGVKKCLS

SEQ ID NO: 33098 - protein, 213 aa, Artificial Sequence
  Synthetic polypeptide
PLFYSFTFLINWLSLYGLALNSSLEVQELSFGVRIGTPFWSIHIVALGNEGDTFHQDNRPSGLIRTYLGRSPLVSGDESSLLLNAASTVARPVFTEYQASAFGNVKLVVHDCPVWDIFDSDWYTSRNLIGGADIIVIKYNVNDKFSFHEVKDNYIPVIKRALNSVPVIIAAVGTRQNEELPCTCPLCTSDRGSCVSTTEGIQLAKELGATYLE

SEQ ID NO: 33099 - protein, 62 aa, Artificial Sequence
  Synthetic polypeptide
ILRWRSKNSLLESGLGPLSGPSTSWRWGTRGTHSTRTTGRRGLSALTWGEALWSPGTRAACC

SEQ ID NO: 33100 - protein, 125 aa, Artificial Sequence
  Synthetic polypeptide
HCSAYGVAIILFLYFLNKLAFTLWTCPEFFAGGPRTLFWSQDWDPFLVHPHRGAGERGGHIPPGQPAVGAYPHLPGEKPSGLRGREQLVAERGQHGRASGVHRVSGQCVWECQAGGPRLSRLGHI

SEQ ID NO: 33101 - protein, 143 aa, Artificial Sequence
  Synthetic polypeptide
PLFYSFTFLINWLSLYGLALNSSLEVQELSFGVRIGTPFWSIHIVALGNEGDTFHQDNRPSGLIRTYLGRSPLVSGDESSLLLNAASTVARPVFTEYQASAFGNVKLVVHDCPVWVRKSSCSALRLKKLFFPFFSPSPFCPLP

SEQ ID NO: 33102 - protein, 151 aa, Artificial Sequence
  Synthetic polypeptide
HCSAYGVAIILFLYFLNKLAFTLWTCPEFFAGGPRTLFWSQDWDPFLVHPHRGAGERGGHIPPGQPAVGAYPHLPGEKPSGLRGREQLVAERGQHGRASGVHRVSGQCVWECQAGGPRLSRLGKEEQLLRAEAEEAFLSFFFPLPLLPTSV

SEQ ID NO: 33103 - protein, 650 aa, Artificial Sequence
  Synthetic polypeptide
PLFYSFTFLINWLSLYGLALNSSLEVQELSFGVRIGTPFWSIHIVALGNEGDTFHQDNRPSGLIRTYLGRSPLVSGDESSLLLNAASTVARPVFTEYQASAFGNVKLVVHDCPVWDIFDSDWYTSRNLIGGADIIVIKYNVNDKFSFHEVKDNYIPVIKRALNSVPVIIAAVGTRQNEELPCTCPLCTSDRGSCVSTTEGIQLAKELGATYLELHSLDDFYIGKYFGGVLEYFMIQALNQKTSEKMKKRKMSNSFHGIRPPQLEQPEKMPVLKAEASHYNSDLNNLLFCCQCVDVVFYNPNLKKVVEAHKIVLCAVSHVFMLLFNVKSPTDIQDSSIIRTTQDLFAINRDTAFPGASHESSGNPPLRVIVKDALFCSCLSDILRFIYSGAFQWEELEEDIRKKLKDSGDVSNVIEKVKCILKTPGKINCLRNCKTYQARKPLWFYNTSLKFFLNKPMLADVVFEIQGTTVPAHRAILVARCEVMAAMFNGNYMEAKSVLIPVYGVSKETFLSFLEYLYTDSCCPAGIFQAMCLLICAEMYQVSRLQHICELFIITQLQSMPSRELASMNLDIVDLLKKAKFHHSDCLSTWLLHFIATNYLIFSQKPEFQDLSVEERSFVEKHRWPSNMYLKQLAEYRKYIHSRKCRCLVM

SEQ ID NO: 33104 - protein, 40 aa, Artificial Sequence
  Synthetic polypeptide
GQEIETILANTKSYLVHAHYVPQTEGAVLVQLKGSNLQKN

SEQ ID NO: 33105 - protein, 41 aa, Artificial Sequence
  Synthetic polypeptide
SQHFGRPTRVDHEVRRSRPSWLTRRVTLYMPTMYLRQRELC

SEQ ID NO: 33106 - protein, 37 aa, Artificial Sequence
  Synthetic polypeptide
HEELPCTCPLCTSDRGSCVSTTEGIQLAKELGATYLE

SEQ ID NO: 33107 - protein, 474 aa, Artificial Sequence
  Synthetic polypeptide
HEELPCTCPLCTSDRGSCVSTTEGIQLAKELGATYLELHSLDDFYIGKYFGGVLEYFMIQALNQKTSEKMKKRKMSNSFHGIRPPQLEQPEKMPVLKAEASHYNSDLNNLLFCCQCVDVVFYNPNLKKVVEAHKIVLCAVSHVFMLLFNVKSPTDIQDSSIIRTTQDLFAINRDTAFPGASHESSGNPPLRVIVKDALFCSCLSDILRFIYSGAFQWEELEEDIRKKLKDSGDVSNVIEKVKCILKTPGKINCLRNCKTYQARKPLWFYNTSLKFFLNKPMLADVVFEIQGTTVPAHRAILVARCEVMAAMFNGNYMEAKSVLIPVYGVSKETFLSFLEYLYTDSCCPAGIFQAMCLLICAEMYQVSRLQHICELFIITQLQSMPSRELASMNLDIVDLLKKAKFHHSDCLSTWLLHFIATNYLIFSQKPEFQDLSVEERSFVEKHRWPSNMYLKQLAEYRKYIHSRKCRCLVM

SEQ ID NO: 33108 - protein, 31 aa, Artificial Sequence
  Synthetic polypeptide
HEELPCTCPLCTSDRGSCVSTTEGIQLAKEL

SEQ ID NO: 33109 - protein, 58 aa, Artificial Sequence
  Synthetic polypeptide
HEELPCTCPLCTSDRGSCVSTTEGIQLAKELGATYLELHSLDDFYIGKYFGGVKKCLS

SEQ ID NO: 33110 - protein, 41 aa, Artificial Sequence
  Synthetic polypeptide
NPISRKNTKICQKSYLVHAHYVPQTEGAVLVQLKGSNLQKN

SEQ ID NO: 33111 - protein, 49 aa, Artificial Sequence
  Synthetic polypeptide
LRWEDHLRSGVQDQPGQHGETPSLGKIQKFARRVTLYMPTMYLRQRELC

SEQ ID NO: 33112 - protein, 43 aa, Artificial Sequence
  Synthetic polypeptide
EKYKNLPEELPCTCPLCTSDRGSCVSTTEGIQLAKELGATYLE

SEQ ID NO: 33113 - protein, 480 aa, Artificial Sequence
  Synthetic polypeptide
EKYKNLPEELPCTCPLCTSDRGSCVSTTEGIQLAKELGATYLELHSLDDFYIGKYFGGVLEYFMIQALNQKTSEKMKKRKMSNSFHGIRPPQLEQPEKMPVLKAEASHYNSDLNNLLFCCQCVDVVFYNPNLKKVVEAHKIVLCAVSHVFMLLFNVKSPTDIQDSSIIRTTQDLFAINRDTAFPGASHESSGNPPLRVIVKDALFCSCLSDILRFIYSGAFQWEELEEDIRKKLKDSGDVSNVIEKVKCILKTPGKINCLRNCKTYQARKPLWFYNTSLKFFLNKPMLADVVFEIQGTTVPAHRAILVARCEVMAAMFNGNYMEAKSVLIPVYGVSKETFLSFLEYLYTDSCCPAGIFQAMCLLICAEMYQVSRLQHICELFIITQLQSMPSRELASMNLDIVDLLKKAKFHHSDCLSTWLLHFIATNYLIFSQKPEFQDLSVEERSFVEKHRWPSNMYLKQLAEYRKYIHSRKCRCLVM

SEQ ID NO: 33114 - protein, 37 aa, Artificial Sequence
  Synthetic polypeptide
EKYKNLPEELPCTCPLCTSDRGSCVSTTEGIQLAKEL

SEQ ID NO: 33115 - protein, 64 aa, Artificial Sequence
  Synthetic polypeptide
EKYKNLPEELPCTCPLCTSDRGSCVSTTEGIQLAKELGATYLELHSLDDFYIGKYFGGVKKCLS

SEQ ID NO: 33116 - protein, 26 aa, Artificial Sequence
  Synthetic polypeptide
CTPVVPATRRVTLYMPTMYLRQRELC

SEQ ID NO: 33117 - protein, 40 aa, Artificial Sequence
  Synthetic polypeptide
FQPLEELPCTCPLCTSDRGSCVSTTEGIQLAKELGATYLE

SEQ ID NO: 33118 - protein, 477 aa, Artificial Sequence
  Synthetic polypeptide
FQPLEELPCTCPLCTSDRGSCVSTTEGIQLAKELGATYLELHSLDDFYIGKYFGGVLEYFMIQALNQKTSEKMKKRKMSNSFHGIRPPQLEQPEKMPVLKAEASHYNSDLNNLLFCCQCVDVVFYNPNLKKVVEAHKIVLCAVSHVFMLLFNVKSPTDIQDSSIIRTTQDLFAINRDTAFPGASHESSGNPPLRVIVKDALFCSCLSDILRFIYSGAFQWEELEEDIRKKLKDSGDVSNVIEKVKCILKTPGKINCLRNCKTYQARKPLWFYNTSLKFFLNKPMLADVVFEIQGTTVPAHRAILVARCEVMAAMFNGNYMEAKSVLIPVYGVSKETFLSFLEYLYTDSCCPAGIFQAMCLLICAEMYQVSRLQHICELFIITQLQSMPSRELASMNLDIVDLLKKAKFHHSDCLSTWLLHFIATNYLIFSQKPEFQDLSVEERSFVEKHRWPSNMYLKQLAEYRKYIHSRKCRCLVM

SEQ ID NO: 33119 - protein, 34 aa, Artificial Sequence
  Synthetic polypeptide
FQPLEELPCTCPLCTSDRGSCVSTTEGIQLAKEL

SEQ ID NO: 33120 - protein, 61 aa, Artificial Sequence
  Synthetic polypeptide
FQPLEELPCTCPLCTSDRGSCVSTTEGIQLAKELGATYLELHSLDDFYIGKYFGGVKKCLS

SEQ ID NO: 33121 - protein, 33 aa, Artificial Sequence
  Synthetic polypeptide
VMQDECFSVGRIGRRYQEEVERFWGCFKCNRES

SEQ ID NO: 33122 - protein, 266 aa, Artificial Sequence
  Synthetic polypeptide
LCKMSAFQWEELEEDIRKKLKDSGDVSNVIEKVKCILKTPGKINCLRNCKTYQARKPLWFYNTSLKFFLNKPMLADVVFEIQGTTVPAHRAILVARCEVMAAMFNGNYMEAKSVLIPVYGVSKETFLSFLEYLYTDSCCPAGIFQAMCLLICAEMYQVSRLQHICELFIITQLQSMPSRELASMNLDIVDLLKKAKFHHSDCLSTWLLHFIATNYLIFSQKPEFQDLSVEERSFVEKHRWPSNMYLKQLAEYRKYIHSRKCRCLVM

SEQ ID NO: 33123 - protein, 28 aa, Artificial Sequence
  Synthetic polypeptide
HFGSPRQADHEVRRSRPSWPTSGRTQFC

SEQ ID NO: 33124 - protein, 70 aa, Artificial Sequence
  Synthetic polypeptide
PGVVAHACNPSTLGVQGRQITRSGDRDHPGQQVEERSFVEKHRWPSNMYLKQLAEYRKYIHSRKCRCLVM

SEQ ID NO: 33125 - protein, 49 aa, Artificial Sequence
  Synthetic polypeptide
QAWWLMPVILALWESKAGRSRGQEIETILANKWKNAVLLKSTDGRRICT

SEQ ID NO: 33126 - protein, 73 aa, Artificial Sequence
  Synthetic polypeptide
PGVVAHACNPSTLGVQGRQITRSGDRDHPGQQVEERSFVEKHRWPSNMYLKQLAEYRKYIHSRKCRCLVIKRH

SEQ ID NO: 33127 - protein, 50 aa, Artificial Sequence
  Synthetic polypeptide
PGVVAHACNPSTLGVQGRQITRSGDRDHPGQQVEERSFVEKHRWPSNMYL

SEQ ID NO: 33128 - protein, 15 aa, Artificial Sequence
  Synthetic polypeptide
SRRFQCRETDPRQSS

SEQ ID NO: 33129 - protein, 294 aa, Artificial Sequence
  Synthetic polypeptide
QEDFSAGRLTLDKALDMTYYLQHETSSPALLEGLSYLESFYHMMDRRNISDISENLKRYLLQYFKPVIDRQSWSDKGSVWDRMLRSALLKLACDLNHAPCIQKAAELFSQWMESSGKLNIPTDVLKIVYSVGAQTTAGWNYLLEQYELSMSSAEQNKILYALSTSKHQEKLLKLIELGMEGKVIKTQNLAALLHAIARRPKGQQLAWDFVRENWTHLLKKFDLGSYDIRMIISGTTAHFSSKDKLQEVKLFFESLEAQGSHLDIFQTVLETITKNIKWLEKNLPTLRTWLMVNT

SEQ ID NO: 33130 - protein, 8 aa, Artificial Sequence
  Synthetic polypeptide
KKISVQGD

SEQ ID NO: 33131 - protein, 28 aa, Artificial Sequence
  Synthetic polypeptide
QEDFSAGRLTLDKALDMTYYLQHETSSP

SEQ ID NO: 33132 - protein, 75 aa, Artificial Sequence
  Synthetic polypeptide
MRPKENSNGEFLRRVSPALKKETRKSKFLLPPLLQPTFDHMVVWALGNCSYRGLKSGEREVGLLMRLIGFSSPGI

SEQ ID NO: 33133 - protein, 1034 aa, Artificial Sequence
  Synthetic polypeptide
RTEEWRERSWALDEADRLQLPRNMIENSMFEEEPDVVDLAKEPCLHPLEPDEVEYEPRGSRLLVRGLGEHEMEEDEEDYESSAKLLGMSFMNRSSGLRNSATGYRQSPDGACSVPSARTMVVCAFVIVVAVSVIMVIYLLPRCTFTKEGCHKKNQSIGLIQPFATNGKLFPWAQIRLPTAVVPLRYELSLHPNLTSMTFRGSVTISVQALQVTWNIILHSTGHNISRVTFMSAVSSQEKQAEILEYAYHGQIAIVAPEALLAGHNYTLKIEYSANISSSYYGFYGFSYTDESNEKKYFAATQFEPLAARSAFPCFDEPAFKATFIIKIIRDEQYTALSNMPKKSSVVLDDGLVQDEFSESVKMSTYLVAFIVGEMKNLSQDVNGTLVSIYAVPEKIGQVHYALETTVKLLEFFQNYFEIQYPLKKLDLVAIPDFEAGAMENWGLLTFREETLLYDSNTSSMADRKLVTKIIAHELAHQWFGNLVTMKWWNDLWLNEGFATFMEYFSLEKIFKELSSYEDFLDARFKTMKKDSLNSSHPISSSVQSSEQIEEMFDSLSYFKGSSLLLMLKTYLSEDVFQHAVVLYLHNHSYASIQSDDLWDSFNEVTNQTLDVKRMMKTWTLQKGFPLVTVQKKGKELFIQQERFFLNMKPEIQPSDTSYLWHIPLSYVTEGRNYSKYQSVSLLDKKSGVINLTEEVLWVKVNINMNGYYIVHYADDDWEALIHQLKINPYVLSDKDRANLINNIFELAGLGKVPLKRAFDLINYLGNENHTAPITEALFQTDLIYNLLEKLGYMDLASRLVTRVFKLLQNQIQQQTWTDEGTPSMRELRSALLEFACTHNLGNCSTTAMKLFDDWMASNGTQSLPTDVMTTVFKVGAKTDKGWSFLLGKYISIGSEAEKNKILEALASSEDVRKLYWLMKSSLNGDNFRTQKLSFIIRTVGRHFPGHLLAWDFVKENWNKLVQKFPLGSYTIQNIVAGSTYLFSTKTHLSEVQAFFENQSEATFRLRCVQEALEVIQLNIQWMEKNLKSLTWWL

SEQ ID NO: 33134 - protein, 48 aa, Artificial Sequence
  Synthetic polypeptide
DVTCSSLPSTVIVRPLQPRETLLPRPGSQSVPAQIPENLQEQEEVTQC

SEQ ID NO: 33135 - protein, 102 aa, Artificial Sequence
  Synthetic polypeptide
DLSSHVKRFCHVPGPRVCLLRSQKTCRNRKRSHSVKGKGEQERRVSYRGQDPEVISAHVTQLGHIHFPHGGPSPNPDASPTTAAKRLAASMTRSASESKVVT

SEQ ID NO: 33136 - protein, 52 aa, Artificial Sequence
  Synthetic polypeptide
NASATSRVPECACSDPRKLAGTGRGHTVLRGRENRNGGFLTAVKTLKSSRLM

SEQ ID NO: 33137 - protein, 111 aa, Artificial Sequence
  Synthetic polypeptide
FLHFHLSCNPSVPKQRVMKLTKMVLVLVVVFILSAAPYHVIQLVNLQMEQPTLAFYVGYYLSICLSYASSSINPFLYILLSGNFQKRLPQIQRRATEKEINNMGNTLKSHF

SEQ ID NO: 33138 - protein, 97 aa, Artificial Sequence
  Synthetic polypeptide
GRSQDGRIGTAPVYSSQRERRRRRVISAFPSELQSQCTKTESDEVDKDGAGAGGSLYPECCPLSCDTTGELTDGTAHTGLLCGLLPLHLSQLCQQQH

SEQ ID NO: 33139 - protein, 826 aa, Artificial Sequence
  Synthetic polypeptide
IYYKVIHCSIILNSKRLQRNEFPVEHQVIELTGDVTPDMKSIAKADLIVTTPEKWDGVSRSWQNRNYVQQVTILIIDEIHLLGEERGPVLEVIVSRTNFISSHTEKPVRIVGLSTALANARDLADWLNIKQMGLFNFRPSVRPVPLEVHIQGFPGQHYCPRMASMNKPAFQAIRSHSPAKPVLIFVSSRRQTRLTALELIAFLATEEDPKQWLNMDEREMENIIATVRDSNLKLTLAFGIGMHHAGLHERDRKTVEELFVNCKVQVLIATSTLAWGVNFPAHLVIIKGTEYYDGKTRRYVDFPITDVLQMMGRAGRPQFDDQGKAVILVHDIKKDFYKKFLYEPFPVESSLLGVLSDHLNAEIAGGTITSKQDALDYITWTYFFRRLIMNPSYYNLGDVSHDSVNKFLSHLIEKSLIELELSYCIEIGEDNRSIEPLTYGRIASYYYLKHQTVKMFKDRLKPECSTEELLSILSDAEEYTDLPVRHNEDHMNSELAKCLPIESNPHSFDSPHTKAHLLLQAHLSRAMLPCPDYDTDTKTVLDQALRVCQAMLDVAANQGWLVTVLNITNLIQMVIQGRWLKDSSLLTLPNIENHHLHLFKKWKPIMKGPHARGRTSIESLPELIHACGGKDHVFSSMVESELHAAKTKQAWNFLSHLPVINVGISVKGSWDDLVEGHNELSVSTLTADKRDDNKWIKLHADQEYVLQVSLQRVHFGFHKGKPESCAVTPRFPKSKDEGWFLILGEVDKRELIALKRVGYIRNHHVASLSFYTPEIPGRYIYTLYFMSDCYLGLDQQYDIYLNVTQASLSAQVNTKVSDSLTDLALK

SEQ ID NO: 33140 - protein, 6 aa, Artificial Sequence
  Synthetic polypeptide
SIKLLN

SEQ ID NO: 33141 - protein, 15 aa, Artificial Sequence
  Synthetic polypeptide
QKITEKRISSRASSY

SEQ ID NO: 33142 - protein, 31 aa, Artificial Sequence
  Synthetic polypeptide
GPTGEISLRSQCQEKLFLLSSWHIGKASQAE

SEQ ID NO: 33143 - protein, 24 aa, Artificial Sequence
  Synthetic polypeptide
AAGTLGRPHRQNNFQQNQWLENRF

SEQ ID NO: 33144 - protein, 563 aa, Artificial Sequence
  Synthetic polypeptide
LRILSTKSHSVPLMRTNRRNFSQVSVPGKALSPEQLAHWEGLTGRITFNKTNGLRTDFDLDVISLKEEGLEKIGTWDPASGLNMTESQKGKPANITDSLSNRSLIVTTILEEPYVLFKKSDKPLYGNDRFEGYCIDLLRELSTILGFTYEIRLVEDGKYGAQDDANGQWNGMVRELIDHKADLAVAPLAITYVREKVIDFSKPFMTLGISILYRKPNGTNPGVFSFLNPLSPDIWMYILLAYLGVSCVLFVIARFSPYEWYNPHPCNPDSDVVENNFTLLNSFWFGVGALMQQGSELMPKALSTRIVGGIWWFFTLIIISSYTANLAAFLTVERMESPIDSADDLAKQTKIEYGAVEDGATMTFFKKSKISTYDKMWAFMSSRRQSVLVKSNEEGIQRVLTSDYAFLMESTTIEFVTQRNCNLTQIGGLIDSKGYGVGTPMGSPYRDKITIAILQLQEEGKLHMMKEKWWRGNGCPEEESKEASALGVQNIGGIFIVLAAGLVLSVFVAVGEFLYKSKKNAQLEKRAKTKLPQDYVFLPILESVSISTVLSSSPSSSSLSSCS

SEQ ID NO: 33145 - protein, 540 aa, Artificial Sequence
  Synthetic polypeptide
LRILSTKSHSVPLMRTNRRNFSQVSVPGKALSPEQLAHWEGLTGRITFNKTNGLRTDFDLDVISLKEEGLEKIGTWDPASGLNMTESQKGKPANITDSLSNRSLIVTTILEEPYVLFKKSDKPLYGNDRFEGYCIDLLRELSTILGFTYEIRLVEDGKYGAQDDANGQWNGMVRELIDHKADLAVAPLAITYVREKVIDFSKPFMTLGISILYRKPNGTNPGVFSFLNPLSPDIWMYILLAYLGVSCVLFVIARFSPYEWYNPHPCNPDSDVVENNFTLLNSFWFGVGALMQQGSELMPKALSTRIVGGIWWFFTLIIISSYTANLAAFLTVERMESPIDSADDLAKQTKIEYGAVEDGATMTFFKKSKISTYDKMWAFMSSRRQSVLVKSNEEGIQRVLTSDYAFLMESTTIEFVTQRNCNLTQIGGLIDSKGYGVGTPMGSPYRDKITIAILQLQEEGKLHMMKEKWWRGNGCPEEESKEASALGVQNIGGIFIVLAAGLVLSVFVAVGEFLYKSKKNAQLEKESSIWLVPPYHPDTV

SEQ ID NO: 33146 - protein, 579 aa, Artificial Sequence
  Synthetic polypeptide
LRILSTKSHSVPLMRTNRRNFSQVSVPGKALSPEQLAHWEGLTGRITFNKTNGLRTDFDLDVISLKEEGLEKIGTWDPASGLNMTESQKGKPANITDSLSNRSLIVTTILEEPYVLFKKSDKPLYGNDRFEGYCIDLLRELSTILGFTYEIRLVEDGKYGAQDDANGQWNGMVRELIDHKADLAVAPLAITYVREKVIDFSKPFMTLGISILYRKPNGTNPGVFSFLNPLSPDIWMYILLAYLGVSCVLFVIARFSPYEWYNPHPCNPDSDVVENNFTLLNSFWFGVGALMQQGSELMPKALSTRIVGGIWWFFTLIIISSYTANLAAFLTVERMESPIDSADDLAKQTKIEYGAVEDGATMTFFKKSKISTYDKMWAFMSSRRQSVLVKSNEEGIQRVLTSDYAFLMESTTIEFVTQRNCNLTQIGGLIDSKGYGVGTPMGSPYRDKITIAILQLQEEGKLHMMKEKWWRGNGCPEEESKEASALGVQNIGGIFIVLAAGLVLSVFVAVGEFLYKSKKNAQLEKRSFCSAMVEELRMSLKCQRRLKHKPQAPVIVKTEEVINMHTFNDRRLPGKETMA

SEQ ID NO: 33147 - protein, 503 aa, Artificial Sequence
  Synthetic polypeptide
LRILSTKSHSVPLMRTNRRNFSQVSVPGKALSPEQLAHWEGLTGRITFNKTNGLRTDFDLDVISLKEEGLEKIGTWDPASGLNMTESQKGKPANITDSLSNRSLIVTTILEEPYVLFKKSDKPLYGNDRFEGYCIDLLRELSTILGFTYEIRLVEDGKYGAQDDANGQWNGMVRELIDHKADLAVAPLAITYVREKVIDFSKPFMTLGISILYRKPNGSELMPKALSTRIVGGIWWFFTLIIISSYTANLAAFLTVERMESPIDSADDLAKQTKIEYGAVEDGATMTFFKKSKISTYDKMWAFMSSRRQSVLVKSNEEGIQRVLTSDYAFLMESTTIEFVTQRNCNLTQIGGLIDSKGYGVGTPMGSPYRDKITIAILQLQEEGKLHMMKEKWWRGNGCPEEESKEASALGVQNIGGIFIVLAAGLVLSVFVAVGEFLYKSKKNAQLEKRSFCSAMVEELRMSLKCQRRLKHKPQAPVIVKTEEVINMHTFNDRRLPGKETMA

SEQ ID NO: 33148 - protein, 138 aa, Artificial Sequence
  Synthetic polypeptide
LRILSTKSHSVPLMRTNRRNFSQVSVPGKALSPEQLAHWEGLTGRITFNKTNGLRTDFDLDVISLKEEGLEKIGTWDPASGLNMTESQKGKPANITDSLSNRSLIVTTILEEPYVLFKKSDKPLYGNDRFEGYCIDLL

SEQ ID NO: 33149 - protein, 144 aa, Artificial Sequence
  Synthetic polypeptide
GQVRWLMPVISVLWEAELDGSQGSPYRDKITIAILQLQEEGKLHMMKEKWWRGNGCPEEESKEASALGVQNIGGIFIVLAAGLVLSVFVAVGEFLYKSKKNAQLEKRAKTKLPQDYVFLPILESVSISTVLSSSPSSSSLSSCS

SEQ ID NO: 33150 - protein, 22 aa, Artificial Sequence
  Synthetic polypeptide
SQYFGRPSWMDHKVLHIETKLP

SEQ ID NO: 33151 - protein, 109 aa, Artificial Sequence
  Synthetic polypeptide
PGSVAYACNLSTLGGRAGWITRFSISRQNYHSNSSAARGRQTAYDEGEMVEGQWLPRRGEQRGQCPGGSEYWWHLHCSGSRLGAFSFCGSGRIFIQIQKKRSIGKESQD

SEQ ID NO: 33152 - protein, 121 aa, Artificial Sequence
  Synthetic polypeptide
GQVRWLMPVISVLWEAELDGSQGSPYRDKITIAILQLQEEGKLHMMKEKWWRGNGCPEEESKEASALGVQNIGGIFIVLAAGLVLSVFVAVGEFLYKSKKNAQLEKESSIWLVPPYHPDTV

SEQ ID NO: 33153 - protein, 121 aa, Artificial Sequence
  Synthetic polypeptide
PGSVAYACNLSTLGGRAGWITRFSISRQNYHSNSSAARGRQTAYDEGEMVEGQWLPRRGEQRGQCPGGSEYWWHLHCSGSRLGAFSFCGSGRIFIQIQKKRSIGKGIFYLVSATIPSRHCL

SEQ ID NO: 33154 - protein, 160 aa, Artificial Sequence
  Synthetic polypeptide
GQVRWLMPVISVLWEAELDGSQGSPYRDKITIAILQLQEEGKLHMMKEKWWRGNGCPEEESKEASALGVQNIGGIFIVLAAGLVLSVFVAVGEFLYKSKKNAQLEKRSFCSAMVEELRMSLKCQRRLKHKPQAPVIVKTEEVINMHTFNDRRLPGKETMA

SEQ ID NO: 33155 - protein, 109 aa, Artificial Sequence
  Synthetic polypeptide
PGSVAYACNLSTLGGRAGWITRFSISRQNYHSNSSAARGRQTAYDEGEMVEGQWLPRRGEQRGQCPGGSEYWWHLHCSGSRLGAFSFCGSGRIFIQIQKKRSIGKEVLL

SEQ ID NO: 33156 - protein, 30 aa, Artificial Sequence
  Synthetic polypeptide
TPICLLTLCLKIHFVSRPPVKLKISCFCQE

SEQ ID NO: 33157 - protein, 17 aa, Artificial Sequence
  Synthetic polypeptide
NSRSVAFAKSKLFDVGN

SEQ ID NO: 33158 - protein, 253 aa, Artificial Sequence
  Synthetic polypeptide
DTLRVKASRETQDQLLLPRVSYLTLVTDKVKKHFQKVMRQEDISEIWFEYEGTPLKWHYPIGLLFDLLASSSALPWNITVHFKSFPEKDLLHCPSKDAIEAHFMSCMKEADALKHKSQVINEMQKKDHKQLWMGLQNDRFDQFWAINRKLMEYPAEENGFRYIPFRIYQTTTERPFIQKLFRPVAADGQLHTLGDLLKEVCPSAIDPEDGEKKNQVMIHGIEPMLETPLQWLSEHLSYPDNFLHISIIPQPTD

SEQ ID NO: 33159 - protein, 2 aa, Artificial Sequence
  Synthetic polypeptide
PG

SEQ ID NO: 33160 - protein, 19 aa, Artificial Sequence
  Synthetic polypeptide
NPVSTKNTKISQGKGHVQF

SEQ ID NO: 33161 - protein, 165 aa, Artificial Sequence
  Synthetic polypeptide
DQPDQHGETPSLLKIQKLARVKDMFSFEIPEHHVIVSASSDGFIKMWKLKQDKKVPPSLLCEINTNARLTCLGVWLDKVADMKESLPPAAEPSPVSKEQSKIGKKEPGDTVHKEEKRSKPNTKKRGLTGDSKKATKESGLISTKKRKMVEMLEKKRKKKKIKTMQ

SEQ ID NO: 33162 - protein, 47 aa, Artificial Sequence
  Synthetic polypeptide
VHVLCRDMDETGNRHSQQTVTRMKNQTLHVLTVARKNQSWQRCDFSY

SEQ ID NO: 33163 - protein, 61 aa, Artificial Sequence
  Synthetic polypeptide
KTKHCMFSLLRERIKAGKGVTSAIDLCRYHGNKALEALESFPPSEARSALENIVFAVTRFS

SEQ ID NO: 33164 - protein, 33 aa, Artificial Sequence
  Synthetic polypeptide
NRKPSFSANCHKDEKPNTACSHCCEKESKLAKV

SEQ ID NO: 33165 - protein, 26 aa, Artificial Sequence
  Synthetic polypeptide
KREILEQCWAHIARKNQSWQRCDFSY

SEQ ID NO: 33166 - protein, 58 aa, Artificial Sequence
  Synthetic polypeptide
NSAGHTLRERIKAGKGVTSAIDLCRYHGNKALEALESFPPSEARSALENIVFAVTRFS

SEQ ID NO: 33167 - protein, 21 aa, Artificial Sequence
  Synthetic polypeptide
ERDLRTVLGTHCEKESKLAKV

SEQ ID NO: 33168 - protein, 180 aa, Artificial Sequence
  Synthetic polypeptide
AIPGFLTLRNCEIINESYITDDIGISTWKEQTFLSHGALLAKSCQAAMELAKHDAEVQNMAFQYGKHMAMSHKINSDVQPFIKEKTSDSMTFNLNSAPVVLHQEFLGRDLWIKQIGEAQEKGRLDYAKLRERIKAGKGVTSAIDLCRYHGNKALEALESFPPSEARSALENIVFAVTRFS

SEQ ID NO: 33169 - protein, 623 aa, Artificial Sequence
  Synthetic polypeptide
SQHFGRPRQVDHLSLTDEESRKNWEEFGNPDGPQATSFGIALPAWIVDQKNSILVLLVYGLAFMVILPVVVGSWWYRSIRYSGDQILIRTTQIYTYFVYKTRNMDMKRLIMVLAGASEFDPQYNKDATSRPTDNILIPQLIREIGSINLKKNEPPLTCPYSLKARVLLLSHLARMKIPETLEEDQQFMLKKCPALLQEMVNVICQLIVMARNREEREFRAPTLASLENCMKLSQMAVQGLQQFKSPLLQLPHIEEDNLRRVSNHKKYKIKTIQDLVSLKESDRHTLLHFLEDEKYEEVMAVLGSFPYVTMDIKSQVLDDEDSNNITVGSLVTVLVKLTRQTMAEVFEKEQSICAAEEQPAEDGQGETNKNRTKGGWQQKSKGPKKTAKSKKKKPLKKKPTPVLLPQSKQQKQKQANGVVGNEAAVKEDEEEVSDKGSDSEEEETNRDSQSEKDDGSDRDSDREQDEKQNKDDEAEWQELQQSIQRKERALLETKSKITHPVYSLYFPEEKQEWWWLYIADRKEQTLISMPYHVCTLKDTEEVELKFPAPGKPGNYQYTVFLRSDSYMGLDQIKPLKLEVHEAKPVPENHPQWDTAIEGDEDQEDSEGFEDSFEEEEEEEEDDD

SEQ ID NO: 33170 - protein, 80 aa, Artificial Sequence
  Synthetic polypeptide
SQHFGRPRQVDHLSLTDEESRKNWEEFGNPDGPQATSFGIALPAWIVDQKNSILVLLVYGLAFMVILPVVVGSWWYRSIR

SEQ ID NO: 33171 - protein, 21 aa, Artificial Sequence
  Synthetic polypeptide
LMPVIPALWEAEAGGSPEFNG

SEQ ID NO: 33172 - protein, 440 aa, Artificial Sequence
  Synthetic polypeptide
GRARWIMSVIPALWEAEAGGSLEVTATLRNLVDSSLVRSKFLNISALPQLCTAMEQYKGDKDVCTNIARIFSKLTSYRDCCTALASYSRCYALFLNLINKYQKKQDLVVRVVFILGNLTAKNNQAREQFSKEKGSIQTLLSLFQTFHQLDLHSQKPVGQRGEQHRAQRPPSEAEDVLIKLTRVLANIAIHPGVGPVLAANPGIVGLLLTTLEYKSLDDCEELVINATATINNLSYYQVKNSIIQDKKLYIAELLLKLLVSNNMDGILEAVRVFGNLSQDHDVCDFIVQNNVHRFMMALLDAQHQDICFSACGVLLNLTVDKDKRVILKEGGGIKKLVDCLRDLGPTDWQLACLVCKTLWNFSENITNASSCFGNEDTNTLLLLLSSFLDEELALDGSFDPDLKNYHKLHWETEFKPVAQQLLNRIQRHHTFLEPLPIPSF

SEQ ID NO: 33173 - protein, 14 aa, Artificial Sequence
  Synthetic polypeptide
SQHFGRPRRADHLR

SEQ ID NO: 33174 - protein, 8 aa, Artificial Sequence
  Synthetic polypeptide
RTFKDNGF

SEQ ID NO: 33175 - protein, 465 aa, Artificial Sequence
  Synthetic polypeptide
ELSKIMDSELMHSIVGSYHKPPERVFVPSFTQNEPSQNCHPANLEVTSPKILHSPNSQALILALKTLQEKIHRLELERTQAEDNLNILSREAAQYKKALENETNERNLAHQELIKQKKDISIQLSSAQSRCTLLEKQLEYTKRMVLNVEREKNMILEQQAQLQREKEQDQMKLYAKLEKLDVLEKECFRLTTTQKTAEDKIKHLEEKLKEEEHQRKLFQDKASELQTGLEISKIIMSSVSNLKHSKEKKKSSKKTKCIKRRPPWQICSKFGALPFVAEKMRQHRDPHILQKPFNVTETRCLPKPSRTTSWCKAIPPDSEKSISICDNLSELLMAMQDELDQMSMEHQELLKQMKETESHSVCDDIECELECLLKKMEIKGEQISKLKKHQDSVCKLQQKVQNSKMSEASGIQQEDSYPKGSKNIKNSPRKCLTDTNLFQKNSSFHPIRVHNLQMKLRRDDIMWEQ

SEQ ID NO: 33176 - protein, 4 aa, Artificial Sequence
  Synthetic polypeptide
NFQR

SEQ ID NO: 33177 - protein, 239 aa, Artificial Sequence
  Synthetic polypeptide
HSHRITNPLANCACERSRLHTPYENLKPNDLSLSLITPRWDCLVAKTSSGIPLILLYALILALKTLQEKIHRLELERTQAEDNLNILSREAAQYKKALENETNERNLAHQELIKQKKEKQLEYTKRMVLNVEREKNMILEQQAQLQREKEQDQMKLYAKLEKLDVLEKECFRLTTTQKTAEDKIKHLEEKLKEEEHQRKLFQDKASELQTGLEISKIIMSSVSNLKHSKEKKKSSKVCI

SEQ ID NO: 33178 - protein, 7 aa, Artificial Sequence
  Synthetic polypeptide
FYFTLLF

SEQ ID NO: 33179 - protein, 41 aa, Artificial Sequence
  Synthetic polypeptide
MGLSSCKNKLRDPTDSTLRSYFSLKNSSGKNSSFRAGENTS

SEQ ID NO: 33180 - protein, 464 aa, Artificial Sequence
  Synthetic polypeptide
HSHRITNPLANCACERSRLHTPYENLKPNDLSLSLITPRWDCLVAKTSSGIPLILLYALILALKTLQEKIHRLELERTQAEDNLNILSREAAQYKKALENETNERNLAHQELIKQKKDISIQLSSAQSRCTLLEKQLEYTKRMVLNVEREKNMILEQQAQLQREKEQDQMKLYAKLEKLDVLEKECFRLTTTQKTAEDKIKHLEEKLKEEEHQRKLFQDKASELQTGLEISKIIMSSVSNLKHSKEKKKSSKKTKCIKRRPPWQICSKFGALPFVAEKMRQHRDPHILQKPFNVTETRCLPKPSRTTSWCKAIPPDSEKSISICDNLSELLMAMQDELDQMSMEHQELLKQMKETESHSVCDDIECELECLLKKMEIKGEQISKLKKHQDSVCKLQQKVQNSKMSEASGIQQEDSYPKGSKNIKNSPRKCLTDTNLFQKNSSFHPIRVHNLQMKLRRDDIMWEQ

SEQ ID NO: 33181 - protein, 210 aa, Artificial Sequence
  Synthetic polypeptide
HSHRITNPLANCACERSRLHTPYENLKPNDLSLSLITPRWDCLVAKTSSGIPLILLYALILALKTLQEKIHRLELERTQAEDNLNILSREAAQYKKALENETNERNLAHQELIKQKKDISIQLSSAQSRCTLLEKQLEYTKRMVLNVEREKNMILEQQAQLQREKEQDQMKLYAKLEKLDVLEKECFRLTTTQKTAEDKIKHLEEKLKEE

SEQ ID NO: 33182 - protein, 234 aa, Artificial Sequence
  Synthetic polypeptide
HSHRITNPLANCACERSRLHTPYENLKPNDLSLSLITPRWDCLVAKTSSGIPLILLYALILALKTLQEKIHRLELERTQAEDNLNILSREAAQYKKALENETNERNLAHQELIKQKKDISIQLSSAQSRCTLLEKQLEYTKRMVLNVEREKNMILEQQAQLQREKEQDQMKLYAKLEKLDVLEKECFRLTTTQKTAEDKIKHLEEKLKEEEHQRKLFQDKASELQTGLEISKII

SEQ ID NO: 33183 - protein, 411 aa, Artificial Sequence
  Synthetic polypeptide
HSHRITNPLANCACERSRLHTPYENLKPNDLSLSLITPRWDCLVAKTSSGIPLILLYALILALKTLQEKIHRLELERTQAEDNLNILSREAAQYKKALENETNERNLAHQELIKQKKDISIQLSSAQSRCTLLEKQLEYTKRMVLNVEREKNMILEQQAQLQREKEQDQMKLYAKLEKLDVLEKECFRLTTTQKTAEDKIKHLEEKLKEEEHQRKLFQDKASEKTKCIKRRPPWQICSKFGALPFVAEKPSRTTSWCKAIPPDSEKSISICDNLSELLMAMQDELDQMSMEHQELLKQMKETESHSVCDDIECELECLLKKMEIKGEQISKLKKHQDSVCKLQQKVQNSKMSEASGIQQEDSYPKGSKNIKNSPRKCLTDTNLFQKNSSFHPIRVHNLQMKLRRDDIMWEQ

SEQ ID NO: 33184 - protein, 199 aa, Artificial Sequence
  Synthetic polypeptide
HSHRITNPLANCACERSRLHTPYENLKPNDLSLSLITPRWDCLVAKTSSGIPLILLYALILALKTLQEKIHRLELERTQAEDNLNILSREAAQYKKALENETNERNLAHQELIKQKKDISIQLSSAQSRCTLLEKQLEYTKRMVLNVEREKNMILEQQAQLQREKEQDQMKLYAKLEKLDVLEKECFRLTTTQKTAEDK

SEQ ID NO: 33185 - protein, 117 aa, Artificial Sequence
  Synthetic polypeptide
HSHRITNPLANCACERSRLHTPYENLKPNDLSLSLITPRWDCLVAKTSSGIPLILLYALILALKTLQEKIHRLELERTQAEDNLNILSREAAQYKKALENETNERNLAHQELIKQKK

SEQ ID NO: 33186 - protein, 116 aa, Artificial Sequence
  Synthetic polypeptide
HSHRITNPLANCACERSRLHTPYENLKPNDLSLSLITPRWDCLVAKTSSGIPLILLYALILALKTLQEKIHRLELERTQAEDNLNILSREAAQYKKALENETNERNLAHQELIKQK

SEQ ID NO: 33187 - protein, 255 aa, Artificial Sequence
  Synthetic polypeptide
HSHRITNPLANCACERSRLHTPYENLKPNDLSLSLITPRWDCLVAKTSSGIPLILLYALILALKTLQEKIHRLELERTQAEDNLNILSREAAQYKKALENETNERNLAHQELIKQKKDISIQLSSAQSRCTLLEKQLEYTKRMVLNVEREKNMILEQQAQLQREKEQDQMKLYAKLEKLDVLEKECFRLTTTQKTAEDKIKHLEEKLKEEEHQRKLFQDKASELQTGLEISKIIMSSVSNLKHSKEKKKSSKVCI

SEQ ID NO: 33188 - protein, 395 aa, Artificial Sequence
  Synthetic polypeptide
HSHRITNPLANCACERSRLHTPYENLKPNDLSLSLITPRWDCLVAKTSSGIPLILLYALILALKTLQEKIHRLELERTQAEDNLNILSREAAQYKKALENETNERNLAHQELIKQKKDISIQLSSAQSRCTLLEKQLEYTKRMVLNVEREKNMILEQQAQLQREKEQDQMKLYAKLEKLDVLEKECFRLTTTQKTAEDKIKHLEEKLKEEEHQRKLFQDKASELQTGLEISKIIMSSVSNLKHSKEKKKSSKKTKCIKRRPPWQICSKFGALPFVAEKMRQHRDPHILQKPFNVTETRCLPKPSRTTSWCKAIPPDSEKSISICDNLSELLMAMQDELDQMSMEHQELLKQMKETESHSVCDDIECELECLLKKMEIKGEQISKLKKHQDSVRRL

SEQ ID NO: 33189 - protein, 481 aa, Artificial Sequence
  Synthetic polypeptide
HSHRITNPLANCACERSRLHTPYENLKPNDLSLSLITPRWDCLVAKTSSGIPLILLYALILALKTLQEKIHRLELERTQAEDNLNILSREAAQYKKALENETNERNLAHQELIKQKKDISIQLSSAQSRCTLLEKQLEYTKRMVLNVEREKNMILEQQAQLQREKEQDQMKLYAKLEKLDVLEKECFRLTTTQKTAEDKIKHLEEKLKEEEHQRKLFQDKASELQTGLEISKIIMSSVSNLKHSKEKKKSSKKTKCIKRRPPWQICSKFGALPFVAEKSTSASCSVNASMQNFLQMRQHRDPHILQKPFNVTETRCLPKPSRTTSWCKAIPPDSEKSISICDNLSELLMAMQDELDQMSMEHQELLKQMKETESHSVCDDIECELECLLKKMEIKGEQISKLKKHQDSVCKLQQKVQNSKMSEASGIQQEDSYPKGSKNIKNSPRKCLTDTNLFQKNSSFHPIRVHNLQMKLRRDDIMWEQ

SEQ ID NO: 33190 - protein, 43 aa, Artificial Sequence
  Synthetic polypeptide
RTSDRRKMTFGRRSEMQEGMKSNEDGPASEGKRTRSDEAVCKT

SEQ ID NO: 33191 - protein, 102 aa, Artificial Sequence
  Synthetic polypeptide
RAMKMAQLQREKEQDQMKLYAKLEKLDVLEKECFRLTTTQKTAEDKIKHLEEKLKEEEHQRKLFQDKASELQTGLEISKIIMSSVSNLKHSKEKKKSSKVCI

SEQ ID NO: 33192 - protein, 13 aa, Artificial Sequence
  Synthetic polypeptide
RWPSFRGKKNKIR

SEQ ID NO: 33193 - protein, 287 aa, Artificial Sequence
  Synthetic polypeptide
RAMKMAQLQREKEQDQMKLYAKLEKLDVLEKECFRLTTTQKTAEDKIKHLEEKLKEEEHQRKLFQDKASELQTGLEISKIIMSSVSNLKHSKEKKKSSKKTKCIKRRPPWQICSKFGALPFVAEKPSRTTSWCKAIPPDSEKSISICDNLSELLMAMQDELDQMSMEHQELLKQMKETESHSVCDDIECELECLLKKMEIKGEQISKLKKHQDSVCKLQQKVQNSKMSEASGIQQEDSYPKGSKNIKNSPRKCLTDTNLFQKNSSFHPIRVHNLQMKLRRDDIMWEQ

SEQ ID NO: 33194 - protein, 311 aa, Artificial Sequence
  Synthetic polypeptide
RAMKMAQLQREKEQDQMKLYAKLEKLDVLEKECFRLTTTQKTAEDKIKHLEEKLKEEEHQRKLFQDKASELQTGLEISKIIMSSVSNLKHSKEKKKSSKKTKCIKRRPPWQICSKFGALPFVAEKMRQHRDPHILQKPFNVTETRCLPKPSRTTSWCKAIPPDSEKSISICDNLSELLMAMQDELDQMSMEHQELLKQMKETESHSVCDDIECELECLLKKMEIKGEQISKLKKHQDSVCKLQQKVQNSKMSEASGIQQEDSYPKGSKNIKNSPRKCLTDTNLFQKNSSFHPIRVHNLQMKLRRDDIMWEQ

SEQ ID NO: 33195 - protein, 57 aa, Artificial Sequence
  Synthetic polypeptide
RAMKMAQLQREKEQDQMKLYAKLEKLDVLEKECFRLTTTQKTAEDKIKHLEEKLKEE

SEQ ID NO: 33196 - protein, 81 aa, Artificial Sequence
  Synthetic polypeptide
RAMKMAQLQREKEQDQMKLYAKLEKLDVLEKECFRLTTTQKTAEDKIKHLEEKLKEEEHQRKLFQDKASELQTGLEISKII

SEQ ID NO: 33197 - protein, 258 aa, Artificial Sequence
  Synthetic polypeptide
RAMKMAQLQREKEQDQMKLYAKLEKLDVLEKECFRLTTTQKTAEDKIKHLEEKLKEEEHQRKLFQDKASEKTKCIKRRPPWQICSKFGALPFVAEKPSRTTSWCKAIPPDSEKSISICDNLSELLMAMQDELDQMSMEHQELLKQMKETESHSVCDDIECELECLLKKMEIKGEQISKLKKHQDSVCKLQQKVQNSKMSEASGIQQEDSYPKGSKNIKNSPRKCLTDTNLFQKNSSFHPIRVHNLQMKLRRDDIMWEQ

SEQ ID NO: 33198 - protein, 46 aa, Artificial Sequence
  Synthetic polypeptide
RAMKMAQLQREKEQDQMKLYAKLEKLDVLEKECFRLTTTQKTAEDK

SEQ ID NO: 33199 - protein, 68 aa, Artificial Sequence
  Synthetic polypeptide
RAMKMAQLQREKEQDQMKLYAKLEKLDVLEKECFRLTTTQKTAEDKIKHLEEKLKEEEHQRKLFQDKA

SEQ ID NO: 33200 - protein, 118 aa, Artificial Sequence
  Synthetic polypeptide
RAMKMAQLQREKEQDQMKLYAKLEKLDVLEKECFRLTTTQKTAEDKIKHLEEKLKEEEHQRKLFQDKASELQTGLEISKIIMSSVSNLKHSKEKKKSSKDKCVREQLLGHVISTFLVL

SEQ ID NO: 33201 - protein, 242 aa, Artificial Sequence
  Synthetic polypeptide
RAMKMAQLQREKEQDQMKLYAKLEKLDVLEKECFRLTTTQKTAEDKIKHLEEKLKEEEHQRKLFQDKASELQTGLEISKIIMSSVSNLKHSKEKKKSSKKTKCIKRRPPWQICSKFGALPFVAEKMRQHRDPHILQKPFNVTETRCLPKPSRTTSWCKAIPPDSEKSISICDNLSELLMAMQDELDQMSMEHQELLKQMKETESHSVCDDIECELECLLKKMEIKGEQISKLKKHQDSVRRL

SEQ ID NO: 33202 - protein, 155 aa, Artificial Sequence
  Synthetic polypeptide
RAMKMAQLQREKEQDQMKLYAKLEKLDVLEKECFRLTTTQKTAEDKIKHLEEKLKEEEHQRKLFQDKASELQTGLEISKIIMSSVSNLKHSKEKKKSSKKTKCIKRRPPWQICSKFGALPFVAEKVRGDKMKIVVQKNSCFVMRQHRDPHILQKP

SEQ ID NO: 33203 - protein, 91 aa, Artificial Sequence
  Synthetic polypeptide
RAMKMAQLQREKEQDQMKLYAKLEKLDVLEKECFRLTTTQKTAEDKIKHLEEKLKEEEHQRKLFQDKASELQTGLEISKIIMSSVSNLKHS

SEQ ID NO: 33204 - protein, 328 aa, Artificial Sequence
  Synthetic polypeptide
RAMKMAQLQREKEQDQMKLYAKLEKLDVLEKECFRLTTTQKTAEDKIKHLEEKLKEEEHQRKLFQDKASELQTGLEISKIIMSSVSNLKHSKEKKKSSKKTKCIKRRPPWQICSKFGALPFVAEKSTSASCSVNASMQNFLQMRQHRDPHILQKPFNVTETRCLPKPSRTTSWCKAIPPDSEKSISICDNLSELLMAMQDELDQMSMEHQELLKQMKETESHSVCDDIECELECLLKKMEIKGEQISKLKKHQDSVCKLQQKVQNSKMSEASGIQQEDSYPKGSKNIKNSPRKCLTDTNLFQKNSSFHPIRVHNLQMKLRRDDIMWEQ

SEQ ID NO: 33205 - protein, 892 aa, Artificial Sequence
  Synthetic polypeptide
NPEQRTQRYFLVGSNNAETKYRVLKIDRTEPKDLVIIDDRHVYTQQEVRELLGRLDLGNRTKMGQKGSSGLFRAVSAFGVVGFVRFLEGYYIVLITKRRKMADIGGHAIYKVEDTNMIYIPNDSVRVTHPDEARYLRIFQNVDLSSNFYFSYSYDLSHSLQYNLTVLRMPLEMLKSEMTQNRQESFDIFEDEGLITQGGSGVFGICSEPYMKYVWNGELLDIIKSTVHRDWLLYIIHGFCGQSKLLIYGRPVYVTLIARRSSKFAGTRFLKRGANCEGDVANEVETEQILCDASVMSFTAGSYSSYVQVRGSVPLYWSQDISTMMPKPPITLDQADPFAHVAALHFDQMFQRFGSPIIILNLVKEREKRKHERILSEELVAAVTYLNQFLPPEHTIVYIPWDMAKYTKSKLCNVLDRLNVIAESVVKKTGFFVNRPDSYCSILRPDEKWNELGGCVIPTGRLQTGILRTNCVDCLDRTNTAQFMVGKCALAYQLYSLGLIDKPNLQFDTDAVRLFEELYEDHGDTLSLQYGGSQLVHRVKTYRKIAPWTQHSKDIMQTLSRYYSNAFSDADRQDSINLFLGVFHPTEGKPHLWELPTDFYLHHKNTMRLLPTRRSYTYWWTPEVIKHLPLPYDEVICAVNLKKLIVKKFHKYEEEIDIHNEFFRPYELSSFDDTFCLAMTSSARDFMPKTVGIDPSPFTVRKPDETGKSVLGNKSNREEAVLQRKTAASAPPPPSEEAVSSSSEDDSGTDREEEGSVSQRSTPVKMTDAGDSAKVTENVVQPMKELYGINLSDGLSEEDFSIYSRFVQLGQSQHKQDKNSQQPCSRCSDGVIKLTPISAFSQDNIYEVQPPRVDRKSTEIFQAHIQASQGIMQPLGKEDSSMYREYIRNRYL

SEQ ID NO: 33206 - protein, 53 aa, Artificial Sequence
  Synthetic polypeptide
PQSYNHKTMMLANNVNQLGSGFFPSQVSRWKHISANTRLQPCKTLSRGPRDTF

SEQ ID NO: 33207 - protein, 12 aa, Artificial Sequence
  Synthetic polypeptide
AEDPEILSSWEQ

SEQ ID NO: 33208 - protein, 243 aa, Artificial Sequence
  Synthetic polypeptide
NPEQRTQRYFLVGSNNAETKYRVLKIDRTEPKDLVIIDDRHVYTQQEVRELLGRLDLGNRTKMGQKGSSGLFRAVSAFGVVGFVRFLEGYYIVLITKRRKMADIGGHAIYKVEDTNMIYIPNDSVRVTHPDEARYLRIFQNVDLSSNFYFSYSYDLSHSLQYNLTVLRMPLEMLKSEMTQNRQESFDIFEDEGLITQGGSGVFGICSEPYMKYVWNGELLDIIKSTVHRDWLLYIIHGFCGQS

SEQ ID NO: 33209 - protein, 38 aa, Artificial Sequence
  Synthetic polypeptide
TIHPFTRRSSGSEKPLITSLQLPILQKLEMLVFIWYQG

SEQ ID NO: 33210 - protein, 50 aa, Artificial Sequence
  Synthetic polypeptide
AQLSFFSSCHHVKKDLFASLSTTIVSFLRSPSHAEPYTHSHAEAVVQRNL

SEQ ID NO: 33211 - protein, 232 aa, Artificial Sequence
  Synthetic polypeptide
GLPVMLNHTPIHTQKQWFRETFNHLFAIANSAEAGDAGVHLVSGIKGSGGWTLTRRIEDLWELHPSFDIVVNCSGLGSRQLAGDSKIFPVRGQVLQVQAPWVEHFIRDGSGLTYIYPGTSHVTLGGTRQKGDWNLSPDAENSREILSRCCALEPSLHGACNIREKVGLRPYRPGVRLQTELLARDGQRLPVVHHYGHGSGGISVHWGTALEAARLVSECVHALRTPIPKSNL

SEQ ID NO: 33212 - protein, 62 aa, Artificial Sequence
  Synthetic polypeptide
TIHPFTRRSSGSEKPLITSLQLPILQKLEMLVFIWYQVGRYFRALRLKKCHSGLTWFWDFER

SEQ ID NO: 33213 - protein, 291 aa, Artificial Sequence
  Synthetic polypeptide
GLPVMLNHTPIHTQKQWFRETFNHLFAIANSAEAGDAGVHLVSGWQIFQSTPTEEVPFWADVVLGFRKMTEAELKKFPQYVFGQAFTTLKCECPAYLPWLEKRIKGSGGWTLTRRIEDLWELHPSFDIVVNCSGLGSRQLAGDSKIFPVRGQVLQVQAPWVEHFIRDGSGLTYIYPGTSHVTLGGTRQKGDWNLSPDAENSREILSRCCALEPSLHGACNIREKVGLRPYRPGVRLQTELLARDGQRLPVVHHYGHGSGGISVHWGTALEAARLVSECVHALRTPIPKSNL

SEQ ID NO: 33214 - protein, 85 aa, Artificial Sequence
  Synthetic polypeptide
RSCKWLSCGGVCLCDGIHWHEVSDMGVCPFAFLFCSWNPAGGFDRILGQDLVALPDDPLHSDCPLYPVLLGAPRDTFLASLRGTI

SEQ ID NO: 33215 - protein, 310 aa, Artificial Sequence
  Synthetic polypeptide
DKDAAALLLANEVASGYLVVGFVYVMEFIGMKSRTWASVHLHSFFAVGTLLVALTGYLVRTWWLYQMILSTVTVPFILCCWVLPETPFWLLSEGRYEEAQKIVDIMAKWNRASSCKLSELLSLDLQGPVSNSPTEVQKHNLSYLFYNWSITKRTLTVWLIWFTGSLGFYSFSLNSVNLGGNEYLNLFLLGVVEIPAYTFVCIAMDKVGRRTVLAYSLFCSALACGVVMVIPQKHYILGVVTAMVGKFAIGAAFGLIYLYTAELYPTIVRSLAVGSGSMVCRLASILAPFSVDLSSIWIFIPQLLGQHLQE

SEQ ID NO: 33216 - protein, 46 aa, Artificial Sequence
  Synthetic polypeptide
FNPLSVKCHLDSLWDLGIRGPETKMLLPYCLLTKLQVAILWWGLSM

SEQ ID NO: 33217 - protein, 372 aa, Artificial Sequence
  Synthetic polypeptide
DKDAAALLLANEVASGYLVVGFVYVMEFIGMKSRTWASVHLHSFFAVGTLLVALTGYLVRTWWLYQMILSTVTVPFILCCWVLPETPFWLLSEGRYEEAQKIVDIMAKWNRASSCKLSELLSLDLQGPVSNSPTEVQKHNLSYLFYNWSITKRTLTVWLIWFTGSLGFYSFSLNSVNLGGNEYLNLFLLGVVEIPAYTFVCIAMDKVGRRTVLAYSLFCSALACGVVMVIPQKHYILGVVTAMVGKFAIGAAFGLIYLYTAELYPTIVRSLAVGSGSMVCRLASILAPFSVDLSSIWIFIPQLFVGTMALLSGVLTLKLPETLGKRLATTWEEAAKLESENESKSSKLLLTTNNSGLEKTEAITPRDSGLGE

SEQ ID NO: 33218 - protein, 232 aa, Artificial Sequence
  Synthetic polypeptide
DKDAAALLLANEVASGYLVVGFVYVMEFIGMKSRTWASVHLHSFFAVGTLLVALTGYLVRTWWLYQMILSTVTVPFILCCWVLPETPFWLLSEGRYEEAQKIVDIMAKWNRASSCKLSELLSLDLQGPVSNSPTEVQKHNLSYLFYNWSITKRTLTVWLIWFTGSLGFYSFSLNSVNLGGNEYLNLFLLGVVEIPAYTFVCIAMDKVGRRTVLAYSLFCSALACGVVMVIPQ

SEQ ID NO: 33219 - protein, 189 aa, Artificial Sequence
  Synthetic polypeptide
DKDAAALLLANEVASGYLVVGFVYVMEFIGMKSRTWASVHLHSFFAVGTLLVALTGYLVRTWWLYQMILSTVTVPFILCCWVLPETPFWLLSEGRYEEAQKIVDIMAKWNRASSCKLSELLSLDLQGPVSNSPTEVQKHNLSYLFYNWSITKRTLTVWLIWFTGSLGFYSFSLNSVNLGGNEYLNLFLL

SEQ ID NO: 33220 - protein, 2 aa, Artificial Sequence
  Synthetic polypeptide
RS

SEQ ID NO: 33221 - protein, 24 aa, Artificial Sequence
  Synthetic polypeptide
DKDAAALLLANEARTPGGLVGHKQ

SEQ ID NO: 33222 - protein, 371 aa, Artificial Sequence
  Synthetic polypeptide
FNPLSVKCHLDSLWDLGIRGPETKMLLPYCLLTKLGRRVVLWATSSSMFLFGIAAAFAVDYYTFMAARFFLAMVASGYLVVGFVYVMEFIGMKSRTWASVHLHSFFAVGTLLVALTGYLVRTWWLYQMILSTVTVPFILCCWVLPETPFWLLSEGRYEEAQKIVDIMAKWNRASSCKLSELLSLDLQGPVSNSPTEVQKHNLSYLFYNWSITKRTLTVWLIWFTGSLGFYSFSLNSVNLGGNEYLNLFLLGVVEIPAYTFVCIAMDKVGRRTVLAYSLFCSALACGVVMVIPQKHYILGVVTAMVGKFAIGAAFGLIYLYTAELYPTIVRSLAVGSGSMVCRLASILAPFSVDLSSIWIFIPQLLGQHLQE

SEQ ID NO: 33223 - protein, 433 aa, Artificial Sequence
  Synthetic polypeptide
FNPLSVKCHLDSLWDLGIRGPETKMLLPYCLLTKLGRRVVLWATSSSMFLFGIAAAFAVDYYTFMAARFFLAMVASGYLVVGFVYVMEFIGMKSRTWASVHLHSFFAVGTLLVALTGYLVRTWWLYQMILSTVTVPFILCCWVLPETPFWLLSEGRYEEAQKIVDIMAKWNRASSCKLSELLSLDLQGPVSNSPTEVQKHNLSYLFYNWSITKRTLTVWLIWFTGSLGFYSFSLNSVNLGGNEYLNLFLLGVVEIPAYTFVCIAMDKVGRRTVLAYSLFCSALACGVVMVIPQKHYILGVVTAMVGKFAIGAAFGLIYLYTAELYPTIVRSLAVGSGSMVCRLASILAPFSVDLSSIWIFIPQLFVGTMALLSGVLTLKLPETLGKRLATTWEEAAKLESENESKSSKLLLTTNNSGLEKTEAITPRDSGLGE

SEQ ID NO: 33224 - protein, 293 aa, Artificial Sequence
  Synthetic polypeptide
FNPLSVKCHLDSLWDLGIRGPETKMLLPYCLLTKLGRRVVLWATSSSMFLFGIAAAFAVDYYTFMAARFFLAMVASGYLVVGFVYVMEFIGMKSRTWASVHLHSFFAVGTLLVALTGYLVRTWWLYQMILSTVTVPFILCCWVLPETPFWLLSEGRYEEAQKIVDIMAKWNRASSCKLSELLSLDLQGPVSNSPTEVQKHNLSYLFYNWSITKRTLTVWLIWFTGSLGFYSFSLNSVNLGGNEYLNLFLLGVVEIPAYTFVCIAMDKVGRRTVLAYSLFCSALACGVVMVIPQ

SEQ ID NO: 33225 - protein, 250 aa, Artificial Sequence
  Synthetic polypeptide
FNPLSVKCHLDSLWDLGIRGPETKMLLPYCLLTKLGRRVVLWATSSSMFLFGIAAAFAVDYYTFMAARFFLAMVASGYLVVGFVYVMEFIGMKSRTWASVHLHSFFAVGTLLVALTGYLVRTWWLYQMILSTVTVPFILCCWVLPETPFWLLSEGRYEEAQKIVDIMAKWNRASSCKLSELLSLDLQGPVSNSPTEVQKHNLSYLFYNWSITKRTLTVWLIWFTGSLGFYSFSLNSVNLGGNEYLNLFLL

SEQ ID NO: 33226 - protein, 73 aa, Artificial Sequence
  Synthetic polypeptide
FNPLSVKCHLDSLWDLGIRGPETKMLLPYCLLTKLGRRVVLWATSSSMFLFGIAAAFAVDYYTFMAARFFLAM

SEQ ID NO: 33227 - protein, 40 aa, Artificial Sequence
  Synthetic polypeptide
GYSEKMAVSEEVALTRQQISWCLDLGLPDLQKSFARIEAP

SEQ ID NO: 33228 - protein, 496 aa, Artificial Sequence
  Synthetic polypeptide
LSHYSFTLMNEIGAVINRTTERPFPIPPCEVTVRRWQSLRKWPSPDSKSPGALILDFLIYRNLLRELKHPNVIALQKVFLSHSDRKVWLLFDYAEHDLWHIIKFHRASKANKKPMQLPRSMVKSLLYQILDGIHYLHANWVLHRDLKPANILVMGEGPERGRVKIADMGFARLFNSPLKPLADLDPVVVTFWYRAPELLLGARHYTKAIDIWAIGCIFAELLTSEPIFHCRQEDIKTSNPFHHDQLDRIFSVMGFPADKDWEDIRKMPEYPTLQKDFRRTTYANSSLIKYMEKHKVKPDSKVFLLLQKLLTMDPTKRITSEQALQDPYFQEDPLPTLDVFAGCQIPYPKREFLNEDDPEEKGDKNQQQQQNQHQQPTAPPQQAAAPPQAPPPQQNSTQTNGTAGGAGAGVGGTGAGLQHSQDSSLNQVPPNKKPRLGPSGANSGGPVMPSDYQHSSSRLNYQSSVQGSSQSQSTLGYSSSSQQSSQYHPSHQAHRY

SEQ ID NO: 33229 - protein, 8 aa, Artificial Sequence
  Synthetic polypeptide
STEIFCEN

SEQ ID NO: 33230 - protein, 305 aa, Artificial Sequence
  Synthetic polypeptide
LSHYSFTLMNEIGAVINRTTERPFPIPPCEVTVRRWQSLRKWPSPDSKSPGALILDFLIYRNLLRELKHPNVIALQKVFLSHSDRKVWLLFDYAEHDLWHIIKFHRASKANKKPMQLPRSMVKSLLYQILDGIHYLHANWVLHRDLKPANILVMGEGPERGRVKIADMGFARLFNSPLKPLADLDPVVVTFWYRAPELLLGARHYTKAIDIWAIGCIFAELLTSEPIFHCRQEDIKTSNPFHHDQLDRIFSVMGFPADKDWEDIRKMPEYPTLQKDFRRTTYANSSLIKYMEKHKVKPDSKVFLL

SEQ ID NO: 33231 - protein, 158 aa, Artificial Sequence
  Synthetic polypeptide
LSHYSFTLMNEIGAVINRTTERPFPIPPCEVTVRRWQSLRKWPSPDSKSPGALILDFLIYRNLLRELKHPNVIALQKVFLSHSDRKVWLLFDYAEHDLWHIIKFHRASKANKKPMQLPRSMVKSLLYQILDGIHYLHANWVLHRDLLTWVLPDYSILL

SEQ ID NO: 33232 - protein, 41 aa, Artificial Sequence
  Synthetic polypeptide
WFYQGFPFLDPSHFLLLPPCKKCLLPPAVILRPPQPCGTKR

SEQ ID NO: 33233 - protein, 467 aa, Artificial Sequence
  Synthetic polypeptide
GLPSRVELKDEKEYALKQIEGTGISMSACREIALLRELKHPNVIALQKVFLSHSDRKVWLLFDYAEHDLWHIIKFHRASKANKKPMQLPRSMVKSLLYQILDGIHYLHANWVLHRDLKPANILVMGEGPERGRVKIADMGFARLFNSPLKPLADLDPVVVTFWYRAPELLLGARHYTKAIDIWAIGCIFAELLTSEPIFHCRQEDIKTSNPFHHDQLDRIFSVMGFPADKDWEDIRKMPEYPTLQKDFRRTTYANSSLIKYMEKHKVKPDSKVFLLLQKLLTMDPTKRITSEQALQDPYFQEDPLPTLDVFAGCQIPYPKREFLNEDDPEEKGDKNQQQQQNQHQQPTAPPQQAAAPPQAPPPQQNSTQTNGTAGGAGAGVGGTGAGLQHSQDSSLNQVPPNKKPRLGPSGANSGGPVMPSDYQHSSSRLNYQSSVQGSSQSQSTLGYSSSSQQSSQYHPSHQAHRY

SEQ ID NO: 33234 - protein, 129 aa, Artificial Sequence
  Synthetic polypeptide
GLPSRVELKDEKEYALKQIEGTGISMSACREIALLRELKHPNVIALQKVFLSHSDRKVWLLFDYAEHDLWHIIKFHRASKANKKPMQLPRSMVKSLLYQILDGIHYLHANWVLHRDLLTWVLPDYSILL

SEQ ID NO: 33235 - protein, 46 aa, Artificial Sequence
  Synthetic polypeptide
VKVRRHVFIYMASFLTSMCHTMVMDSSQKAIFLRWHSVSTEHLMWL

SEQ ID NO: 33236 - protein, 3103 aa, Artificial Sequence
  Synthetic polypeptide
VRNLDLHKERKSIRKGISKGQKTCLHLHGIFPYLYVPYDGYGQQPESYLSQMAFSIDRALNVALGNPSSTAQHVFKVSLVSGMPFYGYHEKERHFMKIYLYNPTMVKRICELLQSGAIMNKFYQPHEAHIPYLLQLFIDYNLYGMNLINLAAVKFRKARRKSNTLHATGSCKNHLSGNSLADTLFRWEQDEIPSSLILEGVEPQSTCELEVDAVAADILNRLDIEAQIGGNPGLQAIWEDEKQRRRNRNETSQMSQPESQDHRFVPATESEKKFQKRLQEILKQNDFSVTLSGSVDYSDGSQEFSAELTLHSEVLSPEMLQCTPANMVEVHKDKESSKGHTRHKVEEALINEEAILNLMENSQTFQPLTQRLSESPVFMDSSPDEALVHLLAGLESDGYRGERNRMPSPCRSFGNNKYPQNSDDEENEPQIEKEEMELSLVMSQRWDSNIEEHCAKKRSLCRNTHRSSTEDDDSSSGEEMEWSDNSLLLASLSIPQLDGTADENSDNPLNNENSRTHSSVIATSKLSVKPSIFHKDAATLEPSSSAKITFQCKHTSALSSHVLNKEDLIEDLSQTNKNTEKGLDNSVTSFTNESTYSMKYPGSLSSTVHSENSHKENSKKEILPVSSCESSIFDYEEDIPSVTRQVPSRKYTNIRKIEKDSPFIHMHRHPNENTLGKNSFNFSDLNHSKNKVSSEGNEKGNSTALSSLFPSSFTENCELLSCSGENRTMVHSLNSTADESGLNKLKIRYEEFQEHKTEKPSLSQQAAHYMFFPSVVLSNCLTRPQKLSPVTYKLQPGNKPSRLKLNKRKLAGHQETSTKSSETGSTKDNFIQNNPCNSNPEKDNALASDLTKTTRGAFENKTPTDGFIDCHFGDGTLETEQSFGLYGNKYTLRAKRKVNYETEDSESSFVTHNSKISLPHPMEIGESLDGTLKSRKRRKMSKKLPPVIIKYIIINRFRGRKNMLVKLGKIDSKEKQVILTEEKMELYKKLAPLKDFWPKVPDSPATKYPIYPLTPKKSHRRKSKHKSAKKKTGKQQRTNNENIKRTLSFRKKRSHAILSPPSPSYNAETEDCDLNYSDVMSKLGFLSERSTSPINSSPPRCWSPTDPRAEEIMAAAEKEAMLFKGPNVYKKTVNSRIGKTSRARAQIKKSKAKLANPSIVTKKRNKRNQTNKLVDDGKKKPRAKQKTNEKGTSRKHTTLKDEKIKSQSGAEVKFVLKHQNVSEFASSSGGSQLLFKQKDMPLMGSAVDHPLSASLPTGINAQQKLSGCFSSFLESKKSVDLQTFPSSRDDLHPSVVCNSIGPGVSKINVQRPHNQSAMFTLKESTLIQKNIFDLSNHLSQVAQNTQISSGMSSKIEDNANNIQRNYLSSIGKLSEYRNSLESKLDQAYTPNFLHCKDSQQQIVCIAEQSKHSETCSPGNTASEESQMPNNCFVTSLRSPIKQIAWEQKQRGFILDMSNFKPERVKPRSLSEAISQTKALSQCKNRNVSTPSAFGEGQSGLAVLKELLQKRQQKAQNANTTQDPLSNKHQPNKNISGSLEHNKANKRTRSVTSPRKPRTPRSTKQKEKIPKLLKVDSLNLQNSSQLDNSVSDDSPIFFSDPGFESCYSLEDSLSPEHNYNFDINTIGQTGFCSFYSGSQFVPADQNLPQKFLSDAVQDLFPGQAIEKNEFLSHDNQKCDEDKHHTTDSASWIRSGTLSPEIFEKSTIDSNENRRHNQWKNSFHPLTTRSNSIMDSFCVQQAEDCLSEKSRLNRSSVSKEVFLSLPQPNNSDWIQGHTRKEMGQSLDSANTSFTAILSSPDGELVDVACEDLELYVSRNNDMLTPTPDSSPRSTSSPSQSKNGSFTPRTANILKPLMSPPSREEIMATLLDHDLSETIYQEPFCSNPSDVPEKPREIGGRLLMVETRLANDLAEFEGDFSLEGLRLWKTAFSAMTQNPRPGSPLRSGQGVVNKGSSNSPKMVEDKKIVIMPCKCAPSRQLVQVWLQAKEEYERSKKLPKTKPTGVVKSAENFSSSVNPDDKPVVPPKMDVSPCILPTTAHTKEDVDNSQIALQAPTTGCSQTASESQMLPPVASASDPEKDEDDDDNYYISYSSPDSPVIPPWQQPISPDSKALNGDDRPSSPVEELPSLAFENFLKPIKDGIQKSPCSEPQEPLVISPINTRARTGKCESLCFHSTPIIQRKLLERLPEAPGLSPLSTEPKTQKLSNKKGSNTDTLRRVLLTQAKNQFAAVNTPQKETSQIDGPSLNNTYGFKVSIQNLQEAKALHEIQNLTLISVELHARTRRDLEPDPEFDPICALFYCISSDTPLPDTEKTELTGVIVIDKDKTVFSQDIRYQTPLLIRSGITGLEVTYAADEKALFHEIANIIKRYDPDILLGYEIQMHSWGYLLQRAAALSIDLCRMISRVPDDKIENRFAAERDEYGSYTMSEINIVGRITLNLWRIMRNEVALTNYTFENVSFHVLHQRFPLFTFRVLSDWFDNKTDLYRWKMVDHYVSRVRGNLQMLEQLDLIGKTSEMARLFGIQFLHVLTRGSQYRVESMMLRIAKPMNYIPVTPSVQQRSQMRAPQCVPLIMEPESRFYSNSVLVLDFQSLYPSIVIAYNYCFSTCLGHVENLGKYDEFKFGCTSLRVPPDLLYQVRHDITVSPNGVAFVKPSVRKGVLPRMLEEILKTRFMVKQSMKAYKQDRALSRMLDARQLGLKLIANVTFGYTSANFSGRMPCIEVGDSIVHKARETLERAIKLVNDTKKWGARVVYGDTDSMFVLLKGATKEQSFKIGQEIAEAVTATNPKPVKLKFEKVYLPCVLQTKKRYVGYMYETLDQKDPVFDAKGIETVRRDSCPAVSKILERSLKLLFETRDISLIKQYVQRQCMKLLEGKASIQDFIFAKEYRGSFSYKPGACVPALELTRKMLTYDRRSEPQVGERVPYVIIYGTPGVPLIQLVRRPVEVLQDPTLRLNATYYITKQILPPLARIFSLIGIDVFSWYHELPRIHKATSSSRSEPEGRKGTISQYFTTLHCPVCDDLTQHGICSKCRSQPQHVAVILNQEIRELERQQEQLVKICKNCTGCFDRHIPCVSLNCPVLFKLSRVNRELSKAPYLRQLLDQF

SEQ ID NO: 33237 - protein, 16 aa, Artificial Sequence
  Synthetic polypeptide
LCDRRQNCQKEKTNTP

SEQ ID NO: 33238 - protein, 37 aa, Artificial Sequence
  Synthetic polypeptide
VACIQIPALTPTSCVTVDKIVRKRKPIRPKKDTNQQC

SEQ ID NO: 33239 - protein, 14 aa, Artificial Sequence
  Synthetic polypeptide
LCDRRQNCQKEKTN

SEQ ID NO: 33240 - protein, 27 aa, Artificial Sequence
  Synthetic polypeptide
VACIQIPALTPTSCVTVDKIVRKRKPI

SEQ ID NO: 33241 - protein, 2 aa, Artificial Sequence
  Synthetic polypeptide
NW

SEQ ID NO: 33242 - protein, 513 aa, Artificial Sequence
  Synthetic polypeptide
PQCSLESGGLAFKNQTAVKTALPEILVDSLHWIIYWGNQSKTGDIGNYYYGQGHPMKPHRIRMTHNLLLNYGLYRKMEIYRPHKATAEEMTKYHSDEYIKFLRSIRPDNMSEYSKQMQRFNVGEDCPVFDGLFEFCQLSTGGSVAGAVKLNRQQTDMAVNWAGGLHHAKKSEASGFCYVNDIVLAILELLKYHQRVLYIDIDIHHGDGVEEAFYTTDRVMTVSFHKYGEYFPGTGDLRDIGAGKGKYYAVNFPMRDGIDDESYGQIFKPIISKVMEMYQPSAVVLQCGADSLSGDRLGCFNLTVKGHAKCVEVVKTFNLPLLMLGGGGYTIRNVARCWTYETAVALDCEIPNELPYNDYFEYFGPDFKLHISPSNMTNQNTPEYMEKIKQRLFENLRMLPHAPGVQMQAIPEDAVHEDSGDEDGEDPDKRISIRASDKRIACDEEFSDSEDEGEGGRRNVADHKKGAKKARIEEDKKETEDKKTDVKEEDKSKDNSGEKTDTKGTKSEQLSNP

SEQ ID NO: 33243 - protein, 63 aa, Artificial Sequence
  Synthetic polypeptide
CSHLVLFSPSVLWSREVWPLKIKLPSKLLYLKFWLTAFIGLSTGATKVKLVILEIIIMDRVIP

SEQ ID NO: 33244 - protein, 196 aa, Artificial Sequence
  Synthetic polypeptide
PQCSLESGGLAFKNQTAVKTALPEILVDSLHWIIYWGNQSKTGDIGNYYYGQGHPMKPHRIRMTHNLLLNYGLYRKMEIYRPHKATAEEMTKYHSDEYIKFLRSIRPDNMSEYSKQMQRFNVGEDCPVFDGLFEFCQLSTGGSVAGAVKLNRQQTDMAVNWAGGLHHAKKSEASGFCYVNDIVLAILELLKYVNLY

SEQ ID NO: 33245 - protein, 127 aa, Artificial Sequence
  Synthetic polypeptide
PQCSLESGGLAFKNQTAVKTALPEILVDSLHWIIYWGNQSKTGDIGNYYYGQGHPMKPHRIRMTHNLLLNYGLYRKMEIYRPHKATAEEMTKYHSDEYIKFLRSIRPDNMSEYSKQMQRFNVGEDCP

SEQ ID NO: 33246 - protein, 13 aa, Artificial Sequence
  Synthetic polypeptide
YFDEPVRRNSRRR

SEQ ID NO: 33247 - protein, 483 aa, Artificial Sequence
  Synthetic polypeptide
ILMSQSGEIPGEGDIGNYYYGQGHPMKPHRIRMTHNLLLNYGLYRKMEIYRPHKATAEEMTKYHSDEYIKFLRSIRPDNMSEYSKQMQRFNVGEDCPVFDGLFEFCQLSTGGSVAGAVKLNRQQTDMAVNWAGGLHHAKKSEASGFCYVNDIVLAILELLKYHQRVLYIDIDIHHGDGVEEAFYTTDRVMTVSFHKYGEYFPGTGDLRDIGAGKGKYYAVNFPMRDGIDDESYGQIFKPIISKVMEMYQPSAVVLQCGADSLSGDRLGCFNLTVKGHAKCVEVVKTFNLPLLMLGGGGYTIRNVARCWTYETAVALDCEIPNELPYNDYFEYFGPDFKLHISPSNMTNQNTPEYMEKIKQRLFENLRMLPHAPGVQMQAIPEDAVHEDSGDEDGEDPDKRISIRASDKRIACDEEFSDSEDEGEGGRRNVADHKKGAKKARIEEDKKETEDKKTDVKEEDKSKDNSGEKTDTKGTKSEQLSNP

SEQ ID NO: 33248 - protein, 22 aa, Artificial Sequence
  Synthetic polypeptide
ASQEKFQEKVILEIIIMDRVIP

SEQ ID NO: 33249 - protein, 166 aa, Artificial Sequence
  Synthetic polypeptide
ILMSQSGEIPGEGDIGNYYYGQGHPMKPHRIRMTHNLLLNYGLYRKMEIYRPHKATAEEMTKYHSDEYIKFLRSIRPDNMSEYSKQMQRFNVGEDCPVFDGLFEFCQLSTGGSVAGAVKLNRQQTDMAVNWAGGLHHAKKSEASGFCYVNDIVLAILELLKYVNLY

SEQ ID NO: 33250 - protein, 97 aa, Artificial Sequence
  Synthetic polypeptide
ILMSQSGEIPGEGDIGNYYYGQGHPMKPHRIRMTHNLLLNYGLYRKMEIYRPHKATAEEMTKYHSDEYIKFLRSIRPDNMSEYSKQMQRFNVGEDCP

SEQ ID NO: 33251 - protein, 64 aa, Artificial Sequence
  Synthetic polypeptide
GGGMIFKYDNICKVPAKYIVYGAAVAGIYRVAGKNMAPLEALVWGVGQTVLTLIISFSRILATL

SEQ ID NO: 33252 - protein, 5 aa, Artificial Sequence
  Synthetic polypeptide
YMVQQ

SEQ ID NO: 33253 - protein, 52 aa, Artificial Sequence
  Synthetic polypeptide
SSCKIHSIWCSSSGHLQSSWEEHGPFGSAGMGRWTDCTDINHLLFKDPRYTL

SEQ ID NO: 33254 - protein, 55 aa, Artificial Sequence
  Synthetic polypeptide
GCFSPWVFADSGGGTTEELPLDYKFTRFSSSNSKTAGYYPNPPLVLSSDETLISK

SEQ ID NO: 33255 - protein, 71 aa, Artificial Sequence
  Synthetic polypeptide
GKSYQDKLLRRPSKVNLAFEAAFPPGYLLIPEAAPQRNYLWTTNLQDSLQAIQKQLATIQILHWSYQVMRH

SEQ ID NO: 33256 - protein, 38 aa, Artificial Sequence
  Synthetic polypeptide
FRRRHHRGITSGLQIYKILFKQFKNSWLLSKSSTGLIK

SEQ ID NO: 33257 - protein, 37 aa, Artificial Sequence
  Synthetic polypeptide
VYGNYLWTTNLQDSLQAIQKQLATIQILHWSYQVMRH

SEQ ID NO: 33258 - protein, 47 aa, Artificial Sequence
  Synthetic polypeptide
FMSEDWRCKKNVYKYMVITSGLQIYKILFKQFKNSWLLSKSSTGLIK

SEQ ID NO: 33259 - protein, 18 aa, Artificial Sequence
  Synthetic polypeptide
GGILKVVHLIIQKIQLKT

SEQ ID NO: 33260 - protein, 501 aa, Artificial Sequence
  Synthetic polypeptide
MERNEKNKDNVGRYFKGCASNHPKNSAQNLTKDSTLKHEGFYSENLTESRKFLKSREKQSSLTEIKGSVYETTYSPPECPFCGKIEEHSEDMETHVKTKHANLLDIPLEDCDQPLYDCPMCGLICTNYHILQEHVDLHLEENSFQQGMDRVQCSGDLQLAHQLQQEEDRKRRSEESRQEIEEFQKLQRQYGLDNSGGYKQQQLRNMEIEVNRGRMPPSEFHRRKADMMESLALGFDDGKTKTSGIIEALHRYYQNAATDVRRVWLSSVVDHFHSSLGDKGWGCGYRNFQMLLSSLLQNDAYNDCLKGMLIPCIPKIQSMIEDAWKEGFDPQGASQLNNRLQGTKAWIGACEVYILLTSLRVKCHIVDFHKSTGPLGTHPRLFEWILNYYSSEGEGSPKVVCTSKPPIYLQHQGHSRTVIGIEEKKNRTLCLLILDPGCPSREMQKLLKQDIEASSLKQLRKSMGNLKHKQYQILAVEGALSLEEKLARRQASQVFTAEKIP

SEQ ID NO: 33261 - protein, 203 aa, Artificial Sequence
  Synthetic polypeptide
MERNEKNKDNVGRYFKGCASNHPKNSAQNLTKDSTLKHEGFYSENLTESRKFLKSREKQSSLTEIKGSVYETTYSPPECPFCGKIEEHSEDMETHVKTKHANLLDIPLEDCDQPLYDCPMCGLICTNYHILQEHVDLHLEENSFQQGMDRVQCSGDLQLAHQLQQEEDRKRRSEESRQEIEEFQKLQELLKHFIGIIRMLPQM

SEQ ID NO: 33262 - protein, 29 aa, Artificial Sequence
  Synthetic polypeptide
CMCFFSKVINKFKQTHNNKKCRVGPLKFM

SEQ ID NO: 33263 - protein, 334 aa, Artificial Sequence
  Synthetic polypeptide
NCMPNFDVCAFFLRLLTNSNRLTTTRNAVWALSNLCRGKNPPPNFSKVSPCLNVLSRLLFSSDPDVLADVCWALSYLSDGPNDKIQAVIDSGVCRRLVELLMHNDYKVVSPALRAVGNIVTGDDIQTQVILNCSALPCLLHLLSSPKESIRKEACWTVSNITAGNRAQIQAVIDANIFPVLIEILQKAEFRTRKEAAWAITNATSGGTPEQIRYLVALGCIKPLCDLLTVMDSKIVQVALNGLENILRLGEQESKQNGIGINPYCALIEEAYGLDKIEFLQSHENQEIYQKAFDLIEHYFGVEEDDPSIVPQVDENQQQFIFQQQEAPMDGFQL

SEQ ID NO: 33264 - protein, 68 aa, Artificial Sequence
  Synthetic polypeptide
DLMVLKRGSFPAQTLFLPAAIRVRCDLVLLAFRHDCEVSPATWNCKSIKPLFLPGFRASSLTLAHHII

SEQ ID NO: 33265 - protein, 37 aa, Artificial Sequence
  Synthetic polypeptide
DVTWSSLPSAMIVRSPQPRGTVSPLNLFFFPVSGPAA

SEQ ID NO: 33266 - protein, 2308 aa, Artificial Sequence
  Synthetic polypeptide
TSFSSRFQGQQLDLGTPHNLSEPCIQGCHFWNSVDQKNCALKCNDTYATVCERESCEVGCSSAEGAYEEEVLENADLPTAPFASSIGSHNMTLRWKSANFSGVKYIIQWKYAQLLGSWTYTKTVSRPSYVVKPLHPFTEYIFRVVWIFTAQLQLYSPPSPSYRTHPHGVPETAPLIRNIESSSPDTVEVSWDPPQFPGGPILGYNLRLISKNQKLDAGTQRTSFQFYSTLPNTIYRFSIAAVNEVGEGPEAESSITTSSSAVQQEEQWLFLSRKTSLRKRSLKHLVDEAHCLRLDAIYHNITGISVDVHQQIVYFSEGTLIWAKKAANMSDVSDLRIFYRGSGLISSISIDWLYQRMYFIMDELVCVCDLENCSNIEEITPPSISAPQKIVADSYNGYVFYLLRDGIYRADLPVPSGRCAEAVRIVESCTLKDFAIKPQAKRIIYFNDTAQVFMSTFLDGSASHLILPRIPFADVKSFACENNDFLVTDGKVIFQQDALSFNEFIVGCDLSHIEEFGFGNLVIFGSSSQLHPLPGRPQELSVLFGSHQALVQWKPPALAIGASPSAWQNWTYEVKVSTQDPPEVTHIFLNISGTMLNVPELQSAMKYKVSVRASSPKRPGPWSEPSVGTTLVPASEPPFIMAVKEDGLWSKPLNSFGPGEFLSSDIGNVSDMDWYNNSLYYSDTKGDVFVWLLNGTDISENYHLPSIAGAGALAFEWLGHFLYWAGKTYVIQRQSVLTGHTDIVTHVKLLVNDMVVDSVGGYLYWTTLYSVESTRLNGESSLVLQTQPWFSGKKVIALTLDLSDGLLYWLVQDSQCIHLYTAVLRGQSTGDTTITEFAAWSTSEISQNALMYYSGRLFWINGFRIITTQEIGQKTSVSVLEPARFNQFTIIQTSLKPLPGNFSFTPKVIPDSVQESSFRIEGNASSFQILWNGPPAVDWGVVFYSVEFSAHSKFLASEQHSLPVFTVEGLEPYALFNLSVTPYTYWGKGPKTSLSLRAPETVPSAPENPRIFILPSGKCCNKNEVVVEFRWNKPKHENGVLTKFEIFYNISNQSITNKTCEDWIAVNVTPSVMSFQLEGMSPRCFIAFQVRAFTSKGPGPYADVVKSTTSEINPFPHLITLLGNKIVFLDMDQNQVVWTFSAERVISAVCYTADNEMGYYAEGDSLFLLHLHNRSSSELFQDSLVFDITVITIDWISRHLYFALKESQNGMQVFDVDLEHKVKYPREVKIHNRNSTIISFSVYPLLSRLYWTEVSNFGYQMFYYSIISHTLHRILQPTATNQQNKRNQCSCNVTEFELSGAMAIDTSNLEKPLIYFAKAQEIWAMDLEGCQCWRVITVPAMLGKTLVSLTVDGDLIYWIITAKDSTQIYQAKKGNGAIVSQVKALRSRHILAYSSVMQPFPDKAFLSLASDTVEPTILNATNTSLTIRLPLAKTNLTWYGITSPTPTYLVYYAEVNDRKNSSDLKYRILEFQDSIALIEDLQPFSTYMIQIAVKNYYSDPLEHLPPGKEIWGKTKNGVPEAVQLINTTVRSDTSLIISWRESHKPNGPKESVRYQLAISHLALIPETPLRQSEFPNGRLTLLVTRLSGGNIYVLKVLACHSEEMWCTESHPVTVEMFNTPEKPYSLVPENTSLQFNWKAPLNVNLIRFWVELQKWKYNEFYHVKTSCSQGPAYVCNITNLQPYTSYNVRVVVVYKTGENSTSLPESFKTKAGVPNKPGIPKLLEGSKNSIQWEKAEDNGCRITYYILEIRKSTSNNLQNQNLRWKMTFNGSCSSVCTWKSKNLKGIFQFRVVAANNLGFGEYSGISENIILVGDDFWIPETSFILTIIVGIFLVVTIPLTFVWHRRLKNQKSAKEGVTVLINEDKELAELRGLAAGVGLANACYAIHTLPTQEEIENLPAFPREKLTLRLLLGSGAFGEVYEGTAVDILGVGSGEIKVAVKTLKKGSTDQEKIEFLKEAHLMSKFNHPNILKQLGVCLLNEPQYIILELMEGGDLLTYLRKARMATFYGPLLTLVDLVDLCVDISKGCVYLERMHFIHRDLAARNCLVSVKDYTSPRIVKIGDFGLARDIYKNDYYRKRGEGLLPVRWMAPESLMDGIFTTQSDVWSFGILIWEILTLGHQPYPAHSNLDVLNYVQTGGRLEPPRNCPDDLWNLMTQCWAQEPDQRPTFHRIQDQLQLFRNFFLNSIYKSRDEANNSGVINESFEGEDGDVICLNSDDIMPVALMETKNREGLNYMVLATECGQGEEKSEGPLGSQESESCGLRKEEKEPHADKDFCQEKQVAYCPSGKPEGLNYACLTHSGYGDGSD

SEQ ID NO: 33267 - protein, 2314 aa, Artificial Sequence
  Synthetic polypeptide
TSFSSRFQGQQLDLGTPHNLSEPCIQGCHFWNSVDQKNCALKCRESCEVGCSSAEGAYEEEVLENADLPTAPFASSIGSHNMTLRWKSANFSGVKYIIQWKYAQLLGSWTYTKTVSRPSYVVKPLHPFTEYIFRVVWIFTAQLQLYSPPSPSYRTHPHGVPETAPLIRNIESSSPDTVEVSWDPPQFPGGPILGYNLRLISKNQKLDAGTQRTSFQFYSTLPNTIYRFSIAAVNEVGEGPEAESSITTSSSAVQQEEQWLFLSRKTSLRKRSLKHLVDEAHCLRLDAIYHNITGISVDVHQQIVYFSEGTLIWAKKAANMSDVSDLRIFYRGSGLISSISIDWLYQRMYFIMDELVCVCDLENCSNIEEITPPSISAPQKIVADSYNGYVFYLLRDGIYRADLPVPSGRCAEAVRIVESCTLKDFAIKPQAKRIIYFNDTAQVFMSTFLDGSASHLILPRIPFADVKSFACENNDFLVTDGKVIFQQDALSFNEFIVGCDLSHIEEFGFGNLVIFGSSSQLHPLPGRPQELSVLFGSHQALVQWKPPALAIGANVILISDIIELFELGPSAWQNWTYEVKVSTQDPPEVTHIFLNISGTMLNVPELQSAMKYKVSVRASSPKRPGPWSEPSVGTTLVPASEPPFIMAVKEDGLWSKPLNSFGPGEFLSSDIGNVSDMDWYNNSLYYSDTKGDVFVWLLNGTDISENYHLPSIAGAGALAFEWLGHFLYWAGKTYVIQRQSVLTGHTDIVTHVKLLVNDMVVDSVGGYLYWTTLYSVESTRLNGESSLVLQTQPWFSGKKVIALTLDLSDGLLYWLVQDSQCIHLYTAVLRGQSTGDTTITEFAAWSTSEISQNALMYYSGRLFWINGFRIITTQEIGQKTSVSVLEPARFNQFTIIQTSLKPLPGNFSFTPKVIPDSVQESSFRIEGNASSFQILWNGPPAVDWGVVFYSVEFSAHSKFLASEQHSLPVFTVEGLEPYALFNLSVTPYTYWGKGPKTSLSLRAPETVPSAPENPRIFILPSGKCCNKNEVVVEFRWNKPKHENGVLTKFEIFYNISNQSITNKTCEDWIAVNVTPSVMSFQLEGMSPRCFIAFQVRAFTSKGPGPYADVVKSTTSEINPFPHLITLLGNKIVFLDMDQNQVVWTFSAERVISAVCYTADNEMGYYAEGDSLFLLHLHNRSSSELFQDSLVFDITVITIDWISRHLYFALKESQNGMQVFDVDLEHKVKYPREVKIHNRNSTIISFSVYPLLSRLYWTEVSNFGYQMFYYSIISHTLHRILQPTATNQQNKRNQCSCNVTEFELSGAMAIDTSNLEKPLIYFAKAQEIWAMDLEGCQCWRVITVPAMLAGKTLVSLTVDGDLIYWIITAKDSTQIYQAKKGNGAIVSQVKALRSRHILAYSSVMQPFPDKAFLSLASDTVEPTILNATNTSLTIRLPLAKTNLTWYGITSPTPTYLVYYAEVNDRKNSSDLKYRILEFQDSIALIEDLQPFSTYMIQIAVKNYYSDPLEHLPPGKEIWGKTKNGVPEAVQLINTTVRSDTSLIISWRESHKPNGPKESVRYQLAISHLALIPETPLRQSEFPNGRLTLLVTRLSGGNIYVLKVLACHSEEMWCTESHPVTVEMFNTPEKPYSLVPENTSLQFNWKAPLNVNLIRFWVELQKWKYNEFYHVKTSCSQGPAYVCNITNLQPYTSYNVRVVVVYKTGENSTSLPESFKTKAGVPNKPGIPKLLEGSKNSIQWEKAEDNGCRITYYILEIRKSTSNNLQNQNLRWKMTFNGSCSSVCTWKSKNLKGIFQFRVVAANNLGFGEYSGISENIILVGDDFWIPETSFILTIIVGIFLVVTIPLTFVWHRRLKNQKSAKEGVTVLINEDKELAELRGLAAGVGLANACYAIHTLPTQEEIENLPAFPREKLTLRLLLGSGAFGEVYEGTAVDILGVGSGEIKVAVKTLKKGSTDQEKIEFLKEAHLMSKFNHPNILKQLGVCLLNEPQYIILELMEGGDLLTYLRKARMATFYGPLLTLVDLVDLCVDISKGCVYLERMHFIHRDLAARNCLVSVKDYTSPRIVKIGDFGLARDIYKNDYYRKRGEGLLPVRWMAPESLMDGIFTTQSDVWSFGILIWEILTLGHQPYPAHSNLDVLNYVQTGGRLEPPRNCPDDLWNLMTQCWAQEPDQRPTFHRIQDQLQLFRNFFLNSIYKSRDEANNSGVINESFEGEDGDVICLNSDDIMPVALMETKNREGLNYMVLATECGQGEEKSEGPLGSQESESCGLRKEEKEPHADKDFCQEKQVAYCPSGKPEGLNYACLTHSGYGDGSD

SEQ ID NO: 33268 - protein, 46 aa, Artificial Sequence
  Synthetic polypeptide
QCLAVPHPCSLLLLTPCEESACFPFAFCHDRKFPEVSPVMWNWPAA

SEQ ID NO: 33269 - protein, 2328 aa, Artificial Sequence
  Synthetic polypeptide
HPVKKVPASPLPSATIESFLKSPQSCGTGQQLDLGTPHNLSEPCIQGCHFWNSVDQKNCALKCNDTYATVCERESCEVGCSSAEGAYEEEVLENADLPTAPFASSIGSHNMTLRWKSANFSGVKYIIQWKYAQLLGSWTYTKTVSRPSYVVKPLHPFTEYIFRVVWIFTAQLQLYSPPSPSYRTHPHGVPETAPLIRNIESSSPDTVEVSWDPPQFPGGPILGYNLRLISKNQKLDAGTQRTSFQFYSTLPNTIYRFSIAAVNEVGEGPEAESSITTSSSAVQQEEQWLFLSRKTSLRKRSLKHLVDEAHCLRLDAIYHNITGISVDVHQQIVYFSEGTLIWAKKAANMSDVSDLRIFYRGSGLISSISIDWLYQRMYFIMDELVCVCDLENCSNIEEITPPSISAPQKIVADSYNGYVFYLLRDGIYRADLPVPSGRCAEAVRIVESCTLKDFAIKPQAKRIIYFNDTAQVFMSTFLDGSASHLILPRIPFADVKSFACENNDFLVTDGKVIFQQDALSFNEFIVGCDLSHIEEFGFGNLVIFGSSSQLHPLPGRPQELSVLFGSHQALVQWKPPALAIGASPSAWQNWTYEVKVSTQDPPEVTHIFLNISGTMLNVPELQSAMKYKVSVRASSPKRPGPWSEPSVGTTLVPASEPPFIMAVKEDGLWSKPLNSFGPGEFLSSDIGNVSDMDWYNNSLYYSDTKGDVFVWLLNGTDISENYHLPSIAGAGALAFEWLGHFLYWAGKTYVIQRQSVLTGHTDIVTHVKLLVNDMVVDSVGGYLYWTTLYSVESTRLNGESSLVLQTQPWFSGKKVIALTLDLSDGLLYWLVQDSQCIHLYTAVLRGQSTGDTTITEFAAWSTSEISQNALMYYSGRLFWINGFRIITTQEIGQKTSVSVLEPARFNQFTIIQTSLKPLPGNFSFTPKVIPDSVQESSFRIEGNASSFQILWNGPPAVDWGVVFYSVEFSAHSKFLASEQHSLPVFTVEGLEPYALFNLSVTPYTYWGKGPKTSLSLRAPETVPSAPENPRIFILPSGKCCNKNEVVVEFRWNKPKHENGVLTKFEIFYNISNQSITNKTCEDWIAVNVTPSVMSFQLEGMSPRCFIAFQVRAFTSKGPGPYADVVKSTTSEINPFPHLITLLGNKIVFLDMDQNQVVWTFSAERVISAVCYTADNEMGYYAEGDSLFLLHLHNRSSSELFQDSLVFDITVITIDWISRHLYFALKESQNGMQVFDVDLEHKVKYPREVKIHNRNSTIISFSVYPLLSRLYWTEVSNFGYQMFYYSIISHTLHRILQPTATNQQNKRNQCSCNVTEFELSGAMAIDTSNLEKPLIYFAKAQEIWAMDLEGCQCWRVITVPAMLGKTLVSLTVDGDLIYWIITAKDSTQIYQAKKGNGAIVSQVKALRSRHILAYSSVMQPFPDKAFLSLASDTVEPTILNATNTSLTIRLPLAKTNLTWYGITSPTPTYLVYYAEVNDRKNSSDLKYRILEFQDSIALIEDLQPFSTYMIQIAVKNYYSDPLEHLPPGKEIWGKTKNGVPEAVQLINTTVRSDTSLIISWRESHKPNGPKESVRYQLAISHLALIPETPLRQSEFPNGRLTLLVTRLSGGNIYVLKVLACHSEEMWCTESHPVTVEMFNTPEKPYSLVPENTSLQFNWKAPLNVNLIRFWVELQKWKYNEFYHVKTSCSQGPAYVCNITNLQPYTSYNVRVVVVYKTGENSTSLPESFKTKAGVPNKPGIPKLLEGSKNSIQWEKAEDNGCRITYYILEIRKSTSNNLQNQNLRWKMTFNGSCSSVCTWKSKNLKGIFQFRVVAANNLGFGEYSGISENIILVGDDFWIPETSFILTIIVGIFLVVTIPLTFVWHRRLKNQKSAKEGVTVLINEDKELAELRGLAAGVGLANACYAIHTLPTQEEIENLPAFPREKLTLRLLLGSGAFGEVYEGTAVDILGVGSGEIKVAVKTLKKGSTDQEKIEFLKEAHLMSKFNHPNILKQLGVCLLNEPQYIILELMEGGDLLTYLRKARMATFYGPLLTLVDLVDLCVDISKGCVYLERMHFIHRDLAARNCLVSVKDYTSPRIVKIGDFGLARDIYKNDYYRKRGEGLLPVRWMAPESLMDGIFTTQSDVWSFGILIWEILTLGHQPYPAHSNLDVLNYVQTGGRLEPPRNCPDDLWNLMTQCWAQEPDQRPTFHRIQDQLQLFRNFFLNSIYKSRDEANNSGVINESFEGEDGDVICLNSDDIMPVALMETKNREGLNYMVLATECGQGEEKSEGPLGSQESESCGLRKEEKEPHADKDFCQEKQVAYCPSGKPEGLNYACLTHSGYGDGSD

SEQ ID NO: 33270 - protein, 19 aa, Artificial Sequence
  Synthetic polypeptide
SLPSHVELASSLTLAHHII

SEQ ID NO: 33271 - protein, 2334 aa, Artificial Sequence
  Synthetic polypeptide
HPVKKVPASPLPSATIESFLKSPQSCGTGQQLDLGTPHNLSEPCIQGCHFWNSVDQKNCALKCRESCEVGCSSAEGAYEEEVLENADLPTAPFASSIGSHNMTLRWKSANFSGVKYIIQWKYAQLLGSWTYTKTVSRPSYVVKPLHPFTEYIFRVVWIFTAQLQLYSPPSPSYRTHPHGVPETAPLIRNIESSSPDTVEVSWDPPQFPGGPILGYNLRLISKNQKLDAGTQRTSFQFYSTLPNTIYRFSIAAVNEVGEGPEAESSITTSSSAVQQEEQWLFLSRKTSLRKRSLKHLVDEAHCLRLDAIYHNITGISVDVHQQIVYFSEGTLIWAKKAANMSDVSDLRIFYRGSGLISSISIDWLYQRMYFIMDELVCVCDLENCSNIEEITPPSISAPQKIVADSYNGYVFYLLRDGIYRADLPVPSGRCAEAVRIVESCTLKDFAIKPQAKRIIYFNDTAQVFMSTFLDGSASHLILPRIPFADVKSFACENNDFLVTDGKVIFQQDALSFNEFIVGCDLSHIEEFGFGNLVIFGSSSQLHPLPGRPQELSVLFGSHQALVQWKPPALAIGANVILISDIIELFELGPSAWQNWTYEVKVSTQDPPEVTHIFLNISGTMLNVPELQSAMKYKVSVRASSPKRPGPWSEPSVGTTLVPASEPPFIMAVKEDGLWSKPLNSFGPGEFLSSDIGNVSDMDWYNNSLYYSDTKGDVFVWLLNGTDISENYHLPSIAGAGALAFEWLGHFLYWAGKTYVIQRQSVLTGHTDIVTHVKLLVNDMVVDSVGGYLYWTTLYSVESTRLNGESSLVLQTQPWFSGKKVIALTLDLSDGLLYWLVQDSQCIHLYTAVLRGQSTGDTTITEFAAWSTSEISQNALMYYSGRLFWINGFRIITTQEIGQKTSVSVLEPARFNQFTIIQTSLKPLPGNFSFTPKVIPDSVQESSFRIEGNASSFQILWNGPPAVDWGVVFYSVEFSAHSKFLASEQHSLPVFTVEGLEPYALFNLSVTPYTYWGKGPKTSLSLRAPETVPSAPENPRIFILPSGKCCNKNEVVVEFRWNKPKHENGVLTKFEIFYNISNQSITNKTCEDWIAVNVTPSVMSFQLEGMSPRCFIAFQVRAFTSKGPGPYADVVKSTTSEINPFPHLITLLGNKIVFLDMDQNQVVWTFSAERVISAVCYTADNEMGYYAEGDSLFLLHLHNRSSSELFQDSLVFDITVITIDWISRHLYFALKESQNGMQVFDVDLEHKVKYPREVKIHNRNSTIISFSVYPLLSRLYWTEVSNFGYQMFYYSIISHTLHRILQPTATNQQNKRNQCSCNVTEFELSGAMAIDTSNLEKPLIYFAKAQEIWAMDLEGCQCWRVITVPAMLAGKTLVSLTVDGDLIYWIITAKDSTQIYQAKKGNGAIVSQVKALRSRHILAYSSVMQPFPDKAFLSLASDTVEPTILNATNTSLTIRLPLAKTNLTWYGITSPTPTYLVYYAEVNDRKNSSDLKYRILEFQDSIALIEDLQPFSTYMIQIAVKNYYSDPLEHLPPGKEIWGKTKNGVPEAVQLINTTVRSDTSLIISWRESHKPNGPKESVRYQLAISHLALIPETPLRQSEFPNGRLTLLVTRLSGGNIYVLKVLACHSEEMWCTESHPVTVEMFNTPEKPYSLVPENTSLQFNWKAPLNVNLIRFWVELQKWKYNEFYHVKTSCSQGPAYVCNITNLQPYTSYNVRVVVVYKTGENSTSLPESFKTKAGVPNKPGIPKLLEGSKNSIQWEKAEDNGCRITYYILEIRKSTSNNLQNQNLRWKMTFNGSCSSVCTWKSKNLKGIFQFRVVAANNLGFGEYSGISENIILVGDDFWIPETSFILTIIVGIFLVVTIPLTFVWHRRLKNQKSAKEGVTVLINEDKELAELRGLAAGVGLANACYAIHTLPTQEEIENLPAFPREKLTLRLLLGSGAFGEVYEGTAVDILGVGSGEIKVAVKTLKKGSTDQEKIEFLKEAHLMSKFNHPNILKQLGVCLLNEPQYIILELMEGGDLLTYLRKARMATFYGPLLTLVDLVDLCVDISKGCVYLERMHFIHRDLAARNCLVSVKDYTSPRIVKIGDFGLARDIYKNDYYRKRGEGLLPVRWMAPESLMDGIFTTQSDVWSFGILIWEILTLGHQPYPAHSNLDVLNYVQTGGRLEPPRNCPDDLWNLMTQCWAQEPDQRPTFHRIQDQLQLFRNFFLNSIYKSRDEANNSGVINESFEGEDGDVICLNSDDIMPVALMETKNREGLNYMVLATECGQGEEKSEGPLGSQESESCGLRKEEKEPHADKDFCQEKQVAYCPSGKPEGLNYACLTHSGYGDGSD

SEQ ID NO: 33272 - protein, 43 aa, Artificial Sequence
  Synthetic polypeptide
HPMLPPYSAQIPCQQEGSRLLEIWPLDLGLLCLHNCTVGGSEI

SEQ ID NO: 33273 - protein, 415 aa, Artificial Sequence
  Synthetic polypeptide
VSMLACSASLPCDTLCCLHTLHRSPASKKALDFSRSGPSTLDFSVSITAQLVDLKSELTETQAEKVVLEKEVHDQLLQLHSIQLQLHAKTGQSADSGTIKAKLSGPSVEELERELEANKKEKMKEAQLEAEVKLLRKENEALRRHIAVLQAEVYGARLAAKYLDKELAGRVQQIQLLGRDMKGPAHDKLWNQLEAEIHLHRHKTVIRACRGRNDLKRPMQAPPGHDQDSLKKSQGVGPIRKVLLLKEDHEGLGISITGGKEHGVPILISEIHPGQPADRCGGLHVGDAILAVNGVNLRDTKHKEAVTILSQQRGEIEFEVVYVAPEVDSDDENVEYEDESGHRYRLYLDELEGGGNPGASCKDTSGEIKVLQGFNKKAVTDTHENGDLGTASETPLDDGASKLDDLHTLYHKKSY

SEQ ID NO: 33274 - protein, 415 aa, Artificial Sequence
  Synthetic polypeptide
VSMLACSASLPCDTLCCLHTLHRSPASKKALDFSRSGPSTLDFSVSITAQLVDLKSELTETQAEKVVLEKEVHDQLLQLHSIQLQLHAKTGQSADSGTIKAKLVSRSSSKMERELEANKKEKMKEAQLEAEVKLLRKENEALRRHIAVLQAEVYGARLAAKYLDKELAGRVQQIQLLGRDMKGPAHDKLWNQLEAEIHLHRHKTVIRACRGRNDLKRPMQAPPGHDQDSLKKSQGVGPIRKVLLLKEDHEGLGISITGGKEHGVPILISEIHPGQPADRCGGLHVGDAILAVNGVNLRDTKHKEAVTILSQQRGEIEFEVVYVAPEVDSDDENVEYEDESGHRYRLYLDELEGGGNPGASCKDTSGEIKVLQGFNKKAVTDTHENGDLGTASETPLDDGASKLDDLHTLYHKKSY

SEQ ID NO: 33275 - protein, 407 aa, Artificial Sequence
  Synthetic polypeptide
VSMLACSASLPCDTLCCLHTLHRSPASKKALDFSRSGPSTLDFSVSITAQLVDLKSELTETQAEKVVLEKEVHDQLLQLHSIQLQLHAKTGQSADSGTIKAKLERELEANKKEKMKEAQLEAEVKLLRKENEALRRHIAVLQAEVYGARLAAKYLDKELAGRVQQIQLLGRDMKGPAHDKLWNQLEAEIHLHRHKTVIRACRGRNDLKRPMQAPPGHDQDSLKKSQGVGPIRKVLLLKEDHEGLGISITGGKEHGVPILISEIHPGQPADRCGGLHVGDAILAVNGVNLRDTKHKEAVTILSQQRGEIEFEVVYVAPEVDSDDENVEYEDESGHRYRLYLDELEGGGNPGASCKDTSGEIKVLQGFNKKAVTDTHENGDLGTASETPLDDGASKLDDLHTLYHKKSY

SEQ ID NO: 33276 - protein, 32 aa, Artificial Sequence
  Synthetic polypeptide
HCLIASEAPWTITDAELRVTLTVKGTVGGSEI

SEQ ID NO: 33277 - protein, 368 aa, Artificial Sequence
  Synthetic polypeptide
RAQLVDLKSELTETQAEKVVLEKEVHDQLLQLHSIQLQLHAKTGQSADSGTIKAKLSGPSVEELERELEANKKEKMKEAQLEAEVKLLRKENEALRRHIAVLQAEVYGARLAAKYLDKELAGRVQQIQLLGRDMKGPAHDKLWNQLEAEIHLHRHKTVIRACRGRNDLKRPMQAPPGHDQDSLKKSQGVGPIRKVLLLKEDHEGLGISITGGKEHGVPILISEIHPGQPADRCGGLHVGDAILAVNGVNLRDTKHKEAVTILSQQRGEIEFEVVYVAPEVDSDDENVEYEDESGHRYRLYLDELEGGGNPGASCKDTSGEIKVLQGFNKKAVTDTHENGDLGTASETPLDDGASKLDDLHTLYHKKSY

SEQ ID NO: 33278 - protein, 14 aa, Artificial Sequence
  Synthetic polypeptide
ASGNSHSEGHSWWI

SEQ ID NO: 33279 - protein, 368 aa, Artificial Sequence
  Synthetic polypeptide
RAQLVDLKSELTETQAEKVVLEKEVHDQLLQLHSIQLQLHAKTGQSADSGTIKAKLVSRSSSKMERELEANKKEKMKEAQLEAEVKLLRKENEALRRHIAVLQAEVYGARLAAKYLDKELAGRVQQIQLLGRDMKGPAHDKLWNQLEAEIHLHRHKTVIRACRGRNDLKRPMQAPPGHDQDSLKKSQGVGPIRKVLLLKEDHEGLGISITGGKEHGVPILISEIHPGQPADRCGGLHVGDAILAVNGVNLRDTKHKEAVTILSQQRGEIEFEVVYVAPEVDSDDENVEYEDESGHRYRLYLDELEGGGNPGASCKDTSGEIKVLQGFNKKAVTDTHENGDLGTASETPLDDGASKLDDLHTLYHKKSY

SEQ ID NO: 33280 - protein, 360 aa, Artificial Sequence
  Synthetic polypeptide
RAQLVDLKSELTETQAEKVVLEKEVHDQLLQLHSIQLQLHAKTGQSADSGTIKAKLERELEANKKEKMKEAQLEAEVKLLRKENEALRRHIAVLQAEVYGARLAAKYLDKELAGRVQQIQLLGRDMKGPAHDKLWNQLEAEIHLHRHKTVIRACRGRNDLKRPMQAPPGHDQDSLKKSQGVGPIRKVLLLKEDHEGLGISITGGKEHGVPILISEIHPGQPADRCGGLHVGDAILAVNGVNLRDTKHKEAVTILSQQRGEIEFEVVYVAPEVDSDDENVEYEDESGHRYRLYLDELEGGGNPGASCKDTSGEIKVLQGFNKKAVTDTHENGDLGTASETPLDDGASKLDDLHTLYHKKSY

SEQ ID NO: 33281 - protein, 467 aa, Artificial Sequence
  Synthetic polypeptide
GKVLTGSSRQSYSPGYQDFSKWESMLKIKEGLLRQKEIVIDRQKQQITHLHERIRDNELRAQHAMLGHYVNCEDSYVASLQPQYENTSLQTPFSEESVSHSQQGEFEQKLASTEKEVLQLNEFLKQRLSLFSEEKKKLEEKLKTRDRYISSLKKKCQKESEQNKEKQRRIETLEKYLADLPTLDDVQSQSLQLQILEEKNKNLQEALIDTEKKLEEIKKQCQDKETQLICQKKKEKELVTTVQSLQQKVERCLEDGIRLPMLDAKQLQNENDNLRQQNETASKIIDSQQDEIDRMILEIQSMQGKLSKEKLTTQKMMEELEKKERNVQRLTKALLENQRQTDETCSLLDQGQEPDQSRQQTVLSKRPLFDLTVIDQLFKEMSCCLFDLKALCSILNQRAQGKEPNLSLLLGIRSMNCSAEETENDHSTETLTKKLSDVCQLRRDIDELRTTISDRYAQDMGDNCITQ

SEQ ID NO: 33282 - protein, 3 aa, Artificial Sequence
  Synthetic polypeptide
GRF

SEQ ID NO: 33283 - protein, 19 aa, Artificial Sequence
  Synthetic polypeptide
EGFDWIISSKLFTWLSGFQ

SEQ ID NO: 33284 - protein, 235 aa, Artificial Sequence
  Synthetic polypeptide
GKVLTGSSRQSYSPGYQDFSKWESMLKIKEGLLRQKEIVIDRQKQQITHLHERIRDNELRAQHAMLGHYVNCEDSYVASLQPQYENTSLQTPFSEESVSHSQQGEFEQKLASTEKEVLQLNEFLKQRLSLFSEEKKKLEEKLKTRDRYISSLKKKCQKESEQNKEKQRRIETLEKYLADLPTLDDVQSQSLQLQILEEKNKNLQEALIDTEKKLEEIKKQCQDKETQLICQKKKE

SEQ ID NO: 33285 - protein, 158 aa, Artificial Sequence
  Synthetic polypeptide
GKVLTGSSRQSYSPGYQDFSKWESMLKIKEGLLRQKEIVIDRQKQQITHLHERIRDNELRAQHAMLGHYVNCEDSYVASLQPQYENTSLQTPFSEESVSHSQQGEFEQKLASTEKEVLQLNEFLKQRLSLFSEEKKKLEEKVGFSNKVELGQQHFLSI

SEQ ID NO: 33286 - protein, 806 aa, Artificial Sequence
  Synthetic polypeptide
KPAWVLQKQLDDAKEGEMALLSKHKEVESELAAARERLQQQASDLVLKASHIGMLQATQMTQEVTIKDLESEKSRVNERLSQLEEERAFLRSKTQSLDEEQKQQILELEKKVNEAKRTQQEYYERELKNLQSRLEEEVTQLNEAHSKTLEELAWKHHMAIEAVHSNAIRDKKKLQMDLEEQHNKDKLNLEEDKNQLQQELENLKEVLEDKLNTANQEIGHLQDMVRKSEQGLGSAEGLIASLQDSQERLQNELDLTKDSLKETKDALLNVEGELEQERQQHEETIAAMKEEEKLKVDKMAHDLEIKWTENLRQECSKLREELRLQHEEDKKSAMSQLLQLKDREKNAARDSWQKKVEDLLNQISLLKQNLEIQLSQSQTSLQQLQAQFTQERQRLTQELEELEEQHQQRHKSLKEAHVLAFQTMEEEKEKEQRALENHLQQKHSAELQSLKDAHRESMEGFRIEMEQELQTLRFELEDEGKAMLASLRSELNHQHAAAIDLLRHNHHQELAAAKMELERSIDISRRQSKEHICRITDLQEELRHREHHISELDKEVQHLHENISALTKELEFKGKEILRIRSESNQQIRLHEQDLNKRLEKELDVMTADHLREKNIMRADFNKTNELLKEINAALQVSLEEMEEKYLMRESKPEDIQMITELKAMLTERDQIIKKLIEDNKFYQLELVNRETNFNKVFNSSPTVGVINPLAKQKKKNDKSPTNRFVSVPNLSALESGGVGNGHPNRLDPIPNSPVHDIEFNSSKPLPQPVPPKGPKTFLSPAQSEASPVASPDPQRQEWFARYFTF

SEQ ID NO: 33287 - protein, 38 aa, Artificial Sequence
  Synthetic polypeptide
SQHFGGPRQEDRFRPGVRNQPGFFKNSLMMPRREKWPY

SEQ ID NO: 33288 - protein, 36 aa, Artificial Sequence
  Synthetic polypeptide
LGTVVHTCNPSTLGGPGRRIASGQVLETSLGSSKTA

SEQ ID NO: 33289 - protein, 757 aa, Artificial Sequence
  Synthetic polypeptide
KPAWVLQKQLDDAKEGEMALLSKHKEVESELAAARERLQQQASDLVLKASHIGMLQATQMTQEVTIKDLESEKSRVNERLSQLEEERAFLRSKTQSLDEEQKQQILELEKKVNEAKRTQQEYYERELKNLQSRLEEEVTQLNEAHSKTLEELAWKHHMAIEAVHSNAIRDKKKLQMDLEEQHNKDKLNLEEDKNQLQQELENLKEVLEDKLNTANQEIGHLQDMVRKSEQGLGSAEGLIASLQDSQERLQNELDLTKDSLKETKDALLNVEGELEQERQQHEETIAAMKEEEKLKVDKMAHDLEIKWTENLRQECSKLREELRLQHEEDKKSAMSQLLQLKDREKNAARDSWQKKVEDLLNQISLLKQNLEIQLSQSQTSLQQLQAQFTQERQRLTQELEELEEQHQQRHKSLKEAHVLAFQTMEEEKEKEQRALENHLQQKHSAELQSLKDAHRESMEGFRIEMEQELQTLRFELEDEGKAMLASLRSELNHQHAAAIDLLRHNHHQELAAAKMELERSIDISRRQSKEHICRITDLQEELRHREHHISELDKEVQHLHENISALTKELEFKGKEILRIRSESNQQIRLEEMEEKYLMRESKPEDIQMITELKAMLTERDQIIKKLIEDNKFYQLELVNRETNFNKVFNSSPTVGVINPLAKQKKKNDKSPTNRFVSVPNLSALESGGVGNGHPNRLDPIPNSPVHDIEFNSSKPLPQPVPPKGPKTFLSPAQSEASPVASPDPQRQEWFARYFTF

SEQ ID NO: 33290 - protein, 722 aa, Artificial Sequence
  Synthetic polypeptide
KPAWVLQKQLDDAKEGEMALLSKHKEVESELAAARERLQQQASDLVLKASHIGMLQATQMTQEVTIKDLESEKSRVNERLSQLEEERAFLRSKTQSLDEEQKQQILELEKKVNEAKRTQQEYYERELKNLQSRLEEEVTQLNEAHSKTLEELAWKHHMAIEAVHSNAIRDKKKLQMDLEEQHNKDKLNLEEDKNQLQQELENLKEVLEDKLNTANQEIGHLQDMVRKSEQGLGSAEGLIASLQDSQERLQNELDLTKDSLKETKDALLNVEGELEQERQQHEETIAAMKEEEKLKVDKMAHDLEIKWTENLRQECSKLREELRLQHEEDKKSAMSQLLQLKDREKNAARDSWQKKVEDLLNQISLLKQNLEIQLSQSQTSLQQLQAQFTQERQRLTQELEELEEQHQQRHKSLKEAHVLAFQTMEEEKEKEQRALENHLQQKHSAELQSLKDAHRESMEGFRIEMEQELQTLRFELEDEGKAMLASLRSELNHQHAAAIDLLRHNHHQELAAAKMELERSIDISRRQSKEHICRITDLQEELRHREHHISELDKEVQHLHENISALTKELEFKGKEILRIRSESNQQIRLEEMEEKYLMRESKPEDIQMITELKAMLTERDQIIKKLIQKKKNDKSPTNRFVSVPNLSALESGGVGNGHPNRLDPIPNSPVHDIEFNSSKPLPQPVPPKGPKTFLSPAQSEASPVASPDPQRQEWFARYFTF

SEQ ID NO: 33291 - protein, 315 aa, Artificial Sequence
  Synthetic polypeptide
KPAWVLQKQLDDAKEGEMALLSKHKEVESELAAARERLQQQASDLVLKASHIGMLQATQMTQEVTIKDLESEKSRVNERLSQLEEERAFLRSKTQSLDEEQKQQILELEKKVNEAKRTQQEYYERELKNLQSRLEEEVTQLNEAHSKTLEELAWKHHMAIEAVHSNAIRDKKKLQMDLEEQHNKDKLNLEEDKNQLQQELENLKEVLEDKLNTANQEIGHLQDMVRKSEQGLGSAEGLIASLQDSQERLQNELDLTKDSLKETKDALLNVELLVAPGILGIRQHNFHLCLSSHLKRIPGILEQGLILLQFDIILT

SEQ ID NO: 33292 - protein, 343 aa, Artificial Sequence
  Synthetic polypeptide
AQKFETSLGNMEKKEKHVEPAKSPKKEHSVPSDKQVKAKTERAKEEIGAVSIKKAVPGKKEEKTTKTVEQEIRKEKSGKTSSILKDKEPIKGKEEKVPASLKEKEPETKKDEKMSKAGKEVKPKPPQLQGKKEEKPEPQIKKEAKPAISEKVQIHKQDIVKPEKTVSHGKPEEKVLKQVKAVTIEKTAKPKPTKKAEHREREPPSIKTDKPKPTPKGTSEVTESGKKKTEISEKESKEKADMKHLREEKVSTRKESLQLHNVTKAEKPARVSKDVEDVPASKKAKEGTEDVSPTKQKSPISFFQCVYLDGYNGYGFQFPFTPADRPGESSGQANSPGQKQQGQ

SEQ ID NO: 33293 - protein, 44 aa, Artificial Sequence
  Synthetic polypeptide
EAEVGGPLEPRSLRPAWATWKRKKNMWNQQSHQRKNTQFQVTNK

SEQ ID NO: 33294 - protein, 27 aa, Artificial Sequence
  Synthetic polypeptide
DQPGQHGKERKTCGTSKVTKERTLSSK

SEQ ID NO: 33295 - protein, 335 aa, Artificial Sequence
  Synthetic polypeptide
AQKFETSLGNMEKKEKHVEPAKSPKKEHSVPSDKQVKAKTERAKEEIGAVSIKKAVPGKKEEKTTKTVEQEIRKEKSGKTSSILKDKEPIKGKEEKVPASLKEKEPETKKDEKMSKAGKEVKPKPPQLQGKKEEKPEPQIKKEAKPAISEKVQIHKQDIVKPEKTVSHGKPEEKVLKQVKAVTIEKTAKPKPTKKAEHREREPPSIKTDKPKPTPKGTSEVTESGKKKTEISEKESKEKADMKHLREEKVSTRKESLQLHNVTKEDVEDVPASKKAKEGTEDVSPTKQKSPISFFQCVYLDGYNGYGFQFPFTPADRPGESSGQANSPGQKQQGQ

SEQ ID NO: 33296 - protein, 37 aa, Artificial Sequence
  Synthetic polypeptide
AQKFETSLGNMNRKRKKNMWNQQSHQRKNTQFQVTNK

SEQ ID NO: 33297 - protein, 340 aa, Artificial Sequence
  Synthetic polypeptide
DQPGQHEQEKKEKHVEPAKSPKKEHSVPSDKQVKAKTERAKEEIGAVSIKKAVPGKKEEKTTKTVEQEIRKEKSGKTSSILKDKEPIKGKEEKVPASLKEKEPETKKDEKMSKAGKEVKPKPPQLQGKKEEKPEPQIKKEAKPAISEKVQIHKQDIVKPEKTVSHGKPEEKVLKQVKAVTIEKTAKPKPTKKAEHREREPPSIKTDKPKPTPKGTSEVTESGKKKTEISEKESKEKADMKHLREEKVSTRKESLQLHNVTKAEKPARVSKDVEDVPASKKAKEGTEDVSPTKQKSPISFFQCVYLDGYNGYGFQFPFTPADRPGESSGQANSPGQKQQGQ

SEQ ID NO: 33298 - protein, 332 aa, Artificial Sequence
  Synthetic polypeptide
DQPGQHEQEKKEKHVEPAKSPKKEHSVPSDKQVKAKTERAKEEIGAVSIKKAVPGKKEEKTTKTVEQEIRKEKSGKTSSILKDKEPIKGKEEKVPASLKEKEPETKKDEKMSKAGKEVKPKPPQLQGKKEEKPEPQIKKEAKPAISEKVQIHKQDIVKPEKTVSHGKPEEKVLKQVKAVTIEKTAKPKPTKKAEHREREPPSIKTDKPKPTPKGTSEVTESGKKKTEISEKESKEKADMKHLREEKVSTRKESLQLHNVTKEDVEDVPASKKAKEGTEDVSPTKQKSPISFFQCVYLDGYNGYGFQFPFTPADRPGESSGQANSPGQKQQGQ

SEQ ID NO: 33299 - protein, 239 aa, Artificial Sequence
  Synthetic polypeptide
CMAFPLLALILSPAALRRGAFRHDCKSPEASPAMWNCLLETEPLQGTDEDAVASADFSSMLSEEEKEELKAELVQLEDEITTLRQVLSAKERHLVEIKQKLGMNLMNELKQNFSKSWHDMQTTTAYKKTHETLSHAGQKATAAFSNVGTAISKKFGDMRSHSIGYSIRHSISMPAMRNSPTFKSFEERVETTVTSLKTKVGGTNPNGGSFEEVLSSTAHASAQSLAGGSRRTKEEELQC

SEQ ID NO: 33300 - protein, 35 aa, Artificial Sequence
  Synthetic polypeptide
EEVPSAMIVSLLRPPQPCGTVCWRLNRCKEQTKMQ

SEQ ID NO: 33301 - protein, 12 aa, Artificial Sequence
  Synthetic polypeptide
GLPSHVELFVGD

SEQ ID NO: 33302 - protein, 234 aa, Artificial Sequence
  Synthetic polypeptide
CMAFPLLALILSPAALRRGAFRHDCKSPEASPAMWNCLLETEPLQGTDEDAVASADFSSMLSEEEKEELKAELVQLEDEITTLRQVLSAKERHLVEIKQKLGMNLMNELKQNFSKSWHDMQTTTAYKKTHETLSHAGQKATAAFSNVGTAISKKFGDMSYSIRHSISMPAMRNSPTFKSFEERVETTVTSLKTKVGGTNPNGGSFEEVLSSTAHASAQSLAGGSRRTKEEELQC

SEQ ID NO: 33303 - protein, 174 aa, Artificial Sequence
  Synthetic polypeptide
CMAFPLLALILSPAALRRGAFRHDCKSPEASPAMWNCLLETEPLQGTDEDAVASADFSSMLSEEEKEELKAELVQLEDEITTLRQVLSAKERHLVEIKQKLGMNLMNELKQNFSKSWHDMQTTTAYKKTHETLSHAGQKATAAFSNVGTAISKKFGDMSYSIRHSISMPAMRRK

SEQ ID NO: 33304 - protein, 161 aa, Artificial Sequence
  Synthetic polypeptide
CMAFPLLALILSPAALRRGAFRHDCKSPEASPAMWNCLLETEPLQGTDEDAVASADFSSMLSEEEKEELKAELVQLEDEITTLRQVLSAKERHLVEIKQKLGMNLMNELKQNFSKSWHDMQTTTAYKKTHETLSHAGQKATAAFSNVGTAISKKFGDMRRK

SEQ ID NO: 33305 - protein, 221 aa, Artificial Sequence
  Synthetic polypeptide
CMAFPLLALILSPAALRRGAFRHDCKSPEASPAMWNCLLETEPLQGTDEDAVASADFSSMLSEEEKEELKAELVQLEDEITTLRQVLSAKERHLVEIKQKLGMNLMNELKQNFSKSWHDMQTTTAYKKTHETLSHAGQKATAAFSNVGTAISKKFGDMRNSPTFKSFEERVETTVTSLKTKVGGTNPNGGSFEEVLSSTAHASAQSLAGGSRRTKEEELQC

SEQ ID NO: 33306 - protein, 196 aa, Artificial Sequence
  Synthetic polypeptide
CMAFPLLALILSPAALRRGAFRHDCKSPEASPAMWNCLLETEPLQGTDEDAVASADFSSMLSEEEKEELKAELVQLEDEITTLRQVLSAKERHLVEIKQKLGMNLMNELKQNFSKSWHDMQTTTAYKKTHETLSHAGQKATAAFSNVGTAISKKFGDMSYSIRHSISMPAMRNSPTFKSFEERVETTVTSLKVQMK

SEQ ID NO: 33307 - protein, 83 aa, Artificial Sequence
  Synthetic polypeptide
IANFEAAVENMVTVGKTILERNNFTDFTNVRMGFHMPPFCSISHLHLHVLAPVDQLGFLSKLVYRVNSYWFITADHLIEKLRT

SEQ ID NO: 33308 - protein, 11 aa, Artificial Sequence
  Synthetic polypeptide
MLILKQLLRTW

SEQ ID NO: 33309 - protein, 3 aa, Artificial Sequence
  Synthetic polypeptide
SSC

SEQ ID NO: 33310 - protein, 25 aa, Artificial Sequence
  Synthetic polypeptide
AANHHGTRLPMQQTCTSCTVTILDS

SEQ ID NO: 33311 - protein, 232 aa, Artificial Sequence
  Synthetic polypeptide
SEQQTTMAHVYLCNKPAHPAQSPFWILSIPSEDIARNLMKRTVCAKSIFELWGHGQSPEELYSSLKNYPVEKMVPFLHSDSTYKIKIHTFNKTLTQEEKIKRIDALEFLPFEGKVNLKKPQHVFSVLEDYGLDPNCIPENPHNIYFGRWIADGQRELIESYSVKKRHFIGNTSMDAGLSFIMANHGKVKENDIVFDPFVGTGGLLIACAHFGAYVYGTDIDYNTVHGLACST

SEQ ID NO: 33312 - protein, 49 aa, Artificial Sequence
  Synthetic polypeptide
WMLGLIPRRWVDLSSKPPWHTFTYATNLHILHSHHFGFLAFPLKILQEI

SEQ ID NO: 33313 - protein, 438 aa, Artificial Sequence
  Synthetic polypeptide
SEQQTTMAHVYLCNKPAHPAQSPFWILSIPSEDIARNLMKRTVCAKSIFELWGHGQSPEELYSSLKNYPVEKMVPFLHSDSTYKIKIHTFNKTLTQEEKIKRIDALEFLPFEGKVNLKKPQHVFSVLEDYGLDPNCIPENPHNIYFGRWIADGQRELIESYSVKKRHFIGNTSMDAGLSFIMANHGKVKENDIVFDPFVGTGGLLIACAHFGAYVYGTDIDYNTVHGLGKATRKNQKWRGPDENIRANLRQYGLEKYYLDVLVSDASKPSWRKGTYFDAIITDPPYGIRESTRRTGSQKEIPKGIEKWEKCPESHVPVSLSYHLSDMFLDLLNFAAETLVLGGRLVYWLPVYTPEYTEEMVPWHPCLELVSNCEQKLSSHTSRRLITMEKVKKFENRDQYSHLLSDHFLPYQGHNSFREKYFSGVTKRIAKEEKSTQE

SEQ ID NO: 33314 - protein, 57 aa, Artificial Sequence
  Synthetic polypeptide
SEQQTTMAHVYLCNKPAHPAQSPFWILSIPSEDIARNLMKRTVCAKFHFYIRTLHIK

SEQ ID NO: 33315 - protein, 433 aa, Artificial Sequence
  Synthetic polypeptide
SEQQTTMAHVYLCNKPAHPAQSPFWILSIPSEDIARNLMKRTVCAKSIFELWGHGQSPEELYSSLKNYPVEKMVPFLHSDSTYKIKIHTFNKTLTQEEKIKRIDALEFLPFEGKVNLKKPQHVFSVLEDYGLDPNCIPENPHNIYFGRWIADGQRELIESYSVKKRHFIGNTSMDAGLSFIMANHGKVKENDIVFDPFVGTGGLLIACAHFGAYVYGTDIDYNTVHGLGKATRKNQKWRGPDENIRANLRQYGLEKYYLDVLVSDASKPSWRKGTYFDAIITDPPYGIRESTRRTGSQKEIPKGIEKWEKCPESHVPVSLSYHLSDMFLDLLNFAAETLVLGGRLVYWLPVYTPEYTEEMVPWHPCLELVSNCEQKLSSHTSRRLITMEKNRDQYSHLLSDHFLPYQGHNSFREKYFSGVTKRIAKEEKSTQE

SEQ ID NO: 33316 - protein, 205 aa, Artificial Sequence
  Synthetic polypeptide
SEQQTTMAHVYLCNKPAHPAQSPFWILSIPSEDIARNLMKRTVCAKSIFELWGHGQSPEELYSSLKNYPVEKMVPFLHSDSTYKIKIHTFNKTLTQEEKIKRIDALEFLPFEGKVNLKKPQHVFSVLEDYGLDPNCIPENPHNIYFGRWIADGQRELIESYSVKKRHFIGNTSMDAGLSFIMANHGKVKENDIVFDPFVGTAVYL

SEQ ID NO: 33317 - protein, 73 aa, Artificial Sequence
  Synthetic polypeptide
SEQQTTMAHVYLCNKPAHPAQSPFWILSIPSEDIARNLMKRTVCAKSIFELWGHGQSPEELYSSLKNYPVEKM

SEQ ID NO: 33318 - protein, 23 aa, Artificial Sequence
  Synthetic polypeptide
GWAWWLTPVIPALWEAKKWRKVF

SEQ ID NO: 33319 - protein, 34 aa, Artificial Sequence
  Synthetic polypeptide
SQHFGKPRNGEKSFEDSLSVWKDKIATSNRIVTL

SEQ ID NO: 33320 - protein, 318 aa, Artificial Sequence
  Synthetic polypeptide
MGVVAHTCNPSTLGSQEMAKSLLKTASLSGRTKLLHQTGLSLYSTSHGFYEEEVKKTLQQFPGGSIDLQKEDNGIGILTLNNPSRMNAFSGVMMLQLLEKVIELENWTEGKGLIVRGAKNTFSSGSDLNAVKSLGTPEDGMAVCMFMQNTLTRFMRLPLISVALVQGWALGGGAEFTTACDFRLMTPESKIRFVHKEMGIIPSWGGTTRLVEIIGSRQALKVLSGALKLDSKNALNIGMVEEVLQSSDETKSLEEAQEWLKQFIQGPPEVIRALKKSVCSGRELYLEEALQNERDLLGTVWGGPANLEAIAKKGKFNK

SEQ ID NO: 33321 - protein, 340 aa, Artificial Sequence
  Synthetic polypeptide
PKTLLRAIIFPRQAAEQSGGSSGHGAAALCGTHCSNQAEMAKSLLKTASLSGRTKLLHQTGLSLYSTSHGFYEEEVKKTLQQFPGGSIDLQKEDNGIGILTLNNPSRMNAFSGVMMLQLLEKVIELENWTEGKGLIVRGAKNTFSSGSDLNAVKSLGTPEDGMAVCMFMQNTLTRFMRLPLISVALVQGWALGGGAEFTTACDFRLMTPESKIRFVHKEMGIIPSWGGTTRLVEIIGSRQALKVLSGALKLDSKNALNIGMVEEVLQSSDETKSLEEAQEWLKQFIQGPPEVIRALKKSVCSGRELYLEEALQNERDLLGTVWGGPANLEAIAKKGKFNK

SEQ ID NO: 33322 - protein, 39 aa, Artificial Sequence
  Synthetic polypeptide
EPSSFPGRQQSKVEDQVAMVLLPCVGPTAPTKQKWRKVF

SEQ ID NO: 33323 - protein, 72 aa, Artificial Sequence
  Synthetic polypeptide
HYRAITLTKDSFKSHHLSPAGSRAKWRIKWPWCCCLVWDPLLQPSRNGEKSFEDSLSVWKDKIATSNRIVTL

SEQ ID NO: 33324 - protein, 9 aa, Artificial Sequence
  Synthetic polypeptide
FWTSQLLEL

SEQ ID NO: 33325 - protein, 4 aa, Artificial Sequence
  Synthetic polypeptide
NCNI

SEQ ID NO: 33326 - protein, 1321 aa, Artificial Sequence
  Synthetic polypeptide
THHVKTQHFSSLRMQQQVTILEAESSLHQTTKPASALILDFAASRTVIFEAEVSGGRSGYIAIDDIQVLSYPCDKSPHFLRLGDVEVNAGQNATFQCIATGRDAVHNKLWLQRRNGEDIPVAQTKNINHRRFAASFRLQEVTKTDQDLYRCVTQSERGSGVSNFAQLIVREPPRPIAPPQLLGVGPTYLLIQLNANSIIGDGPIILKEVEYRMTSGSWTETHAVNAPTYKLWHLDPDTEYEIRVLLTRPGEGGTGLPGPPLITRTKCAEPMRTPKTLKIAEIQARRIAVDWESLGYNITRCHTFNVTICYHYFRGHNESKADCLDMDPKAPQHVVNHLPPYTNVSLKMILTNPEGRKESEETIIQTDEDVPGPVPVKSLQGTSFENKIFLNWKEPLDPNGIITQYEISYSSIRSFDPAVPVAGPPQTVSNLWNSTHHVFMHLHPGTTYQFFIRASTVKGFGPATAINVTTNISAPTLPDYEGVDASLNETATTITVLLRPAQAKGAPISAYQIVVEELHPHRTKREAGAMECYQVPVTYQNAMSGGAPYYFAAELPPGNLPEPAPFTVGDNRTYQGFWNPPLAPRKGYNIYFQAMSSVEKETKTQCVRIATKAAATEEPEVIPDPAKQTDRVVKIAGISAGILVFILLLLVVILIVKKSKLAKKRKDAMGNTRQEMTHMVNAMDRSYADQSTLHAEDPLSITFMDQHNFSPRYENHSATAESSRLLDVPRYLCEGTESPYQTGQLHPAIRVADLLQHINLMKTSDSYGFKEEYESFFEGQSASWDVAKKDQNRAKNRYGNIIAYDHSRVILQPVEDDPSSDYINANYIDGYQRPSHYIATQGPVHETVYDFWRMIWQEQSACIVMVTNLVEVGRVKCYKYWPDDTEVYGDFKVTCVEMEPLAEYVVRTFTLERRGYNEIREVKQFHFTGWPDHGVPYHATGLLSFIRRVKLSNPPSAGPIVVHCSAGAGRTGCYIVIDIMLDMAEREGVVDIYNCVKALRSRRINMVQTEEQYIFIHDAILEACLCGETAIPVCEFKAAYFDMIRIDSQTNSSHLKDEFQTLNSVTPRLQAEDCSIACLPRNHDKNRFMDMLPPDRCLPFLITIDGESSNYINAALMDSYRQPAAFIVTQYPLPNTVKDFWRLVYDYGCTSIVMLNEVDLSQGCPQYWPEEGMLRYGPIQVECMSCSMDCDVINRIFRICNLTRPQEGYLMVQQFQYLGWASHREVPGSKRSFLKLILQVEKWQEECEEGEGRTIIHCLNGGGRSGMFCAIGIVVEMVKRQNVVDVFHAVKTLRNSKPNMVEAPEQYRFCYDVALEYLESS

SEQ ID NO: 33327 - protein, 1338 aa, Artificial Sequence
  Synthetic polypeptide
THHVKTQHFSSLRMQQQVTILEAESSLHQTTKPASALILDFAASRTVIFEAEVSGGRSGYIAIDDIQVLSYPCDKSPHFLRLGDVEVNAGQNATFQCIATGRDAVHNKLWLQRRNGEDIPVAQTKNINHRRFAASFRLQEVTKTDQDLYRCVTQSERGSGVSNFAQLIVREPPRPIAPPQLLGVGPTYLLIQLNANSIIGDGPIILKEVEYRMTSGSWTETHAVNAPTYKLWHLDPDTEYEIRVLLTRPGEGGTGLPGPPLITRTKCAEPMRTPKTLKIAEIQARRIAVDWESLGYNITRCHTFNVTICYHYFRGHNESKADCLDMDPKAPQHVVNHLPPYTNVSLKMILTNPEGRKESEETIIQTDEDVPGPVPVKSLQGTSFENKIFLNWKEPLDPNGIITQYEISYSSIRSFDPAVPVAGPPQTVSNLWNSTHHVFMHLHPGTTYQFFIRASTVKGFGPATAINVTTNISAPTLPDYEGVDASLNETATTITVLLRPAQAKGAPISAYQIVVEELHPHRTKREAGAMECYQVPVTYQNAMSGGAPYYFAAELPPGNLPEPAPFTVGDNRTYQGFWNPPLAPRKGYNIYFQAMSSVEKETKTQCVRIATKAAATEEPEVIPDPAKQTDRVVKIAGISAGILVFILLLLVVILIVKKSKLAKKRKDAMGNTRQEMTHMVNAMDRSYADQSTLHAEDPLSITFMDQHNFSPRLPNDPLVPTAVLDENHSATAESSRLLDVPRYLCEGTESPYQTGQLHPAIRVADLLQHINLMKTSDSYGFKEEYESFFEGQSASWDVAKKDQNRAKNRYGNIIAYDHSRVILQPVEDDPSSDYINANYIDVSIFIGYQRPSHYIATQGPVHETVYDFWRMIWQEQSACIVMVTNLVEVGRVKCYKYWPDDTEVYGDFKVTCVEMEPLAEYVVRTFTLERRGYNEIREVKQFHFTGWPDHGVPYHATGLLSFIRRVKLSNPPSAGPIVVHCSAGAGRTGCYIVIDIMLDMAEREGVVDIYNCVKALRSRRINMVQTEEQYIFIHDAILEACLCGETAIPVCEFKAAYFDMIRIDSQTNSSHLKDEFQTLNSVTPRLQAEDCSIACLPRNHDKNRFMDMLPPDRCLPFLITIDGESSNYINAALMDSYRQPAAFIVTQYPLPNTVKDFWRLVYDYGCTSIVMLNEVDLSQGCPQYWPEEGMLRYGPIQVECMSCSMDCDVINRIFRICNLTRPQEGYLMVQQFQYLGWASHREVPGSKRSFLKLILQVEKWQEECEEGEGRTIIHCLNGGGRSGMFCAIGIVVEMVKRQNVVDVFHAVKTLRNSKPNMVEAPEQYRFCYDVALEYLESS

SEQ ID NO: 33328 - protein, 1343 aa, Artificial Sequence
  Synthetic polypeptide
THHVKTQHFSSLRMQQQVTILEAESSLHQTTKPASALILDFAASRTVIFEAEVSGGRSGYIAIDDIQVLSYPCDKSPHFLRLGDVEVNAGQNATFQCIATGRDAVHNKLWLQRRNGEDIPVAQTKNINHRRFAASFRLQEVTKTDQDLYRCVTQSERGSGVSNFAQLIVREPPRPIAPPQLLGVGPTYLLIQLNANSIIGDGPIILKEVEYRMTSGSWTETHAVNAPTYKLWHLDPDTEYEIRVLLTRPGEGGTGLPGPPLITRTKCAEPMRTPKTLKIAEIQARRIAVDWESLGYNITRCHTFNVTICYHYFRGHNESKADCLDMDPKAPQHVVNHLPPYTNVSLKMILTNPEGRKESEETIIQTDEDVPGPVPVKSLQGTSFENKIFLNWKEPLDPNGIITQYEISYSSIRSFDPAVPVAGPPQTVSNLWNSTHHVFMHLHPGTTYQFFIRASTVKGFGPATAINVTTNISAPTLPDYEGVDASLNETATTITVLLRPAQAKGAPISAYQIVVEELHPHRTKREAGAMECYQVPVTYQNAMSGGAPYYFAAELPPGNLPEPAPFTVGDNRTYQGFWNPPLAPRKGYNIYFQAMSSVEKETKTQCVRIATKAAATEEPEVIPDPAKQTDRVVKIAGISAGILVFILLLLVVILIVKKSKLAKKRKDAMGNTRQEMTHMVNAMDRSYADQSTLHAEDPLSITFMDQHNFSPRLPNDPLVPTAVLVPITDENHSATAESSRLLDVPRYLCEGTESPYQTGQLHPAIRVADLLQHINLMKTSDSYGFKEEYESFFEGQSASWDVAKKDQNRAKNRYGNIIAYDHSRVILQPVEDDPSSDYINANYIDIWLYRDGYQRPSHYIATQGPVHETVYDFWRMIWQEQSACIVMVTNLVEVGRVKCYKYWPDDTEVYGDFKVTCVEMEPLAEYVVRTFTLERRGYNEIREVKQFHFTGWPDHGVPYHATGLLSFIRRVKLSNPPSAGPIVVHCSAGAGRTGCYIVIDIMLDMAEREGVVDIYNCVKALRSRRINMVQTEEQYIFIHDAILEACLCGETAIPVCEFKAAYFDMIRIDSQTNSSHLKDEFQTLNSVTPRLQAEDCSIACLPRNHDKNRFMDMLPPDRCLPFLITIDGESSNYINAALMDSYRQPAAFIVTQYPLPNTVKDFWRLVYDYGCTSIVMLNEVDLSQGCPQYWPEEGMLRYGPIQVECMSCSMDCDVINRIFRICNLTRPQEGYLMVQQFQYLGWASHREVPGSKRSFLKLILQVEKWQEECEEGEGRTIIHCLNGGGRSGMFCAIGIVVEMVKRQNVVDVFHAVKTLRNSKPNMVEAPEQYRFCYDVALEYLESS

SEQ ID NO: 33329 - protein, 1327 aa, Artificial Sequence
  Synthetic polypeptide
THHVKTQHFSSLRMQQQVTILEAESSLHQTTKPASALILDFAASRTVIFEAEVSGGRSGYIAIDDIQVLSYPCDKSPHFLRLGDVEVNAGQNATFQCIATGRDAVHNKLWLQRRNGEDIPVAQTKNINHRRFAASFRLQEVTKTDQDLYRCVTQSERGSGVSNFAQLIVREPPRPIAPPQLLGVGPTYLLIQLNANSIIGDGPIILKEVEYRMTSGSWTETHAVNAPTYKLWHLDPDTEYEIRVLLTRPGEGGTGLPGPPLITRTKCAEPMRTPKTLKIAEIQARRIAVDWESLGYNITRCHTFNVTICYHYFRGHNESKADCLDMDPKAPQHVVNHLPPYTNVSLKMILTNPEGRKESEETIIQTDEDVPGPVPVKSLQGTSFENKIFLNWKEPLDPNGIITQYEISYSSIRSFDPAVPVAGPPQTVSNLWNSTHHVFMHLHPGTTYQFFIRASTVKGFGPATAINVTTNISAPTLPDYEGVDASLNETATTITVLLRPAQAKGAPISAYQIVVEELHPHRTKREAGAMECYQVPVTYQNAMSGGAPYYFAAELPPGNLPEPAPFTVGDNRTYQGFWNPPLAPRKGYNIYFQAMSSVEKETKTQCVRIATKAAATEEPEVIPDPAKQTDRVVKIAGISAGILVFILLLLVVILIVKKSKLAKKRKDAMGNTRQEMTHMVNAMDRSYADQSTLHAEDPLSITFMDQHNFSPRYENHSATAESSRLLDVPRYLCEGTESPYQTGQLHPAIRVADLLQHINLMKTSDSYGFKEEYESFFEGQSASWDVAKKDQNRAKNRYGNIIAYDHSRVILQPVEDDPSSDYINANYIDIWLYRDGYQRPSHYIATQGPVHETVYDFWRMIWQEQSACIVMVTNLVEVGRVKCYKYWPDDTEVYGDFKVTCVEMEPLAEYVVRTFTLERRGYNEIREVKQFHFTGWPDHGVPYHATGLLSFIRRVKLSNPPSAGPIVVHCSAGAGRTGCYIVIDIMLDMAEREGVVDIYNCVKALRSRRINMVQTEEQYIFIHDAILEACLCGETAIPVCEFKAAYFDMIRIDSQTNSSHLKDEFQTLNSVTPRLQAEDCSIACLPRNHDKNRFMDMLPPDRCLPFLITIDGESSNYINAALMDSYRQPAAFIVTQYPLPNTVKDFWRLVYDYGCTSIVMLNEVDLSQGCPQYWPEEGMLRYGPIQVECMSCSMDCDVINRIFRICNLTRPQEGYLMVQQFQYLGWASHREVPGSKRSFLKLILQVEKWQEECEEGEGRTIIHCLNGGGRSGMFCAIGIVVEMVKRQNVVDVFHAVKTLRNSKPNMVEAPEQYRFCYDVALEYLESS

SEQ ID NO: 33330 - protein, 1339 aa, Artificial Sequence
  Synthetic polypeptide
THHVKTQHFSSLRMQQQVTILEAESSLHQTTKPASALILDFAASRTVIFEAEVSGGRSGYIAIDDIQVLSYPCDKSPHFLRLGDVEVNAGQNATFQCIATGRDAVHNKLWLQRRNGEDIPVAQTKNINHRRFAASFRLQEVTKTDQDLYRCVTQSERGSGVSNFAQLIVREPPRPIAPPQLLGVGPTYLLIQLNANSIIGDGPIILKEVEYRMTSGSWTETHAVNAPTYKLWHLDPDTEYEIRVLLTRPGEGGTGLPGPPLITRTKCAEPMRTPKTLKIAEIQARRIAVDWESLGYNITRCHTFNVTICYHYFRGHNESKADCLDMDPKAPQHVVNHLPPYTNVSLKMILTNPEGRKESEETIIQTDEDVPGPVPVKSLQGTSFENKIFLNWKEPLDPNGIITQYEISYSSIRSFDPAVPVAGPPQTVSNLWNSTHHVFMHLHPGTTYQFFIRASTVKGFGPATAINVTTNISAPTLPDYEGVDASLNETATTITVLLRPAQAKGAPISAYQIVVEELHPHRTKREAGAMECYQVPVTYQNAMSGGAPYYFAAELPPGNLPEPAPFTVGDNRTYQGFWNPPLAPRKGYNIYFQAMSSVEKETKTQCVRIATKAAATEEPEVIPDPAKQTDRVVKIAGISAGILVFILLLLVVILIVKKSKLAKKRKDAMGNTRQEMTHMVNAMDRSYADQSTLHAEDPLSITFMDQHNFSPRLPNDPLVPTAVLDENHSATAESSRLLDVPRYLCEGTESPYQTGQLHPAIRVADLLQHINLMKTSDSYGFKEEYESFFEGQSASWDVAKKDQNRAKNRYGNIIAYDHSRVILQPVEDDPSSDYINANYIDIWLYRDGYQRPSHYIATQGPVHETVYDFWRMIWQEQSACIVMVTNLVEVGRVKCYKYWPDDTEVYGDFKVTCVEMEPLAEYVVRTFTLERRGYNEIREVKQFHFTGWPDHGVPYHATGLLSFIRRVKLSNPPSAGPIVVHCSAGAGRTGCYIVIDIMLDMAEREGVVDIYNCVKALRSRRINMVQTEEQYIFIHDAILEACLCGETAIPVCEFKAAYFDMIRIDSQTNSSHLKDEFQTLNSVTPRLQAEDCSIACLPRNHDKNRFMDMLPPDRCLPFLITIDGESSNYINAALMDSYRQPAAFIVTQYPLPNTVKDFWRLVYDYGCTSIVMLNEVDLSQGCPQYWPEEGMLRYGPIQVECMSCSMDCDVINRIFRICNLTRPQEGYLMVQQFQYLGWASHREVPGSKRSFLKLILQVEKWQEECEEGEGRTIIHCLNGGGRSGMFCAIGIVVEMVKRQNVVDVFHAVKTLRNSKPNMVEAPEQYRFCYDVALEYLESS

SEQ ID NO: 33331 - protein, 1320 aa, Artificial Sequence
  Synthetic polypeptide
THHVKTQHFSSLRMQQQVTILEAESSLHQTTKPASALILDFAASRTVIFEAEVSGGRSGYIAIDDIQVLSYPCDKSPHFLRLGDVEVNAGQNATFQCIATGRDAVHNKLWLQRRNGEDIPVAQTKNINHRRFAASFRLQEVTKTDQDLYRCVTQSERGSGVSNFAQLIVREPPRPIAPPQLLGVGPTYLLIQLNANSIIGDGPIILKEVEYRMTSGSWTETHAVNAPTYKLWHLDPDTEYEIRVLLTRPGEGGTGLPGPPLITRTKCAEPMRTPKTLKIAEIQARRIAVDWESLGYNITRCHTFNVTICYHYFRGHNESKADCLDMDPKAPQHVVNHLPPYTNVSLKMILTNPEGRKESEETIIQTDEDVPGPVPVKSLQGTSFENKIFLNWKEPLDPNGIITQYEISYSSIRSFDPAVPVAGPPQTVSNLWNSTHHVFMHLHPGTTYQFFIRASTVKGFGPATAINVTTNISAPTLPDYEGVDASLNETATTITVLLRPAQAKGAPISAYQIVVEELHPHRTKREAGAMECYQVPVTYQNAMSGGAPYYFAAELPPGNLPEPAPFTVGDNRTYQGFWNPPLAPRKGYNIYFQAMSSVEKETKTQCVRIATKAATEEPEVIPDPAKQTDRVVKIAGISAGILVFILLLLVVILIVKKSKLAKKRKDAMGNTRQEMTHMVNAMDRSYADQSTLHAEDPLSITFMDQHNFSPRYENHSATAESSRLLDVPRYLCEGTESPYQTGQLHPAIRVADLLQHINLMKTSDSYGFKEEYESFFEGQSASWDVAKKDQNRAKNRYGNIIAYDHSRVILQPVEDDPSSDYINANYIDGYQRPSHYIATQGPVHETVYDFWRMIWQEQSACIVMVTNLVEVGRVKCYKYWPDDTEVYGDFKVTCVEMEPLAEYVVRTFTLERRGYNEIREVKQFHFTGWPDHGVPYHATGLLSFIRRVKLSNPPSAGPIVVHCSAGAGRTGCYIVIDIMLDMAEREGVVDIYNCVKALRSRRINMVQTEEQYIFIHDAILEACLCGETAIPVCEFKAAYFDMIRIDSQTNSSHLKDEFQTLNSVTPRLQAEDCSIACLPRNHDKNRFMDMLPPDRCLPFLITIDGESSNYINAALMDSYRQPAAFIVTQYPLPNTVKDFWRLVYDYGCTSIVMLNEVDLSQGCPQYWPEEGMLRYGPIQVECMSCSMDCDVINRIFRICNLTRPQEGYLMVQQFQYLGWASHREVPGSKRSFLKLILQVEKWQEECEEGEGRTIIHCLNGGGRSGMFCAIGIVVEMVKRQNVVDVFHAVKTLRNSKPNMVEAPEQYRFCYDVALEYLESS

SEQ ID NO: 33332 - protein, 1353 aa, Artificial Sequence
  Synthetic polypeptide
THHVKTQHFSSLRMQQQVTILEAESSLHQTTKPASALILDFAASRTVIFEAEVSGGRSGYIAIDDIQVLSYPCDKSPHFLRLGDVEVNAGQNATFQCIATGRDAVHNKLWLQRRNGEDIPVAQTKNINHRRFAASFRLQEVTKTDQDLYRCVTQSERGSGVSNFAQLIVREPPRPIAPPQLLGVGPTYLLIQLNANSIIGDGPIILKEVEYRMTSGSWTETHAVNAPTYKLWHLDPDTEYEIRVLLTRPGEGGTGLPGPPLITRTKCAEPMRTPKTLKIAEIQARRIAVDWESLGYNITRCHTFNVTICYHYFRGHNESKADCLDMDPKAPQHVVNHLPPYTNVSLKMILTNPEGRKESEETIIQTDEDVPGPVPVKSLQGTSFENKIFLNWKEPLDPNGIITQYEISYSSIRSFDPAVPVAGPPQTVSNLWNSTHHVFMHLHPGTTYQFFIRASTVKGFGPATAINVTTNISAPTLPDYEGVDASLNETATTITVLLRPAQAKGAPISAYQIVVEELHPHRTKREAGAMECYQVPVTYQNAMSGGAPYYFAAELPPGNLPEPAPFTVGDNRTYQGFWNPPLAPRKGYNIYFQAMSSVEKETKTQCVRIATKAAATEEPEVIPDPAKQTDRVVKIAGISAGILVFILLLLVVILIVKKRRSYYSYSYYLKLAKKRKDAMGNTRQEMTHMVNAMDRSYADQSTLHAEDPLSITFMDQHNFSPRLPNDPLVPTAVLVPITDENHSATAESSRLLDVPRYLCEGTESPYQTGQLHPAIRVADLLQHINLMKTSDSYGFKEEYESFFEGQSASWDVAKKDQNRAKNRYGNIIAYDHSRVILQPVEDDPSSDYINANYIDIWLYRDGYQRPSHYIATQGPVHETVYDFWRMIWQEQSACIVMVTNLVEVGRVKCYKYWPDDTEVYGDFKVTCVEMEPLAEYVVRTFTLERRGYNEIREVKQFHFTGWPDHGVPYHATGLLSFIRRVKLSNPPSAGPIVVHCSAGAGRTGCYIVIDIMLDMAEREGVVDIYNCVKALRSRRINMVQTEEQYIFIHDAILEACLCGETAIPVCEFKAAYFDMIRIDSQTNSSHLKDEFQTLNSVTPRLQAEDCSIACLPRNHDKNRFMDMLPPDRCLPFLITIDGESSNYINAALMDSYRQPAAFIVTQYPLPNTVKDFWRLVYDYGCTSIVMLNEVDLSQGCPQYWPEEGMLRYGPIQVECMSCSMDCDVINRIFRICNLTRPQEGYLMVQQFQYLGWASHREVPGSKRSFLKLILQVEKWQEECEEGEGRTIIHCLNGGGRSGMFCAIGIVVEMVKRQNVVDVFHAVKTLRNSKPNMVEAPEQYRFCYDVALEYLESS

SEQ ID NO: 33333 - protein, 49 aa, Artificial Sequence
  Synthetic polypeptide
THHVKTQHFSSLRMQQQVTILEAESSLHQTTKPASALILDFAASRTVIF

SEQ ID NO: 33334 - protein, 96 aa, Artificial Sequence
  Synthetic polypeptide
MGLMRSDVFFFKKVVSLHKLSLPAAIHVRHNLLLLAFCHYYEASLATWNCMSIEPLFLHNLPSLRFLYDSGLFRSRPWRKSQTSAAYNEGERHSLH

SEQ ID NO: 33335 - protein, 1385 aa, Artificial Sequence
  Synthetic polypeptide
PRGTVCPLNPFSCIIYPASGSYMIVDSSDHDPGEKARLQLPTMKENDTHCIDFSYLLYSQKGLNPGTLNILVRVNKGPLANPIWNVTGFTGRDWLRAELAVSTFWPNEYQVIFEAEVSGGRSGYIAIDDIQVLSYPCDKSPHFLRLGDVEVNAGQNATFQCIATGRDAVHNKLWLQRRNGEDIPVAQTKNINHRRFAASFRLQEVTKTDQDLYRCVTQSERGSGVSNFAQLIVREPPRPIAPPQLLGVGPTYLLIQLNANSIIGDGPIILKEVEYRMTSGSWTETHAVNAPTYKLWHLDPDTEYEIRVLLTRPGEGGTGLPGPPLITRTKCAEPMRTPKTLKIAEIQARRIAVDWESLGYNITRCHTFNVTICYHYFRGHNESKADCLDMDPKAPQHVVNHLPPYTNVSLKMILTNPEGRKESEETIIQTDEDVPGPVPVKSLQGTSFENKIFLNWKEPLDPNGIITQYEISYSSIRSFDPAVPVAGPPQTVSNLWNSTHHVFMHLHPGTTYQFFIRASTVKGFGPATAINVTTNISAPTLPDYEGVDASLNETATTITVLLRPAQAKGAPISAYQIVVEELHPHRTKREAGAMECYQVPVTYQNAMSGGAPYYFAAELPPGNLPEPAPFTVGDNRTYQGFWNPPLAPRKGYNIYFQAMSSVEKETKTQCVRIATKAAATEEPEVIPDPAKQTDRVVKIAGISAGILVFILLLLVVILIVKKSKLAKKRKDAMGNTRQEMTHMVNAMDRSYADQSTLHAEDPLSITFMDQHNFSPRYENHSATAESSRLLDVPRYLCEGTESPYQTGQLHPAIRVADLLQHINLMKTSDSYGFKEEYESFFEGQSASWDVAKKDQNRAKNRYGNIIAYDHSRVILQPVEDDPSSDYINANYIDGYQRPSHYIATQGPVHETVYDFWRMIWQEQSACIVMVTNLVEVGRVKCYKYWPDDTEVYGDFKVTCVEMEPLAEYVVRTFTLERRGYNEIREVKQFHFTGWPDHGVPYHATGLLSFIRRVKLSNPPSAGPIVVHCSAGAGRTGCYIVIDIMLDMAEREGVVDIYNCVKALRSRRINMVQTEEQYIFIHDAILEACLCGETAIPVCEFKAAYFDMIRIDSQTNSSHLKDEFQTLNSVTPRLQAEDCSIACLPRNHDKNRFMDMLPPDRCLPFLITIDGESSNYINAALMDSYRQPAAFIVTQYPLPNTVKDFWRLVYDYGCTSIVMLNEVDLSQGCPQYWPEEGMLRYGPIQVECMSCSMDCDVINRIFRICNLTRPQEGYLMVQQFQYLGWASHREVPGSKRSFLKLILQVEKWQEECEEGEGRTIIHCLNGGGRSGMFCAIGIVVEMVKRQNVVDVFHAVKTLRNSKPNMVEAPEQYRFCYDVALEYLESS

SEQ ID NO: 33336 - protein, 8 aa, Artificial Sequence
  Synthetic polypeptide
FTQPQVPI

SEQ ID NO: 33337 - protein, 1402 aa, Artificial Sequence
  Synthetic polypeptide
PRGTVCPLNPFSCIIYPASGSYMIVDSSDHDPGEKARLQLPTMKENDTHCIDFSYLLYSQKGLNPGTLNILVRVNKGPLANPIWNVTGFTGRDWLRAELAVSTFWPNEYQVIFEAEVSGGRSGYIAIDDIQVLSYPCDKSPHFLRLGDVEVNAGQNATFQCIATGRDAVHNKLWLQRRNGEDIPVAQTKNINHRRFAASFRLQEVTKTDQDLYRCVTQSERGSGVSNFAQLIVREPPRPIAPPQLLGVGPTYLLIQLNANSIIGDGPIILKEVEYRMTSGSWTETHAVNAPTYKLWHLDPDTEYEIRVLLTRPGEGGTGLPGPPLITRTKCAEPMRTPKTLKIAEIQARRIAVDWESLGYNITRCHTFNVTICYHYFRGHNESKADCLDMDPKAPQHVVNHLPPYTNVSLKMILTNPEGRKESEETIIQTDEDVPGPVPVKSLQGTSFENKIFLNWKEPLDPNGIITQYEISYSSIRSFDPAVPVAGPPQTVSNLWNSTHHVFMHLHPGTTYQFFIRASTVKGFGPATAINVTTNISAPTLPDYEGVDASLNETATTITVLLRPAQAKGAPISAYQIVVEELHPHRTKREAGAMECYQVPVTYQNAMSGGAPYYFAAELPPGNLPEPAPFTVGDNRTYQGFWNPPLAPRKGYNIYFQAMSSVEKETKTQCVRIATKAAATEEPEVIPDPAKQTDRVVKIAGISAGILVFILLLLVVILIVKKSKLAKKRKDAMGNTRQEMTHMVNAMDRSYADQSTLHAEDPLSITFMDQHNFSPRLPNDPLVPTAVLDENHSATAESSRLLDVPRYLCEGTESPYQTGQLHPAIRVADLLQHINLMKTSDSYGFKEEYESFFEGQSASWDVAKKDQNRAKNRYGNIIAYDHSRVILQPVEDDPSSDYINANYIDVSIFIGYQRPSHYIATQGPVHETVYDFWRMIWQEQSACIVMVTNLVEVGRVKCYKYWPDDTEVYGDFKVTCVEMEPLAEYVVRTFTLERRGYNEIREVKQFHFTGWPDHGVPYHATGLLSFIRRVKLSNPPSAGPIVVHCSAGAGRTGCYIVIDIMLDMAEREGVVDIYNCVKALRSRRINMVQTEEQYIFIHDAILEACLCGETAIPVCEFKAAYFDMIRIDSQTNSSHLKDEFQTLNSVTPRLQAEDCSIACLPRNHDKNRFMDMLPPDRCLPFLITIDGESSNYINAALMDSYRQPAAFIVTQYPLPNTVKDFWRLVYDYGCTSIVMLNEVDLSQGCPQYWPEEGMLRYGPIQVECMSCSMDCDVINRIFRICNLTRPQEGYLMVQQFQYLGWASHREVPGSKRSFLKLILQVEKWQEECEEGEGRTIIHCLNGGGRSGMFCAIGIVVEMVKRQNVVDVFHAVKTLRNSKPNMVEAPEQYRFCYDVALEYLESS

SEQ ID NO: 33338 - protein, 1407 aa, Artificial Sequence
  Synthetic polypeptide
PRGTVCPLNPFSCIIYPASGSYMIVDSSDHDPGEKARLQLPTMKENDTHCIDFSYLLYSQKGLNPGTLNILVRVNKGPLANPIWNVTGFTGRDWLRAELAVSTFWPNEYQVIFEAEVSGGRSGYIAIDDIQVLSYPCDKSPHFLRLGDVEVNAGQNATFQCIATGRDAVHNKLWLQRRNGEDIPVAQTKNINHRRFAASFRLQEVTKTDQDLYRCVTQSERGSGVSNFAQLIVREPPRPIAPPQLLGVGPTYLLIQLNANSIIGDGPIILKEVEYRMTSGSWTETHAVNAPTYKLWHLDPDTEYEIRVLLTRPGEGGTGLPGPPLITRTKCAEPMRTPKTLKIAEIQARRIAVDWESLGYNITRCHTFNVTICYHYFRGHNESKADCLDMDPKAPQHVVNHLPPYTNVSLKMILTNPEGRKESEETIIQTDEDVPGPVPVKSLQGTSFENKIFLNWKEPLDPNGIITQYEISYSSIRSFDPAVPVAGPPQTVSNLWNSTHHVFMHLHPGTTYQFFIRASTVKGFGPATAINVTTNISAPTLPDYEGVDASLNETATTITVLLRPAQAKGAPISAYQIVVEELHPHRTKREAGAMECYQVPVTYQNAMSGGAPYYFAAELPPGNLPEPAPFTVGDNRTYQGFWNPPLAPRKGYNIYFQAMSSVEKETKTQCVRIATKAAATEEPEVIPDPAKQTDRVVKIAGISAGILVFILLLLVVILIVKKSKLAKKRKDAMGNTRQEMTHMVNAMDRSYADQSTLHAEDPLSITFMDQHNFSPRLPNDPLVPTAVLVPITDENHSATAESSRLLDVPRYLCEGTESPYQTGQLHPAIRVADLLQHINLMKTSDSYGFKEEYESFFEGQSASWDVAKKDQNRAKNRYGNIIAYDHSRVILQPVEDDPSSDYINANYIDIWLYRDGYQRPSHYIATQGPVHETVYDFWRMIWQEQSACIVMVTNLVEVGRVKCYKYWPDDTEVYGDFKVTCVEMEPLAEYVVRTFTLERRGYNEIREVKQFHFTGWPDHGVPYHATGLLSFIRRVKLSNPPSAGPIVVHCSAGAGRTGCYIVIDIMLDMAEREGVVDIYNCVKALRSRRINMVQTEEQYIFIHDAILEACLCGETAIPVCEFKAAYFDMIRIDSQTNSSHLKDEFQTLNSVTPRLQAEDCSIACLPRNHDKNRFMDMLPPDRCLPFLITIDGESSNYINAALMDSYRQPAAFIVTQYPLPNTVKDFWRLVYDYGCTSIVMLNEVDLSQGCPQYWPEEGMLRYGPIQVECMSCSMDCDVINRIFRICNLTRPQEGYLMVQQFQYLGWASHREVPGSKRSFLKLILQVEKWQEECEEGEGRTIIHCLNGGGRSGMFCAIGIVVEMVKRQNVVDVFHAVKTLRNSKPNMVEAPEQYRFCYDVALEYLESS

SEQ ID NO: 33339 - protein, 1391 aa, Artificial Sequence
  Synthetic polypeptide
PRGTVCPLNPFSCIIYPASGSYMIVDSSDHDPGEKARLQLPTMKENDTHCIDFSYLLYSQKGLNPGTLNILVRVNKGPLANPIWNVTGFTGRDWLRAELAVSTFWPNEYQVIFEAEVSGGRSGYIAIDDIQVLSYPCDKSPHFLRLGDVEVNAGQNATFQCIATGRDAVHNKLWLQRRNGEDIPVAQTKNINHRRFAASFRLQEVTKTDQDLYRCVTQSERGSGVSNFAQLIVREPPRPIAPPQLLGVGPTYLLIQLNANSIIGDGPIILKEVEYRMTSGSWTETHAVNAPTYKLWHLDPDTEYEIRVLLTRPGEGGTGLPGPPLITRTKCAEPMRTPKTLKIAEIQARRIAVDWESLGYNITRCHTFNVTICYHYFRGHNESKADCLDMDPKAPQHVVNHLPPYTNVSLKMILTNPEGRKESEETIIQTDEDVPGPVPVKSLQGTSFENKIFLNWKEPLDPNGIITQYEISYSSIRSFDPAVPVAGPPQTVSNLWNSTHHVFMHLHPGTTYQFFIRASTVKGFGPATAINVTTNISAPTLPDYEGVDASLNETATTITVLLRPAQAKGAPISAYQIVVEELHPHRTKREAGAMECYQVPVTYQNAMSGGAPYYFAAELPPGNLPEPAPFTVGDNRTYQGFWNPPLAPRKGYNIYFQAMSSVEKETKTQCVRIATKAAATEEPEVIPDPAKQTDRVVKIAGISAGILVFILLLLVVILIVKKSKLAKKRKDAMGNTRQEMTHMVNAMDRSYADQSTLHAEDPLSITFMDQHNFSPRYENHSATAESSRLLDVPRYLCEGTESPYQTGQLHPAIRVADLLQHINLMKTSDSYGFKEEYESFFEGQSASWDVAKKDQNRAKNRYGNIIAYDHSRVILQPVEDDPSSDYINANYIDIWLYRDGYQRPSHYIATQGPVHETVYDFWRMIWQEQSACIVMVTNLVEVGRVKCYKYWPDDTEVYGDFKVTCVEMEPLAEYVVRTFTLERRGYNEIREVKQFHFTGWPDHGVPYHATGLLSFIRRVKLSNPPSAGPIVVHCSAGAGRTGCYIVIDIMLDMAEREGVVDIYNCVKALRSRRINMVQTEEQYIFIHDAILEACLCGETAIPVCEFKAAYFDMIRIDSQTNSSHLKDEFQTLNSVTPRLQAEDCSIACLPRNHDKNRFMDMLPPDRCLPFLITIDGESSNYINAALMDSYRQPAAFIVTQYPLPNTVKDFWRLVYDYGCTSIVMLNEVDLSQGCPQYWPEEGMLRYGPIQVECMSCSMDCDVINRIFRICNLTRPQEGYLMVQQFQYLGWASHREVPGSKRSFLKLILQVEKWQEECEEGEGRTIIHCLNGGGRSGMFCAIGIVVEMVKRQNVVDVFHAVKTLRNSKPNMVEAPEQYRFCYDVALEYLESS

SEQ ID NO: 33340 - protein, 1403 aa, Artificial Sequence
  Synthetic polypeptide
PRGTVCPLNPFSCIIYPASGSYMIVDSSDHDPGEKARLQLPTMKENDTHCIDFSYLLYSQKGLNPGTLNILVRVNKGPLANPIWNVTGFTGRDWLRAELAVSTFWPNEYQVIFEAEVSGGRSGYIAIDDIQVLSYPCDKSPHFLRLGDVEVNAGQNATFQCIATGRDAVHNKLWLQRRNGEDIPVAQTKNINHRRFAASFRLQEVTKTDQDLYRCVTQSERGSGVSNFAQLIVREPPRPIAPPQLLGVGPTYLLIQLNANSIIGDGPIILKEVEYRMTSGSWTETHAVNAPTYKLWHLDPDTEYEIRVLLTRPGEGGTGLPGPPLITRTKCAEPMRTPKTLKIAEIQARRIAVDWESLGYNITRCHTFNVTICYHYFRGHNESKADCLDMDPKAPQHVVNHLPPYTNVSLKMILTNPEGRKESEETIIQTDEDVPGPVPVKSLQGTSFENKIFLNWKEPLDPNGIITQYEISYSSIRSFDPAVPVAGPPQTVSNLWNSTHHVFMHLHPGTTYQFFIRASTVKGFGPATAINVTTNISAPTLPDYEGVDASLNETATTITVLLRPAQAKGAPISAYQIVVEELHPHRTKREAGAMECYQVPVTYQNAMSGGAPYYFAAELPPGNLPEPAPFTVGDNRTYQGFWNPPLAPRKGYNIYFQAMSSVEKETKTQCVRIATKAAATEEPEVIPDPAKQTDRVVKIAGISAGILVFILLLLVVILIVKKSKLAKKRKDAMGNTRQEMTHMVNAMDRSYADQSTLHAEDPLSITFMDQHNFSPRLPNDPLVPTAVLDENHSATAESSRLLDVPRYLCEGTESPYQTGQLHPAIRVADLLQHINLMKTSDSYGFKEEYESFFEGQSASWDVAKKDQNRAKNRYGNIIAYDHSRVILQPVEDDPSSDYINANYIDIWLYRDGYQRPSHYIATQGPVHETVYDFWRMIWQEQSACIVMVTNLVEVGRVKCYKYWPDDTEVYGDFKVTCVEMEPLAEYVVRTFTLERRGYNEIREVKQFHFTGWPDHGVPYHATGLLSFIRRVKLSNPPSAGPIVVHCSAGAGRTGCYIVIDIMLDMAEREGVVDIYNCVKALRSRRINMVQTEEQYIFIHDAILEACLCGETAIPVCEFKAAYFDMIRIDSQTNSSHLKDEFQTLNSVTPRLQAEDCSIACLPRNHDKNRFMDMLPPDRCLPFLITIDGESSNYINAALMDSYRQPAAFIVTQYPLPNTVKDFWRLVYDYGCTSIVMLNEVDLSQGCPQYWPEEGMLRYGPIQVECMSCSMDCDVINRIFRICNLTRPQEGYLMVQQFQYLGWASHREVPGSKRSFLKLILQVEKWQEECEEGEGRTIIHCLNGGGRSGMFCAIGIVVEMVKRQNVVDVFHAVKTLRNSKPNMVEAPEQYRFCYDVALEYLESS

SEQ ID NO: 33341 - protein, 1384 aa, Artificial Sequence
  Synthetic polypeptide
PRGTVCPLNPFSCIIYPASGSYMIVDSSDHDPGEKARLQLPTMKENDTHCIDFSYLLYSQKGLNPGTLNILVRVNKGPLANPIWNVTGFTGRDWLRAELAVSTFWPNEYQVIFEAEVSGGRSGYIAIDDIQVLSYPCDKSPHFLRLGDVEVNAGQNATFQCIATGRDAVHNKLWLQRRNGEDIPVAQTKNINHRRFAASFRLQEVTKTDQDLYRCVTQSERGSGVSNFAQLIVREPPRPIAPPQLLGVGPTYLLIQLNANSIIGDGPIILKEVEYRMTSGSWTETHAVNAPTYKLWHLDPDTEYEIRVLLTRPGEGGTGLPGPPLITRTKCAEPMRTPKTLKIAEIQARRIAVDWESLGYNITRCHTFNVTICYHYFRGHNESKADCLDMDPKAPQHVVNHLPPYTNVSLKMILTNPEGRKESEETIIQTDEDVPGPVPVKSLQGTSFENKIFLNWKEPLDPNGIITQYEISYSSIRSFDPAVPVAGPPQTVSNLWNSTHHVFMHLHPGTTYQFFIRASTVKGFGPATAINVTTNISAPTLPDYEGVDASLNETATTITVLLRPAQAKGAPISAYQIVVEELHPHRTKREAGAMECYQVPVTYQNAMSGGAPYYFAAELPPGNLPEPAPFTVGDNRTYQGFWNPPLAPRKGYNIYFQAMSSVEKETKTQCVRIATKAATEEPEVIPDPAKQTDRVVKIAGISAGILVFILLLLVVILIVKKSKLAKKRKDAMGNTRQEMTHMVNAMDRSYADQSTLHAEDPLSITFMDQHNFSPRYENHSATAESSRLLDVPRYLCEGTESPYQTGQLHPAIRVADLLQHINLMKTSDSYGFKEEYESFFEGQSASWDVAKKDQNRAKNRYGNIIAYDHSRVILQPVEDDPSSDYINANYIDGYQRPSHYIATQGPVHETVYDFWRMIWQEQSACIVMVTNLVEVGRVKCYKYWPDDTEVYGDFKVTCVEMEPLAEYVVRTFTLERRGYNEIREVKQFHFTGWPDHGVPYHATGLLSFIRRVKLSNPPSAGPIVVHCSAGAGRTGCYIVIDIMLDMAEREGVVDIYNCVKALRSRRINMVQTEEQYIFIHDAILEACLCGETAIPVCEFKAAYFDMIRIDSQTNSSHLKDEFQTLNSVTPRLQAEDCSIACLPRNHDKNRFMDMLPPDRCLPFLITIDGESSNYINAALMDSYRQPAAFIVTQYPLPNTVKDFWRLVYDYGCTSIVMLNEVDLSQGCPQYWPEEGMLRYGPIQVECMSCSMDCDVINRIFRICNLTRPQEGYLMVQQFQYLGWASHREVPGSKRSFLKLILQVEKWQEECEEGEGRTIIHCLNGGGRSGMFCAIGIVVEMVKRQNVVDVFHAVKTLRNSKPNMVEAPEQYRFCYDVALEYLESS

SEQ ID NO: 33342 - protein, 1417 aa, Artificial Sequence
  Synthetic polypeptide
PRGTVCPLNPFSCIIYPASGSYMIVDSSDHDPGEKARLQLPTMKENDTHCIDFSYLLYSQKGLNPGTLNILVRVNKGPLANPIWNVTGFTGRDWLRAELAVSTFWPNEYQVIFEAEVSGGRSGYIAIDDIQVLSYPCDKSPHFLRLGDVEVNAGQNATFQCIATGRDAVHNKLWLQRRNGEDIPVAQTKNINHRRFAASFRLQEVTKTDQDLYRCVTQSERGSGVSNFAQLIVREPPRPIAPPQLLGVGPTYLLIQLNANSIIGDGPIILKEVEYRMTSGSWTETHAVNAPTYKLWHLDPDTEYEIRVLLTRPGEGGTGLPGPPLITRTKCAEPMRTPKTLKIAEIQARRIAVDWESLGYNITRCHTFNVTICYHYFRGHNESKADCLDMDPKAPQHVVNHLPPYTNVSLKMILTNPEGRKESEETIIQTDEDVPGPVPVKSLQGTSFENKIFLNWKEPLDPNGIITQYEISYSSIRSFDPAVPVAGPPQTVSNLWNSTHHVFMHLHPGTTYQFFIRASTVKGFGPATAINVTTNISAPTLPDYEGVDASLNETATTITVLLRPAQAKGAPISAYQIVVEELHPHRTKREAGAMECYQVPVTYQNAMSGGAPYYFAAELPPGNLPEPAPFTVGDNRTYQGFWNPPLAPRKGYNIYFQAMSSVEKETKTQCVRIATKAAATEEPEVIPDPAKQTDRVVKIAGISAGILVFILLLLVVILIVKKRRSYYSYSYYLKLAKKRKDAMGNTRQEMTHMVNAMDRSYADQSTLHAEDPLSITFMDQHNFSPRLPNDPLVPTAVLVPITDENHSATAESSRLLDVPRYLCEGTESPYQTGQLHPAIRVADLLQHINLMKTSDSYGFKEEYESFFEGQSASWDVAKKDQNRAKNRYGNIIAYDHSRVILQPVEDDPSSDYINANYIDIWLYRDGYQRPSHYIATQGPVHETVYDFWRMIWQEQSACIVMVTNLVEVGRVKCYKYWPDDTEVYGDFKVTCVEMEPLAEYVVRTFTLERRGYNEIREVKQFHFTGWPDHGVPYHATGLLSFIRRVKLSNPPSAGPIVVHCSAGAGRTGCYIVIDIMLDMAEREGVVDIYNCVKALRSRRINMVQTEEQYIFIHDAILEACLCGETAIPVCEFKAAYFDMIRIDSQTNSSHLKDEFQTLNSVTPRLQAEDCSIACLPRNHDKNRFMDMLPPDRCLPFLITIDGESSNYINAALMDSYRQPAAFIVTQYPLPNTVKDFWRLVYDYGCTSIVMLNEVDLSQGCPQYWPEEGMLRYGPIQVECMSCSMDCDVINRIFRICNLTRPQEGYLMVQQFQYLGWASHREVPGSKRSFLKLILQVEKWQEECEEGEGRTIIHCLNGGGRSGMFCAIGIVVEMVKRQNVVDVFHAVKTLRNSKPNMVEAPEQYRFCYDVALEYLESS

SEQ ID NO: 33343 - protein, 193 aa, Artificial Sequence
  Synthetic polypeptide
PRGTVCPLNPFSCIIYPASGSYMIVDSSDHDPGEKARLQLPTMKENDTHCIDFSYLLYSQKGLNPGTLNILVRVNKGPLANPIWNVTGFTGRDWLRAELAVSTFWPNEYQVIICTFLVYVLMSSVLTICVIHRCKYASHGNERLPSCLPHPHYWGSVIHRYTYASHGNERLPLFLPHPVDEEVFGDIGTKPSN

SEQ ID NO: 33344 - protein, 47 aa, Artificial Sequence
  Synthetic polypeptide
EAEVAVLLMMVQGPVITTRICMMTLNGCMLVLKSLIIYHPRCPKVPI

SEQ ID NO: 33345 - protein, 12 aa, Artificial Sequence
  Synthetic polypeptide
SQYFERLRWLYF

SEQ ID NO: 33346 - protein, 8 aa, Artificial Sequence
  Synthetic polypeptide
EAEVAVLL

SEQ ID NO: 33347 - protein, 9 aa, Artificial Sequence
  Synthetic polypeptide
EAEKRPAVT

SEQ ID NO: 33348 - protein, 14 aa, Artificial Sequence
  Synthetic polypeptide
SQYFERLRKGLQLL

SEQ ID NO: 33349 - protein, 630 aa, Artificial Sequence
  Synthetic polypeptide
NDLTSRRYGQYTMNQESTTIKVMEKPPFDRSISQDSLDELSMEDYWIELENIKKSSENSQEDQEVVVVKEPDEGELEEEWLKEAGLSNLFGESAGDPQESIVFLSTLTRTQAAAVQKRVETVSQTLRKKNKQYQIPDVRDIFAQQRESKETAPGGTESQSLRTNENKYQGRDDEASNLVGEEKLIPPEETPAPETDINLEVSFAEQALNQKESSKEKIQKSKGDDATLPSFRLPKDKTGTTRIGDLAPQDMKKVCHLALIELTALYDVLGIELKQQKAVKIKTKDSGLFCVPLTALLEQDQRKVPGMRIPLIFQKLISRIEERGLETEGLLRIPGAAIRIKNLCQELEAKFYEGTFNWESVKQHDAASLLKLFIRELPQPLLSVEYLKAFQAVQNLPTKKQQLQALNLLVILLPDANRDTLKALLEFLQRVIDNKEKNKMTVMNVAMVMAPNLFMCHALGLKSSEQREFVMAAGTANTMHLLIKYQKLLWTIPKFIVNQVRKQNTENHKKDKRAMKKLLKKMAYDREKYEKQDKSTNDADVPQGVIRVQAPHLSKVSMAIQLTEELKASDVLARFLSQESGVAQTLKKGEVFLYEIGGNIGERCLDDDTYMKDLYQLNPNAEWVIKSKPL

SEQ ID NO: 33350 - protein, 9 aa, Artificial Sequence
  Synthetic polypeptide
LVADMASTL

SEQ ID NO: 33351 - protein, 640 aa, Artificial Sequence
  Synthetic polypeptide
TQKYLCRCLRVAGRCRRYGQYTMNQESTTIKVMEKPPFDRSISQDSLDELSMEDYWIELENIKKSSENSQEDQEVVVVKEPDEGELEEEWLKEAGLSNLFGESAGDPQESIVFLSTLTRTQAAAVQKRVETVSQTLRKKNKQYQIPDVRDIFAQQRESKETAPGGTESQSLRTNENKYQGRDDEASNLVGEEKLIPPEETPAPETDINLEVSFAEQALNQKESSKEKIQKSKGDDATLPSFRLPKDKTGTTRIGDLAPQDMKKVCHLALIELTALYDVLGIELKQQKAVKIKTKDSGLFCVPLTALLEQDQRKVPGMRIPLIFQKLISRIEERGLETEGLLRIPGAAIRIKNLCQELEAKFYEGTFNWESVKQHDAASLLKLFIRELPQPLLSVEYLKAFQAVQNLPTKKQQLQALNLLVILLPDANRDTLKALLEFLQRVIDNKEKNKMTVMNVAMVMAPNLFMCHALGLKSSEQREFVMAAGTANTMHLLIKYQKLLWTIPKFIVNQVRKQNTENHKKDKRAMKKLLKKMAYDREKYEKQDKSTNDADVPQGVIRVQAPHLSKVSMAIQLTEELKASDVLARFLSQESGVAQTLKKGEVFLYEIGGNIGERCLDDDTYMKDLYQLNPNAEWVIKSKPL

SEQ ID NO: 33352 - protein, 13 aa, Artificial Sequence
  Synthetic polypeptide
ESLADVADMASTL

SEQ ID NO: 33353 - protein, 40 aa, Artificial Sequence
  Synthetic polypeptide
GVNAKIPVQMFKSRWQMSQIWPVHYEPGKHHHQSYGEASI

SEQ ID NO: 33354 - protein, 25 aa, Artificial Sequence
  Synthetic polypeptide
PWSQIWPVHYEPGKHHHQSYGEASI

SEQ ID NO: 33355 - protein, 652 aa, Artificial Sequence
  Synthetic polypeptide
SGKRELSMTRWHGFVSQIYPYWLTDRGRRYGQYTMNQESTTIKVMEKPPFDRSISQDSLDELSMEDYWIELENIKKSSENSQEDQEVVVVKEPDEGELEEEWLKEAGLSNLFGESAGDPQESIVFLSTLTRTQAAAVQKRVETVSQTLRKKNKQYQIPDVRDIFAQQRESKETAPGGTESQSLRTNENKYQGRDDEASNLVGEEKLIPPEETPAPETDINLEVSFAEQALNQKESSKEKIQKSKGDDATLPSFRLPKDKTGTTRIGDLAPQDMKKVCHLALIELTALYDVLGIELKQQKAVKIKTKDSGLFCVPLTALLEQDQRKVPGMRIPLIFQKLISRIEERGLETEGLLRIPGAAIRIKNLCQELEAKFYEGTFNWESVKQHDAASLLKLFIRELPQPLLSVEYLKAFQAVQNLPTKKQQLQALNLLVILLPDANRDTLKALLEFLQRVIDNKEKNKMTVMNVAMVMAPNLFMCHALGLKSSEQREFVMAAGTANTMHLLIKYQKLLWTIPKFIVNQVRKQNTENHKKDKRAMKKLLKKMAYDREKYEKQDKSTNDADVPQGVIRVQAPHLSKVSMAIQLTEELKASDVLARFLSQESGVAQTLKKGEVFLYEIGGNIGERCLDDDTYMKDLYQLNPNAEWVIKSKPL

SEQ ID NO: 33356 - protein, 11 aa, Artificial Sequence
  Synthetic polypeptide
LTVVADMASTL

SEQ ID NO: 33357 - protein, 619 aa, Artificial Sequence
  Synthetic polypeptide
GWAWWLMPVIPALWEAEAGRSRGREIETILANPENKQDVRILRGSQRARRKRRGDSAVLKQGLPPKGKKAWCWASYLEEEKAVAVPAKLFKEHQSFPYNKNGFKVGMKLEGVDPEHQSVYCVLTVAEVCGYRIKLHFDGYSDCYDFWVNADALDIHPVGWCEKTGHKLHPPKGYKEEEFNWQTYLKTCKAQAAPKSLFENQNITVIPSGFRVGMKLEAVDKKNPSFICVATVTDMVDNRFLVHFDNWDESYDYWCEASSPHIHPVGWCKEHRRTLITPPGYPNVKHFSWDKYLEETNSLPAPARAFKVKPPHGFQKKMKLEVVDKRNPMFIRVATVADTDDHRVKVHFDGWNNCYDYWIDADSPDIHPVGWCSKTGHPLQPPLSPLELMEASEHGGCSTPGCKGIGHFKRARHLGPHSAANCPYSEINLNKDRIFPDRLSGEMPPASPSFPRNKRTDANESSSSPEIRDQHADDVKEDFEERTESEMRTSHEARGAREEPTVQQAQRRSAVFLSFKSPIPCLPLRWEQQSKLLPTVAGIPASKVSKWSTDEVSEFIQSLPGCEEHGKVFKDEQIDGEAFLLMTQTDIVKIMSIKLGPALKIFNSILMFKAAEKNSHNEL

SEQ ID NO: 33358 - protein, 29 aa, Artificial Sequence
  Synthetic polypeptide
SQHFGRPRPADHEVGRSRPSWLTRRTNKM

SEQ ID NO: 33359 - protein, 33 aa, Artificial Sequence
  Synthetic polypeptide
PGEQTRCKNPEGFAESTEEKTRGFGCTKAGFAS

SEQ ID NO: 33360 - protein, 27 aa, Artificial Sequence
  Synthetic polypeptide
SQHFGRLRQTDHLSNSNSESKFAIWEA

SEQ ID NO: 33361 - protein, 29 aa, Artificial Sequence
  Synthetic polypeptide
PNTMSQYLRYSLCSISLCRDCIISHHRKG

SEQ ID NO: 33362 - protein, 424 aa, Artificial Sequence
  Synthetic polypeptide
ISSSLILCHNTYVIHYAPSHYVGIVSSRITGRVEPVIQRGHESLVHHILLYQCSNNFNDSVLESGHECYHPNMPDAFLTCETVIFAWAIGGEGFSYPPHVGLSLGTPLDPHYVLLEVHYDNPTYEEGLIDNSGLRLFYTMDIRKYDAGVIEAGLWVSLFHTIPPGMPEFQSEGHCTLECLEEALEAEKPSGIHVFAVLLHAHLAGRGIRLRHFRKGKEMKLLAYDDDFDFNFQEFQYLKEEQTILPGDNLITECRYNTKDRAEMTWGGLSTRSEMCLSYLLYYPRINLTRCASIPDIMEQLQFIGVKEIYRPVTTWPFIIKSPKQYKNLSFMDAMNKFKWTKKEGLSFNKLVLSLPVNVRCSKTDNAEWSIQGMTALPPDIERPYKAEPLVCGTSSSSSLHRDFSINLLVCLLLLSCTLSTKSL

SEQ ID NO: 33363 - protein, 13 aa, Artificial Sequence
  Synthetic polypeptide
GLYHLASQEGLSQ

SEQ ID NO: 33364 - protein, 529 aa, Artificial Sequence
  Synthetic polypeptide
TSAWDYFTNANRELKKDAQQDYHLEYAMENSTHTIIEFTRELHTCDINDKSITDSTVRVIWAYHHEDAGEAGPKYHDSNRGTKSLRLLNPEKTSVLSTALPYFDLVNQDVPIPNKDTTYWCQMFKIPVFQEKHHVIKVEPVIQRGHESLVHHILLYQCSNNFNDSVLESGHECYHPNMPDAFLTCETVIFAWAIGGEGFSYPPHVGLSLGTPLDPHYVLLEVHYDNPTYEEGLIDNSGLRLFYTMDIRKYDAGVIEAGLWVSLFHTIPPGMPEFQSEGHCTLECLEEALEAEKPSGIHVFAVLLHAHLAGRGIRLRHFRKGKEMKLLAYDDDFDFNFQEFQYLKEEQTILPGDNLITECRYNTKDRAEMTWGGLSTRSEMCLSYLLYYPRINLTRCASIPDIMEQLQFIGVKEIYRPVTTWPFIIKSPKQYKNLSFMDAMNKFKWTKKEGLSFNKLVLSLPVNVRCSKTDNAEWSIQGMTALPPDIERPYKAEPLVCGTSSSSSLHRDFSINLLVCLLLLSCTLSTKSL

SEQ ID NO: 33365 - protein, 28 aa, Artificial Sequence
  Synthetic polypeptide
TQEMEIAGSQDCATELQPGIILQMQIES

SEQ ID NO: 33366 - protein, 29 aa, Artificial Sequence
  Synthetic polypeptide
ESLEPRRWRLQGAKIVPLNFSLGLFYKCK

SEQ ID NO: 33367 - protein, 21 aa, Artificial Sequence
  Synthetic polypeptide
LTPIISALSEAKKHQFLRRMP

SEQ ID NO: 33368 - protein, 35 aa, Artificial Sequence
  Synthetic polypeptide
SQHFQKPRNTSFSGGCLESHEREYRHSGDSDQAGS

SEQ ID NO: 33369 - protein, 194 aa, Artificial Sequence
  Synthetic polypeptide
MAAVTDTYNLSTFRSQETPVSQEDALNLMNENIDILETAIKQAAEQGARIIVTPEDALYGWKFTRETVFPYLEDIPDPQVNWIPCQDPHRFGHTPVQARLSCLAKDNSIYVLANLGDKKPCNSRDSTCPPNGYFQYNTNVVYNTEGKLVARYHKYHLYSEPQFNVPEKPELVTFNTAFGRKWYLCTKWSQSVSL

SEQ ID NO: 33370 - protein, 495 aa, Artificial Sequence
  Synthetic polypeptide
MAAVTDTYNLSTFRSQETPVSQEDALNLMNENIDILETAIKQAAEQGARIIVTPEDALYGWKFTRETVFPYLEDIPDPQVNWIPCQDPHRFGHTPVQARLSCLAKDNSIYVLANLGDKKPCNSRDSTCPPNGYFQYNTNVVYNTEGKLVARYHKYHLYSEPQFNVPEKPELVTFNTAFGRFGIFTCFDIFFYDPGVTLVKDFHVDTILFPTAWMNVLPLLTAIEFHSAWAMGMGVNLLVANTHHVSLNMTGSGIYAPNGPKVYHYDMKTELGKLLLSEVDSHPLSSLAYPTAVNWNAYATTIKPFPVQKNTFRGFISRDGFNFTELFENAGNLTVCQKELCCHLSYRMLQKEENEVYVLGAFTGLHGRRRREYWQVCTLLKCKTTNLTTCGRPVETASTRFEMFSLSGTFGTEYVFPEVLLTEIHLSPGKFEVLKDGRLVNKNGSSGPILTVSLFGRWYTKDSLYSSCGTSNSAITYLLIFILLMIIALQNIVML

SEQ ID NO: 33371 - protein, 191 aa, Artificial Sequence
  Synthetic polypeptide
MAAVTDTYNLSTFRSQETPVSQEDALNLMNENIDILETAIKQAAEQGARIIVTPEDALYGWKFTRETVFPYLEDIPDPQVNWIPCQDPHRFGHTPVQARLSCLAKDNSIYVLANLGDKKPCNSRDSTCPPNGYFQYNTNVVYNTEGKLVARYHKYHLYSEPQFNVPEKPELVTFNTAFGSLDERFAPFDSY

SEQ ID NO: 33372 - protein, 265 aa, Artificial Sequence
  Synthetic polypeptide
MAAVTDTYNLSTFRSQETPVSQEDALNLMNENIDILETAIKQAAEQGARIIVTPEDALYGWKFTRETVFPYLEDIPDPQVNWIPCQDPHRFGHTPVQARLSCLAKDNSIYVLANLGDKKPCNSRDSTCPPNGYFQYNTNVVYNTEGKLVARYHKYHLYSEPQFNVPEKPELVTFNTAFGRFGIFTCFDIFFYDPGVTLVKDFHVDTILFPTAWMNVLPLLTAIEFHSAWAMGMGVNLLVANTHHVSLNMTVVFMHQMVPKCIIMT

SEQ ID NO: 33373 - protein, 274 aa, Artificial Sequence
  Synthetic polypeptide
MAAVTDTYNLSTFRSQETPVSQEDALNLMNENIDILETAIKQAAEQGARIIVTPEDALYGWKFTRETVFPYLEDIPDPQVNWIPCQDPHRFGHTPVQARLSCLAKDNSIYVLANLGDKKPCNSRDSTCPPNGYFQYNTNVVYNTEGKLVARYHKVCTLLKCKTTNLTTCGRPVETASTRFEMFSLSGTFGTEYVFPEVLLTEIHLSPGKFEVLKDGRLVNKNGSSGPILTVSLFGRWYTKDSLYSSCGTSNSAITYLLIFILLMIIALQNIVML

SEQ ID NO: 33374 - protein, 170 aa, Artificial Sequence
  Synthetic polypeptide
MAAVTDTYNLSTFRSQETPVSQEDALNLMNENIDILETAIKQAAEQGARIIVTPEDALYGWKFTRETVFPYLEDIPDPQVNWIPCQDPHRFGHTPVQARLSCLAKDNSIYVLANLGDKKPCNSRDSTCPPNGYFQYNTNVVYNTEGKLVARYHKEVVFMHQMVPKCIIMT

SEQ ID NO: 33375 - protein, 94 aa, Artificial Sequence
  Synthetic polypeptide
MAAVTDTYNLSTFRSQETPVSQEDALNLMNENIDILETAIKQAAEQGARIIVTPEDALYGWKFTRETVFPYLEDIPDPQVNWIPCQDPHRSAHC

SEQ ID NO: 33376 - protein, 167 aa, Artificial Sequence
  Synthetic polypeptide
MAAVTDTYNLSTFRSQETPVSQEDALNLMNENIDILETAIKQAAEQGARIIVTPEDALYGWKFTRETVFPYLEDIPDPQVNWIPCQDPHRFGHTPVQARLSCLAKDNSIYVLANLGDKKPCNSRDSTCPPNGYFQYNTNVVYNTEGKLVARYHKETLQSVKRSFAVI

SEQ ID NO: 33377 - protein, 159 aa, Artificial Sequence
  Synthetic polypeptide
MAAVTDTYNLSTFRSQETPVSQEDALNLMNENIDILETAIKQAAEQGARIIVTPEDALYGWKFTRETVFPYLEDIPDPQVNWIPCQDPHRFGHTPVQARLSCLAKDNSIYVLANLGDKKPCNSRDSTCPPNGYFQYNTNVVYNTEGKLVARYHKVGKSH

SEQ ID NO: 33378 - protein, 141 aa, Artificial Sequence
  Synthetic polypeptide
MAAVTDTYNLSTFRSQETPVSQEDALNLMNENIDILETAIKQAAEQGARIIVTPEDALYGWKFTRETVFPYLEDIPDPQVNWIPCQDPHRFGHTPVQARLSCLAKDNSIYVLANLGDKKPCNSRDSTCPPNGYFQYNTNVV

SEQ ID NO: 33379 - protein, 76 aa, Artificial Sequence
  Synthetic polypeptide
MAAVTDTYNLSTFRSQETPVSQEDALNLMNENIDILETAIKQAAEQGARIIVTPEDALYGWKFTRETVFPYLEDIP

SEQ ID NO: 33380 - protein, 151 aa, Artificial Sequence
  Synthetic polypeptide
PLFAWLTPVCSSEVSSNVTSPEKLLLPPTAQPKAFEQYLNLEDGRLLTHLRMCSAAPKLPYDLWFKRCFAGCLPESSLQRVWDKVVSGSCKILVFVAVEILLTFKIKVMALNSAEKITKFLENIPQDSSDAIVSKAIDLWHKHCGTPVHSS

SEQ ID NO: 33381 - protein, 32 aa, Artificial Sequence
  Synthetic polypeptide
LLSVLQRSAQMSPLLRNCFCLLQPSQKRLNNT

SEQ ID NO: 33382 - protein, 13 aa, Artificial Sequence
  Synthetic polypeptide
ETASASYSPAKSV

SEQ ID NO: 33383 - protein, 84 aa, Artificial Sequence
  Synthetic polypeptide
PLFAWLTPVCSSEVSSNVTSPEKLLLPPTAQPKAFEQYLNLEDGRLLTHLRMCSAAPKLPYDLWFKRCFAGCLPESSLQRQGLG

SEQ ID NO: 33384 - protein, 123 aa, Artificial Sequence
  Synthetic polypeptide
PLFAWLTPVCSSEVSSNVTSPEKLLLPPTAQPKAFEQYLNLEDGRLLTHLRMCSAAPKLPYDLWFKRCFAGCLPESSLQRVWDKVVSGSCKILVFVAVEILLTFKIKVMALNSAEKITKFLEN

SEQ ID NO: 33385 - protein, 107 aa, Artificial Sequence
  Synthetic polypeptide
PLFAWLTPVCSSEVSSNVTSPEKLLLPPTAQPKAFEQYLNLEDGRLLTHLRMCSAAPKLPYDLWFKRCFAGCLPESSLQRVWDKVVSGSCKILVFVAVEILLTFKIK

SEQ ID NO: 33386 - protein, 92 aa, Artificial Sequence
  Synthetic polypeptide
PLFAWLTPVCSSEVSSNVTSPEKLLLPPTAQPKAFEQYLNLEDGRLLTHLRMCSAAPKLPYDLWFKRCFAGCLPESSLQRVWDKVVSGSCKI

SEQ ID NO: 33387 - protein, 79 aa, Artificial Sequence
  Synthetic polypeptide
PLFAWLTPVCSSEVSSNVTSPEKLLLPPTAQPKAFEQYLNLEDGRLLTHLRMCSAAPKLPYDLWFKRCFAGCLPESSLQ

SEQ ID NO: 33388 - protein, 10 aa, Artificial Sequence
  Synthetic polypeptide
RMKREEVAAG

SEQ ID NO: 33389 - protein, 449 aa, Artificial Sequence
  Synthetic polypeptide
REKRWLLGDDPAGSAGETPGWLSREQVFVLISAASVNLGSMMCYSILGPFFPKEAEKKGASNTIIGMIFGCFALFELLASLVFGNYLVHIGAKFMFVAGMFVSGGVTILFGVLDRVPDGPVFIAMCFLVRVMDAVSFAAAMTASSSILAKAFPNNVATVLGSLETFSGLGLILGPPVGGFLYQSFGYEVPFIVLGCVVLLMVPLNMYILPNYESDPGEHSFWKLIALPKVGLIAFVINSLSSCFGFLDPTLSLFVLEKFNLPAGYVGLVFLGMALSYAISSPLFGLLSDKRPPLRKWLLVFGNLITAGCYMLLGPVPILHIKSQLWLLVLILVVSGLSAGMSIIPTFPEILSCAHENGFEEGLSTLGLVSGLFSAMWSIGAFMGPTLGGFLYEKIGFEWAAAIQGLWALISGLAMGLFYLLEYSRRKRSKSQNILSTEEERTTLLPNET

SEQ ID NO: 33390 - protein, 34 aa, Artificial Sequence
  Synthetic polypeptide
RMKDEERRGGCWVMILQEVQERPPGGFRENRFLY

SEQ ID NO: 33391 - protein, 100 aa, Artificial Sequence
  Synthetic polypeptide
REKRWLLGDDPAGSAGETPGWLSREQVFVLISAASVNLGSMMCYSILGPFFPKEAEKKGASNTIIGMIFGFQFTSWICGTSIPGYGTVLCHLFTTIWSPK

SEQ ID NO: 33392 - protein, 12 aa, Artificial Sequence
  Synthetic polypeptide
GAGHCCWRCNGR

SEQ ID NO: 33393 - protein, 130 aa, Artificial Sequence
  Synthetic polypeptide
GPGIAAGGVMDVNTALQEVLKTALIHDGLARGIREAAKALDKRQAHLCVLASNCDEPMYVKLVEALCAEHQINLIKVDDNKKLGEWVGLCKIDREGKPRKVVGCSCVVVKDYGKESQAKDVIEEYFKCKK

SEQ ID NO: 33394 - protein, 8 aa, Artificial Sequence
  Synthetic polypeptide
GRALLLEV

SEQ ID NO: 33395 - protein, 432 aa, Artificial Sequence
  Synthetic polypeptide
TVREPCNHANILTKPDPRTFWTNDDPAFMKQRRMGLNDFIQKIANNSYACKHPEVQSILKISQPQEPELMNANPSPPPSPSQQINLGPSSNPHAKPSDFHFLKVIGKGSFGKVLLARHKAEEVFYAVKVLQKKAILKKKEEKHIMSERNVLLKNVKHPFLVGLHFSFQTADKLYFVLDYINGGELFYHLQRERCFLEPRARFYAAEIASALGYLHSLNIVYRDLKPENILLDSQGHIVLTDFGLCKENIEHNSTTSTFCGTPEYLAPEVLHKQPYDRTVDWWCLGAVLYEMLYGLPPFYSRNTAEMYDNILNKPLQLKPNITNSARHLLEGLLQKDRTKRLGAKDDFMEIKSHVFFSLINWDDLINKKITPPFNPNVSGPNDLRHFDPEFTEEPVPNSIGKSPDSVLVTASVKEAAEAFLGFSYAPPTDSFL

SEQ ID NO: 33396 - protein, 8 aa, Artificial Sequence
  Synthetic polypeptide
GLSSHDEL

SEQ ID NO: 33397 - protein, 19 aa, Artificial Sequence
  Synthetic polypeptide
HDCEFPEASPAMMNCERAM

SEQ ID NO: 33398 - protein, 81 aa, Artificial Sequence
  Synthetic polypeptide
TVREPCNHANILTKPDPRTFWTNDDPAFMKQRRMGLNDFIQKIANNSYACKHPEVQSILKISQPQEPELMNANPSPPPSPS

SEQ ID NO: 33399 - protein, 71 aa, Artificial Sequence
  Synthetic polypeptide
FRGLPSHMELHRQERHLRPHGHAAGRFPHDLGRPLLPQAHEHHGQRAALPAGFRAHEAADRGGLRGRAAGV

SEQ ID NO: 33400 - protein, 324 aa, Artificial Sequence
  Synthetic polypeptide
EVLFTSPHDSEASPATWNCIGKNVICDRTATPLDAFRMTSAAHYYPKLMSIMGNVLRFLPAFVRMKQLIEEGYVGEPLVCEVQVHGGSLLGKKYNWSCDDLMGGGGLHSVGTYIIDLLTFLTGQKAVKVHGLLKTFVKQTDHIKGIRQITSDDFCTFQMVLEGGVCCTVTLNFNVPGEFKQDVTVVGSAGRLLAVGTDLYGQRNSAPEQELLVQDATPVSNSLLPEKAFSDIPSPYLRGTIKMMQAVRQAFQDQDDRRTWDGRPLTMAATFDDCLYALCVVDTIKRSSQTGEWQNIAIMTEEPELSPAYLISEAMRRSRMSLYC

SEQ ID NO: 33401 - protein, 58 aa, Artificial Sequence
  Synthetic polypeptide
WVYQGFPLFCLPHFLLLPPCKKCFSPPPMIPRPPQPHGTASARTSSATARPRRWTLSA

SEQ ID NO: 33402 - protein, 20 aa, Artificial Sequence
  Synthetic polypeptide
RLIYRFLRPINRGSVLQSAK

SEQ ID NO: 33403 - protein, 556 aa, Artificial Sequence
  Synthetic polypeptide
LKFFAALHMSTSDCKRKPVDSQTSRSESEIVPKVAKMTVSGKKQTMGFEVPGVSSEENGHSFHTPQKGPPIEDAIASSDVLETASKSANPPHTIQASEEQSSTPAPVKKSGKLRQQIDVKAELEKRQGGKQLLNLVVIGHVDAGKSTLMGHMLYLLGNINKRTMHKYEQESKKAGKASFAYAWVLDETGEERERGVTMDVGMTKFETTTKVITLMDAPGHKDFIPNMITGAAQADVAVLVVDASRGEFEAGFETGGQTREHGLLVRSLGVTQLAVAVNKMDQVNWQQERFQEITGKLGHFLKQAGFKESDVGFIPTSGLSGENLITRSQSSELTKWYKGLCLLEQIDSFKPPQRSIDKPFRLCVSDVFKDQGSGFCITGKIEAGYIQTGDRLLAMPPNETCTVKGITLHDEPVDWAAAGDHVSLTLVGMDIIKINVGCIFCGPKVPIKACTRFRARILIFNIEIPITKGFPVLLHYQTVSEPAVIKRLISVLNKSTGEVTKKKPKFLTKGQNALVELQTQRPIALELYKDFKELGRFMLRYGGSTIAAGVVTEIKE

SEQ ID NO: 33404 - protein, 24 aa, Artificial Sequence
  Synthetic polypeptide
NCMLDDSNFSLLCTCPQVIAKENQ

SEQ ID NO: 33405 - protein, 13 aa, Artificial Sequence
  Synthetic polypeptide
LQKKTSRFPDIAK

SEQ ID NO: 33406 - protein, 16 aa, Artificial Sequence
  Synthetic polypeptide
LKFFAALHMSTSDCKR

SEQ ID NO: 33407 - protein, 3 aa, Artificial Sequence
  Synthetic polypeptide
LQK

SEQ ID NO: 33408 - protein, 35 aa, Artificial Sequence
  Synthetic polypeptide
LKFFAALHMSTSDCKRKPVDSQTSRSESEIVPKVA

SEQ ID NO: 33409 - protein, 24 aa, Artificial Sequence
  Synthetic polypeptide
LKFFAALHMSTSDCKRKPVDSQTS

SEQ ID NO: 33410 - protein, 12 aa, Artificial Sequence
  Synthetic polypeptide
LQKKTSRFPDIA

SEQ ID NO: 33411 - protein, 48 aa, Artificial Sequence
  Synthetic polypeptide
SQHFGRPEWENCLRPGVGDQPEQHRNNLPEEYYVHWELHLCSLHDNST

SEQ ID NO: 33412 - protein, 1189 aa, Artificial Sequence
  Synthetic polypeptide
GQELETNLSNIEIICQKNTMCTGNYTFVPYMITPHNKVYCCDSSFMKGLTELMQPNFELLLGPICLPLVDRFIQLLKVAQASSSQYFRESILNDIRKARNLYTGKELAAELARIRQRVDNIEVLTADIVINLLLSYRDIQDYDSIVKLVETLEKLPTFDLASHHHVKFHYAFALNRRNLPGDRAKALDIMIPMVQSEGQVASDMYCLVGRIYKDMFLDSNFTDTESRDHGASWFKKAFESEPTLQSGINYAVLLLAAGHQFESSFELRKVGVKLSSLLGKKGNLEKLQSYWEVGFFLGASVLANDHMRVIQASEKLFKLKTPAWYLKSIVETILIYKHFVKLTTEQPVAKQELVDFWMDFLVEATKTDVTVVRFPVLILEPTKIYQPSYLSINNEVEEKTISIWHVLPDDKKGIHEWNFSASSVRGVSISKFEERCCFLYVLHNSDDFQIYFCTELHCKKFFEMVNTITEEKGRSTEEGDCESDLLEYDYEYDENGDRVVLGKGTYGIVYAGRDLSNQVRIAIKEIPERDSRYSQPLHEEIALHKHLKHKNIVQYLGSFSENGFIKIFMEQVPGGSLSALLRSKWGPLKDNEQTIGFYTKQILEGLKYLHDNQIVHRDIKGDNVLINTYSGVLKISDFGTSKRLAGINPCTETFTGTLQYMAPEIIDKGPRGYGKAADIWSLGCTIIEMATGKPPFYELGEPQAAMFKVGMFKVHPEIPESMSAEAKAFILKCFEPDPDKRACANDLLVDEFLKVSSKKKKTQPKLSALSAGSNEYLRSISLPVPVLVEDTSSSSEYGSVSPDTELKVDPFSFKTRAKSCGERDVKGIRTLFLGIPDENFEDHSAPPSPEEKDSGFFMLRKDSERRATLHRILTEDQDKIVRNLMESLAQGAEEPKLKWEHITTLIASLREFVRSTDRKIIATTLSKLKLELDFDSHGISQVQVVLFGFQDAVNKVLRNHNIKPHWMFALDSIIRKAVQTAITILVPELRPHFSLASESDTADQEDLDVEDDHEEQPSNQTVRRPQAVIEDAVATSGVSTLSSTVSHDSQSAHRSLNVQLGRMKIETNRLLEELVRKEKELQALLHRAIEEKDQEIKHLKLKSQPIEIPELPVFHLNSSGTNTEDSELTDWLRVNGADEDTISRFLAEDYTLLDVLYYVTRDDLKCLRLRGGMLCTLWKAIIDFRNKQT

SEQ ID NO: 33413 - protein, 43 aa, Artificial Sequence
  Synthetic polypeptide
DVTCSSLSSAMIVRPPQPCGTVADCSWDETIKIYDPACLTIPA

SEQ ID NO: 33414 - protein, 17 aa, Artificial Sequence
  Synthetic polypeptide
GLPSHVELWLTVLGMKQ

SEQ ID NO: 33415 - protein, 46 aa, Artificial Sequence
  Synthetic polypeptide
WFYKGEFPCTSFFFFFFTAAIHVRCDMLLLVFCHDREASPAMWNCG

SEQ ID NO: 33416 - protein, 541 aa, Artificial Sequence
  Synthetic polypeptide
VHSKMFTQETRLRHFSGVPCVSGGLPKPANITFLSINMKNVLQWTPPEGLQGVKVTYTVQYFIYGQKKWLNKSECRNINRTYCDLSAETSDYEHQYYAKVKAIWGTKCSKWAESGRFYPFLETQIGPPEVALTTDEKSISVVLTAPEKWKRNPEDLPVSMQQIYSNLKYNVSVLNTKSNRTWSQCVTNHTLVLTWLEPNTLYCVHVESFVPGPPRRAQPSEKQCARTLKDQSSEFKAKIIFWYVLPVSITVFLFSVMGYSIYRYIHVGKEKHPANLILIYGNEFDKRFFVPAEKIVINFITLNISDDSKISHQDMSLLGKSSDVSSLNDPQPSGNLRPPQEEEEVKHLGYASHLMEIFCDSEENTEGTSLTQQESLSRTIPPDKTVIEYEYDVRTTDICAGPEEQELSLQEEVSTQGTLLESQAALAVLGPQTLQYSYTPQLQDLDPLAQEHTDSEEGPEEEPSTTLVDWDPQTGRLCIPSLSSFDQDSEGCEPSEGDGLGEEGLLSRLYEEPAPDRPPGENETYLMQFMEEWGLYVQMEN

SEQ ID NO: 33417 - protein, 25 aa, Artificial Sequence
  Synthetic polypeptide
DISQEFPVSLVVCLNLQTSPSYPST

SEQ ID NO: 33418 - protein, 22 aa, Artificial Sequence
  Synthetic polypeptide
DVHTRNSPKTFLRSSLCLWWFA

SEQ ID NO: 33419 - protein, 197 aa, Artificial Sequence
  Synthetic polypeptide
VHSKMFTQETRLRHFSGVPCVSGGLPKPANITFLSINMKNVLQWTPPEGLQGVKVTYTVQYFIYGQKKWLNKSECRNINRTYCDLSAETSDYEHQYYAKVKAIWGTKCSKWAESGRFYPFLETQIGPPEVALTTDEKSISVVLTAPEKWKRNPEDLPVSMQQIYSNLKYNVSVLNTKSNRTVSLKWNGAYIHVPLCS

SEQ ID NO: 33420 - protein, 29 aa, Artificial Sequence
  Synthetic polypeptide
HGVGLLEFNTCHLYDLRFYYASPTRQHLI

SEQ ID NO: 33421 - protein, 27 aa, Artificial Sequence
  Synthetic polypeptide
MESDYLSSTLATCMTLGFTMHHLHANI

SEQ ID NO: 33422 - protein, 1505 aa, Artificial Sequence
  Synthetic polypeptide
EMGDQNSGCSVVSECDKLRHDGYRSSQYYSQGPTFAANASPFCDDYQDEDEETDQKCSLSSSEEERFISIRRPKTPASSDFSDLNTQTNWTKSLPLPTPEEKMRQQAQTVQADVVPINITASGTGQDDADGHSVYTPDHYSTLGRFNSCRSAGQRSETRDSSCQTEDVKVVPPSMRRIRAQKGQGIAAQMGHFSGSSGNMSVLSDSAGIVFPSRLDSDAGFHSLPRSGARANIQSLEPRLGALGPAGDMNGTFLYQRGHPQADENLGHLGGASGTGTLLRPKSQELRHFESENIMSPACVVSPHATYSTSIIPNATLSSSSEVIAIPTAQSAGQRESKSSGSSHARIKSRDHLISRHAVKGDPQSPGRHWNEGHATILSQDLDPHSPGEPALLSLCDSAVPLNAPANRENGSQAMPYNCRNNLAFPAHPQDVDGKSESSYSGGGGHSSSEPWEYKSSGNGRASPLKPHLATPGYSTPTSNMSSCSLDQTSNKEDAGSLYSEDHDGYCASVHTDSGHGSGNLCNSSDGFGNPRHSVINVFVGRAQKNQGDRSNYQDKSLSRNISLKKAKKPPLPPSRTDSLRRIPKKSSQCNGQVLNESLIATLQHSLQLSLPGKSGSSPSQSPCSDLEEPWLPRSRSQSTVSAGSSMTSATTPNVYSLCGATPSQSDTSSVKSEYTDPWGYYIDYTGMQEDPGNPAGGCSTSSGVPTGNGPVRHVQEGSRATMPQVPGGSVKPKIMSPEKSHRVISPSSGYSSQSNTPTALTPVPVFLKSVSPANGKGKPKPKVPERKSSLISSVSISSSSTSLSSSTSTEGSGTMKKLDPAVGSPPAPPPPPVPSPPFPCPADRSPFLPPPPPVTDCSQGSPLPHSPVFPPPPPEALIPFCSPPDWCLSPPRPALSPILPDSPVSLPLPPPLLPSSEPPPAPPLDPKFMKDTRPPFTNSGQPESSRGSLRPPSTKEETSRPPMPLITTEALQMVQLRPVRKNSGAEAAQLSERTAQEQRTPVAPQYHLKPSAFLKSRNSTNEMESESQPASVTSSLPTPAKSSSQGDHGSAAERGGPVSRSPGAPSAGEAEARPSPSTTPLPDSSPSRKPPPISKKPKLFLVVPPPQKDFAVEPAENVSEALRAVPSPTTGEEGSVHSREAKESSAAQAGSHATHPGTSVLEGGAAGSMSPSRVEANVPMVQPDVSPAPKQEEPAENSADTGGDGESCLSQQDGAAGVPETNAAGSSSEACDFLKEDGNDEVMTPSRPRTTEDLFAAIHRSKRKVLGRRDSDDDHSRNHSPSPPVTPTGAAPSLASPKQVGSIQRSIRKSSTSSDNFKALLLKKGSRSDTSARMSAAEMLKNTDPRFQRSRSEPSPDAPESPSSCSPSKNRRAQEEWAKNEGLMPRSLSFSGPRYGRSRTPPSAASSRYSMRNRIQSSPMTVISEGEGEAVEPVDSIARGALGAAEGCSLDGLAREEMDEGGLLCGEGPAASLQPQAPGPVDGTASAEGREPSPQCGGSLSEES

SEQ ID NO: 33423 - protein, 118 aa, Artificial Sequence
  Synthetic polypeptide
RWETRILVAVLSVNAISCGMMATAVLSTTLRDPPLRPTPAHSVMITKMKMKKQIKSVLCLHQKKKDLFPSGDLKHQPQVTSPTLILRRTGPSRFHCQHQKRRCDSKPKQSRLTWCLLT

SEQ ID NO: 33424 - protein, 1549 aa, Artificial Sequence
  Synthetic polypeptide
EMGDQNSGCSVVSECDKLRHDGYRSSQYYSQGPTFAANASPFCDDYQDEDEETDQKCSLSSSEEERFISIRRPKTPASSDFSDLNTQTNWTKSLPLPTPEEKMRQQAQTVQADVVPINITGENFDRQASLRRSLIYTDTLVRRPKKVKRRKTITGVPDNIQKELASGTGQDDADGHSVYTPDHYSTLGRFNSCRSAGQRSETRDSSCQTEDVKVVPPSMRRIRAQKGQGIAAQMGHFSGSSGNMSVLSDSAGIVFPSRLDSDAGFHSLPRSGARANIQSLEPRLGALGPAGDMNGTFLYQRGHPQADENLGHLGGASGTGTLLRPKSQELRHFESENIMSPACVVSPHATYSTSIIPNATLSSSSEVIAIPTAQSAGQRESKSSGSSHARIKSRDHLISRHAVKGDPQSPGRHWNEGHATILSQDLDPHSPGEPALLSLCDSAVPLNAPANRENGSQAMPYNCRNNLAFPAHPQDVDGKSESSYSGGGGHSSSEPWEYKSSGNGRASPLKPHLATPGYSTPTSNMSSCSLDQTSNKEDAGSLYSEDHDGYCASVHTDSGHGSGNLCNSSDGFGNPRHSVINVFVGRAQKNQGDRSNYQDKSLSRNISLKKAKKPPLPPSRTDSLRRIPKKSSQCNGQVLNESLIATLQHSLQLSLPGKSGSSPSQSPCSDLEEPWLPRSRSQSTVSAGSSMTSATTPNVYSLCGATPSQSDTSSVKSEYTDPWGYYIDYTGMQEDPGNPAGGCSTSSGVPTGNGPVRHVQEGSRATMPQVPGGSVKPKIMSPEKSHRVISPSSGYSSQSNTPTALTPVPVFLKSVSPANGKGKPKPKVPERKSSLISSVSISSSSTSLSSSTSTEGSGTMKKLDPAVGSPPAPPPPPVPSPPFPCPADRSPFLPPPPPVTDCSQGSPLPHSPVFPPPPPEALIPFCSPPDWCLSPPRPALSPILPDSPVSLPLPPPLLPSSEPPPAPPLDPKFMKDTRPPFTNSGQPESSRGSLRPPSTKEETSRPPMPLITTEALQMVQLRPVRKNSGAEAAQLSERTAQEQRTPVAPQYHLKPSAFLKSRNSTNEMESESQPASVTSSLPTPAKSSSQGDHGSAAERGGPVSRSPGAPSAGEAEARPSPSTTPLPDSSPSRKPPPISKKPKLFLVVPPPQKDFAVEPAENVSEALRAVPSPTTGEEGSVHSREAKESSAAQAGSHATHPGTSVLEGGAAGSMSPSRVEANVPMVQPDVSPAPKQEEPAENSADTGGDGESCLSQQDGAAGVPETNAAGSSSEACDFLKEDGNDEVMTPSRPRTTEDLFAAIHRSKRKVLGRRDSDDDHSRNHSPSPPVTPTGAAPSLASPKQVGSIQRSIRKSSTSSDNFKALLLKKGSRSDTSARMSAAEMLKNTDPRFQRSRSEPSPDAPESPSSCSPSKNRRAQEEWAKNEGLMPRSLSFSGPRYGRSRTPPSAASSRYSMRNRIQSSPMTVISEGEGEAVEPVDSIARGALGAAEGCSLDGLAREEMDEGGLLCGEGPAASLQPQAPGPVDGTASAEGREPSPQCGGSLSEES

SEQ ID NO: 33425 - protein, 178 aa, Artificial Sequence
  Synthetic polypeptide
EMGDQNSGCSVVSECDKLRHDGYRSSQYYSQGPTFAANASPFCDDYQDEDEETDQKCSLSSSEEERFISIRRPKTPASSDFSDLNTQTNWTKSLPLPTPEEKMRQQAQTVQADVVPINITASGTGQDDADGHSVYTPDHYSTLGRFNSCRSAGQRSETRDSSCQTEDVKVVPPSMRRI

SEQ ID NO: 33426 - protein, 99 aa, Artificial Sequence
  Synthetic polypeptide
EMGDQNSGCSVVSECDKLRHDGYRSSQYYSQGPTFAANASPFCDDYQDEDEETDQKCSLSSSEEERFISIRRPKTPASSDFSDLNTQTNWTKSLPLPTP

SEQ ID NO: 33427 - protein, 98 aa, Artificial Sequence
  Synthetic polypeptide
RWETRILVAVLSVNAISCGMMATAVLSTTLRDPPLRPTPAHSVMITKMKMKKQIKSVLCLHQKKKDLFPSGDLKHQPQVTSPTLILRRTGPSRFHCQH

SEQ ID NO: 33428 - protein, 79 aa, Artificial Sequence
  Synthetic polypeptide
EMGDQNSGCSVVSECDKLRHDGYRSSQYYSQGPTFAANASPFCDDYQDEDEETDQKCSLSSSEEERFISIRRPKTPASS

SEQ ID NO: 33429 - protein, 79 aa, Artificial Sequence
  Synthetic polypeptide
RWETRILVAVLSVNAISCGMMATAVLSTTLRDPPLRPTPAHSVMITKMKMKKQIKSVLCLHQKKKDLFPSGDLKHQPQV

SEQ ID NO: 33430 - protein, 14 aa, Artificial Sequence
  Synthetic polypeptide
TQNGGQTLTFRFPT

SEQ ID NO: 33431 - protein, 30 aa, Artificial Sequence
  Synthetic polypeptide
AAGEQSHVSFAHDCKPRMEDRPSHFGFQPR

SEQ ID NO: 33432 - protein, 1573 aa, Artificial Sequence
  Synthetic polypeptide
FLPGCKLQESRVTFHLLMTVNPEWRTDPHISVSNLDEESRWTVHYTAPWHQQENVFLPTTRPPCVEDLHRQAKLNLKSVLRECDKLRHDGYRSSQYYSQGPTFAANASPFCDDYQDEDEETDQKCSLSSSEEERFISIRRPKTPASSDFSDLNTQTNWTKSLPLPTPEEKMRQQAQTVQADVVPINITASGTGQDDADGHSVYTPDHYSTLGRFNSCRSAGQRSETRDSSCQTEDVKVVPPSMRRIRAQKGQGIAAQMGHFSGSSGNMSVLSDSAGIVFPSRLDSDAGFHSLPRSGARANIQSLEPRLGALGPAGDMNGTFLYQRGHPQADENLGHLGGASGTGTLLRPKSQELRHFESENIMSPACVVSPHATYSTSIIPNATLSSSSEVIAIPTAQSAGQRESKSSGSSHARIKSRDHLISRHAVKGDPQSPGRHWNEGHATILSQDLDPHSPGEPALLSLCDSAVPLNAPANRENGSQAMPYNCRNNLAFPAHPQDVDGKSESSYSGGGGHSSSEPWEYKSSGNGRASPLKPHLATPGYSTPTSNMSSCSLDQTSNKEDAGSLYSEDHDGYCASVHTDSGHGSGNLCNSSDGFGNPRHSVINVFVGRAQKNQGDRSNYQDKSLSRNISLKKAKKPPLPPSRTDSLRRIPKKSSQCNGQVLNESLIATLQHSLQLSLPGKSGSSPSQSPCSDLEEPWLPRSRSQSTVSAGSSMTSATTPNVYSLCGATPSQSDTSSVKSEYTDPWGYYIDYTGMQEDPGNPAGGCSTSSGVPTGNGPVRHVQEGSRATMPQVPGGSVKPKIMSPEKSHRVISPSSGYSSQSNTPTALTPVPVFLKSVSPANGKGKPKPKVPERKSSLISSVSISSSSTSLSSSTSTEGSGTMKKLDPAVGSPPAPPPPPVPSPPFPCPADRSPFLPPPPPVTDCSQGSPLPHSPVFPPPPPEALIPFCSPPDWCLSPPRPALSPILPDSPVSLPLPPPLLPSSEPPPAPPLDPKFMKDTRPPFTNSGQPESSRGSLRPPSTKEETSRPPMPLITTEALQMVQLRPVRKNSGAEAAQLSERTAQEQRTPVAPQYHLKPSAFLKSRNSTNEMESESQPASVTSSLPTPAKSSSQGDHGSAAERGGPVSRSPGAPSAGEAEARPSPSTTPLPDSSPSRKPPPISKKPKLFLVVPPPQKDFAVEPAENVSEALRAVPSPTTGEEGSVHSREAKESSAAQAGSHATHPGTSVLEGGAAGSMSPSRVEANVPMVQPDVSPAPKQEEPAENSADTGGDGESCLSQQDGAAGVPETNAAGSSSEACDFLKEDGNDEVMTPSRPRTTEDLFAAIHRSKRKVLGRRDSDDDHSRNHSPSPPVTPTGAAPSLASPKQVGSIQRSIRKSSTSSDNFKALLLKKGSRSDTSARMSAAEMLKNTDPRFQRSRSEPSPDAPESPSSCSPSKNRRAQEEWAKNEGLMPRSLSFSGPRYGRSRTPPSAASSRYSMRNRIQSSPMTVISEGEGEAVEPVDSIARGALGAAEGCSLDGLAREEMDEGGLLCGEGPAASLQPQAPGPVDGTASAEGREPSPQCGGSLSEES

SEQ ID NO: 33433 - protein, 1617 aa, Artificial Sequence
  Synthetic polypeptide
FLPGCKLQESRVTFHLLMTVNPEWRTDPHISVSNLDEESRWTVHYTAPWHQQENVFLPTTRPPCVEDLHRQAKLNLKSVLRECDKLRHDGYRSSQYYSQGPTFAANASPFCDDYQDEDEETDQKCSLSSSEEERFISIRRPKTPASSDFSDLNTQTNWTKSLPLPTPEEKMRQQAQTVQADVVPINITGENFDRQASLRRSLIYTDTLVRRPKKVKRRKTITGVPDNIQKELASGTGQDDADGHSVYTPDHYSTLGRFNSCRSAGQRSETRDSSCQTEDVKVVPPSMRRIRAQKGQGIAAQMGHFSGSSGNMSVLSDSAGIVFPSRLDSDAGFHSLPRSGARANIQSLEPRLGALGPAGDMNGTFLYQRGHPQADENLGHLGGASGTGTLLRPKSQELRHFESENIMSPACVVSPHATYSTSIIPNATLSSSSEVIAIPTAQSAGQRESKSSGSSHARIKSRDHLISRHAVKGDPQSPGRHWNEGHATILSQDLDPHSPGEPALLSLCDSAVPLNAPANRENGSQAMPYNCRNNLAFPAHPQDVDGKSESSYSGGGGHSSSEPWEYKSSGNGRASPLKPHLATPGYSTPTSNMSSCSLDQTSNKEDAGSLYSEDHDGYCASVHTDSGHGSGNLCNSSDGFGNPRHSVINVFVGRAQKNQGDRSNYQDKSLSRNISLKKAKKPPLPPSRTDSLRRIPKKSSQCNGQVLNESLIATLQHSLQLSLPGKSGSSPSQSPCSDLEEPWLPRSRSQSTVSAGSSMTSATTPNVYSLCGATPSQSDTSSVKSEYTDPWGYYIDYTGMQEDPGNPAGGCSTSSGVPTGNGPVRHVQEGSRATMPQVPGGSVKPKIMSPEKSHRVISPSSGYSSQSNTPTALTPVPVFLKSVSPANGKGKPKPKVPERKSSLISSVSISSSSTSLSSSTSTEGSGTMKKLDPAVGSPPAPPPPPVPSPPFPCPADRSPFLPPPPPVTDCSQGSPLPHSPVFPPPPPEALIPFCSPPDWCLSPPRPALSPILPDSPVSLPLPPPLLPSSEPPPAPPLDPKFMKDTRPPFTNSGQPESSRGSLRPPSTKEETSRPPMPLITTEALQMVQLRPVRKNSGAEAAQLSERTAQEQRTPVAPQYHLKPSAFLKSRNSTNEMESESQPASVTSSLPTPAKSSSQGDHGSAAERGGPVSRSPGAPSAGEAEARPSPSTTPLPDSSPSRKPPPISKKPKLFLVVPPPQKDFAVEPAENVSEALRAVPSPTTGEEGSVHSREAKESSAAQAGSHATHPGTSVLEGGAAGSMSPSRVEANVPMVQPDVSPAPKQEEPAENSADTGGDGESCLSQQDGAAGVPETNAAGSSSEACDFLKEDGNDEVMTPSRPRTTEDLFAAIHRSKRKVLGRRDSDDDHSRNHSPSPPVTPTGAAPSLASPKQVGSIQRSIRKSSTSSDNFKALLLKKGSRSDTSARMSAAEMLKNTDPRFQRSRSEPSPDAPESPSSCSPSKNRRAQEEWAKNEGLMPRSLSFSGPRYGRSRTPPSAASSRYSMRNRIQSSPMTVISEGEGEAVEPVDSIARGALGAAEGCSLDGLAREEMDEGGLLCGEGPAASLQPQAPGPVDGTASAEGREPSPQCGGSLSEES

SEQ ID NO: 33434 - protein, 246 aa, Artificial Sequence
  Synthetic polypeptide
FLPGCKLQESRVTFHLLMTVNPEWRTDPHISVSNLDEESRWTVHYTAPWHQQENVFLPTTRPPCVEDLHRQAKLNLKSVLRECDKLRHDGYRSSQYYSQGPTFAANASPFCDDYQDEDEETDQKCSLSSSEEERFISIRRPKTPASSDFSDLNTQTNWTKSLPLPTPEEKMRQQAQTVQADVVPINITASGTGQDDADGHSVYTPDHYSTLGRFNSCRSAGQRSETRDSSCQTEDVKVVPPSMRRI

SEQ ID NO: 33435 - protein, 167 aa, Artificial Sequence
  Synthetic polypeptide
FLPGCKLQESRVTFHLLMTVNPEWRTDPHISVSNLDEESRWTVHYTAPWHQQENVFLPTTRPPCVEDLHRQAKLNLKSVLRECDKLRHDGYRSSQYYSQGPTFAANASPFCDDYQDEDEETDQKCSLSSSEEERFISIRRPKTPASSDFSDLNTQTNWTKSLPLPTP

SEQ ID NO: 33436 - protein, 147 aa, Artificial Sequence
  Synthetic polypeptide
FLPGCKLQESRVTFHLLMTVNPEWRTDPHISVSNLDEESRWTVHYTAPWHQQENVFLPTTRPPCVEDLHRQAKLNLKSVLRECDKLRHDGYRSSQYYSQGPTFAANASPFCDDYQDEDEETDQKCSLSSSEEERFISIRRPKTPASS

SEQ ID NO: 33437 - protein, 12 aa, Artificial Sequence
  Synthetic polypeptide
FTQQSYYWRFPT

SEQ ID NO: 33438 - protein, 13 aa, Artificial Sequence
  Synthetic polypeptide
LPSNPITGGFQPR

SEQ ID NO: 33439 - protein, 1550 aa, Artificial Sequence
  Synthetic polypeptide
YPAILLLAVSNLDEESRWTVHYTAPWHQQENVFLPTTRPPCVEDLHRQAKLNLKSVLRECDKLRHDGYRSSQYYSQGPTFAANASPFCDDYQDEDEETDQKCSLSSSEEERFISIRRPKTPASSDFSDLNTQTNWTKSLPLPTPEEKMRQQAQTVQADVVPINITASGTGQDDADGHSVYTPDHYSTLGRFNSCRSAGQRSETRDSSCQTEDVKVVPPSMRRIRAQKGQGIAAQMGHFSGSSGNMSVLSDSAGIVFPSRLDSDAGFHSLPRSGARANIQSLEPRLGALGPAGDMNGTFLYQRGHPQADENLGHLGGASGTGTLLRPKSQELRHFESENIMSPACVVSPHATYSTSIIPNATLSSSSEVIAIPTAQSAGQRESKSSGSSHARIKSRDHLISRHAVKGDPQSPGRHWNEGHATILSQDLDPHSPGEPALLSLCDSAVPLNAPANRENGSQAMPYNCRNNLAFPAHPQDVDGKSESSYSGGGGHSSSEPWEYKSSGNGRASPLKPHLATPGYSTPTSNMSSCSLDQTSNKEDAGSLYSEDHDGYCASVHTDSGHGSGNLCNSSDGFGNPRHSVINVFVGRAQKNQGDRSNYQDKSLSRNISLKKAKKPPLPPSRTDSLRRIPKKSSQCNGQVLNESLIATLQHSLQLSLPGKSGSSPSQSPCSDLEEPWLPRSRSQSTVSAGSSMTSATTPNVYSLCGATPSQSDTSSVKSEYTDPWGYYIDYTGMQEDPGNPAGGCSTSSGVPTGNGPVRHVQEGSRATMPQVPGGSVKPKIMSPEKSHRVISPSSGYSSQSNTPTALTPVPVFLKSVSPANGKGKPKPKVPERKSSLISSVSISSSSTSLSSSTSTEGSGTMKKLDPAVGSPPAPPPPPVPSPPFPCPADRSPFLPPPPPVTDCSQGSPLPHSPVFPPPPPEALIPFCSPPDWCLSPPRPALSPILPDSPVSLPLPPPLLPSSEPPPAPPLDPKFMKDTRPPFTNSGQPESSRGSLRPPSTKEETSRPPMPLITTEALQMVQLRPVRKNSGAEAAQLSERTAQEQRTPVAPQYHLKPSAFLKSRNSTNEMESESQPASVTSSLPTPAKSSSQGDHGSAAERGGPVSRSPGAPSAGEAEARPSPSTTPLPDSSPSRKPPPISKKPKLFLVVPPPQKDFAVEPAENVSEALRAVPSPTTGEEGSVHSREAKESSAAQAGSHATHPGTSVLEGGAAGSMSPSRVEANVPMVQPDVSPAPKQEEPAENSADTGGDGESCLSQQDGAAGVPETNAAGSSSEACDFLKEDGNDEVMTPSRPRTTEDLFAAIHRSKRKVLGRRDSDDDHSRNHSPSPPVTPTGAAPSLASPKQVGSIQRSIRKSSTSSDNFKALLLKKGSRSDTSARMSAAEMLKNTDPRFQRSRSEPSPDAPESPSSCSPSKNRRAQEEWAKNEGLMPRSLSFSGPRYGRSRTPPSAASSRYSMRNRIQSSPMTVISEGEGEAVEPVDSIARGALGAAEGCSLDGLAREEMDEGGLLCGEGPAASLQPQAPGPVDGTASAEGREPSPQCGGSLSEES

SEQ ID NO: 33440 - protein, 1594 aa, Artificial Sequence
  Synthetic polypeptide
YPAILLLAVSNLDEESRWTVHYTAPWHQQENVFLPTTRPPCVEDLHRQAKLNLKSVLRECDKLRHDGYRSSQYYSQGPTFAANASPFCDDYQDEDEETDQKCSLSSSEEERFISIRRPKTPASSDFSDLNTQTNWTKSLPLPTPEEKMRQQAQTVQADVVPINITGENFDRQASLRRSLIYTDTLVRRPKKVKRRKTITGVPDNIQKELASGTGQDDADGHSVYTPDHYSTLGRFNSCRSAGQRSETRDSSCQTEDVKVVPPSMRRIRAQKGQGIAAQMGHFSGSSGNMSVLSDSAGIVFPSRLDSDAGFHSLPRSGARANIQSLEPRLGALGPAGDMNGTFLYQRGHPQADENLGHLGGASGTGTLLRPKSQELRHFESENIMSPACVVSPHATYSTSIIPNATLSSSSEVIAIPTAQSAGQRESKSSGSSHARIKSRDHLISRHAVKGDPQSPGRHWNEGHATILSQDLDPHSPGEPALLSLCDSAVPLNAPANRENGSQAMPYNCRNNLAFPAHPQDVDGKSESSYSGGGGHSSSEPWEYKSSGNGRASPLKPHLATPGYSTPTSNMSSCSLDQTSNKEDAGSLYSEDHDGYCASVHTDSGHGSGNLCNSSDGFGNPRHSVINVFVGRAQKNQGDRSNYQDKSLSRNISLKKAKKPPLPPSRTDSLRRIPKKSSQCNGQVLNESLIATLQHSLQLSLPGKSGSSPSQSPCSDLEEPWLPRSRSQSTVSAGSSMTSATTPNVYSLCGATPSQSDTSSVKSEYTDPWGYYIDYTGMQEDPGNPAGGCSTSSGVPTGNGPVRHVQEGSRATMPQVPGGSVKPKIMSPEKSHRVISPSSGYSSQSNTPTALTPVPVFLKSVSPANGKGKPKPKVPERKSSLISSVSISSSSTSLSSSTSTEGSGTMKKLDPAVGSPPAPPPPPVPSPPFPCPADRSPFLPPPPPVTDCSQGSPLPHSPVFPPPPPEALIPFCSPPDWCLSPPRPALSPILPDSPVSLPLPPPLLPSSEPPPAPPLDPKFMKDTRPPFTNSGQPESSRGSLRPPSTKEETSRPPMPLITTEALQMVQLRPVRKNSGAEAAQLSERTAQEQRTPVAPQYHLKPSAFLKSRNSTNEMESESQPASVTSSLPTPAKSSSQGDHGSAAERGGPVSRSPGAPSAGEAEARPSPSTTPLPDSSPSRKPPPISKKPKLFLVVPPPQKDFAVEPAENVSEALRAVPSPTTGEEGSVHSREAKESSAAQAGSHATHPGTSVLEGGAAGSMSPSRVEANVPMVQPDVSPAPKQEEPAENSADTGGDGESCLSQQDGAAGVPETNAAGSSSEACDFLKEDGNDEVMTPSRPRTTEDLFAAIHRSKRKVLGRRDSDDDHSRNHSPSPPVTPTGAAPSLASPKQVGSIQRSIRKSSTSSDNFKALLLKKGSRSDTSARMSAAEMLKNTDPRFQRSRSEPSPDAPESPSSCSPSKNRRAQEEWAKNEGLMPRSLSFSGPRYGRSRTPPSAASSRYSMRNRIQSSPMTVISEGEGEAVEPVDSIARGALGAAEGCSLDGLAREEMDEGGLLCGEGPAASLQPQAPGPVDGTASAEGREPSPQCGGSLSEES

SEQ ID NO: 33441 - protein, 223 aa, Artificial Sequence
  Synthetic polypeptide
YPAILLLAVSNLDEESRWTVHYTAPWHQQENVFLPTTRPPCVEDLHRQAKLNLKSVLRECDKLRHDGYRSSQYYSQGPTFAANASPFCDDYQDEDEETDQKCSLSSSEEERFISIRRPKTPASSDFSDLNTQTNWTKSLPLPTPEEKMRQQAQTVQADVVPINITASGTGQDDADGHSVYTPDHYSTLGRFNSCRSAGQRSETRDSSCQTEDVKVVPPSMRRI

SEQ ID NO: 33442 - protein, 144 aa, Artificial Sequence
  Synthetic polypeptide
YPAILLLAVSNLDEESRWTVHYTAPWHQQENVFLPTTRPPCVEDLHRQAKLNLKSVLRECDKLRHDGYRSSQYYSQGPTFAANASPFCDDYQDEDEETDQKCSLSSSEEERFISIRRPKTPASSDFSDLNTQTNWTKSLPLPTP

SEQ ID NO: 33443 - protein, 124 aa, Artificial Sequence
  Synthetic polypeptide
YPAILLLAVSNLDEESRWTVHYTAPWHQQENVFLPTTRPPCVEDLHRQAKLNLKSVLRECDKLRHDGYRSSQYYSQGPTFAANASPFCDDYQDEDEETDQKCSLSSSEEERFISIRRPKTPASS

SEQ ID NO: 33444 - protein, 19 aa, Artificial Sequence
  Synthetic polypeptide
SFIILERSPMCHSPDLQLR

SEQ ID NO: 33445 - protein, 468 aa, Artificial Sequence
  Synthetic polypeptide
DRLLAQPFRASSSWKEAPCATPLICSFGRPVDLEKDDYQKVVCNNEHCPCSTWMHLQCFYEWESSILVQFNCIGRARSWNEKQCRQNMWTKKGYDLAFRFCSCRCGQGHLKKDTDWYQVKRMQDEKKKKSGSEKNTGRPPGEAAEEAKKCRPPNKPQKGPSHDLPRRHSMDRQNSQEKAVGAAAYGARSPGGSPGQSPPTGYSILSPAHFSGPRSSRYLGEFLKNAIHLEPHKKAMAGGHVFRNAHFDYSPAGLAVHRGGHFDTPVQFLRRLDLSELLTHIPRHKLNTFHVRMEDDAQVGQGEDLRKFILAALSASHRNVVNCALCHRALPVFEQFPLVDGTLFLSPSRHDEIEYDVPCHLQGRLMHLYAVCVDCLEGVHKIICIKCKSRWDGSWHQLGTMYTYDILAASPCCQARLNCKHCGKPVIDVRIGMQYFSEYSNVQQCPHCGNLDYHFVKPFSSFKVLEAY

SEQ ID NO: 33446 - protein, 18 aa, Artificial Sequence
  Synthetic polypeptide
LSHLELHHLGKKPHVPLP

SEQ ID NO: 33447 - protein, 462 aa, Artificial Sequence
  Synthetic polypeptide
AQKFEPAEEALQRAREEEEKRKEITSHFQSTLTDIQGQIEQQSERNMKLCQENTELAEKLKSIIDQYELREEHLDKIFKHRELQQKLVDAKLEQAQEMMKEAEERHKREKEYLLNQAAEWKLQAKVLKEQETVLQAQLTLYSGRFEEFQSTLTKSNEVFATFKQEMDKTTKKMKKLEKDTATWKARFENCNKALLDMIEEKALRAKEYECFVMKIGRLENLCRALQEERNELHKKIRDAEISEKDDQSQHNSDEEPESNVSVDQEIDAEEVNSVQTAVKNLATAFMIIHHPESTPHQSKETQPEIGSSQESADAALKEPEQPPLIPSRDSESPLPPLTPQAEAEGGSDAEPPSKASNSPAGLGAETQCEGLPVGAQADQASWKPEAEASGQAPQAPTEASLQKMEADVPAPACAAEEHVAAMVPACEPSRQPPRAAAEELPVGASAGPQPRNVADTNLEGVD

SEQ ID NO: 33448 - protein, 66 aa, Artificial Sequence
  Synthetic polypeptide
VWHVPAVPATWEAEAGGSFEPRSSSLQKRRFSGHVRKKRKGRKSQAISRVPSRTSRARSSSRVSEI

SEQ ID NO: 33449 - protein, 83 aa, Artificial Sequence
  Synthetic polypeptide
WSQWVTSVILAFWKPKAGGSLQLGNSRPAWATFMRARHCLYQKSGKLAECGTFLQCQLLGRLKQEDHLSPEVRACRRGASAGT

SEQ ID NO: 33450 - protein, 19 aa, Artificial Sequence
  Synthetic polypeptide
DRSRGQEIKTILANTGMFV

SEQ ID NO: 33451 - protein, 25 aa, Artificial Sequence
  Synthetic polypeptide
TDHEVRRSRPSWLTRGCSSNPRRLC

SEQ ID NO: 33452 - protein, 49 aa, Artificial Sequence
  Synthetic polypeptide
HGDVRLTPEDFARAQKYCKYAGSALQYEDVSTAVQNLQKALKLLTTGRE

SEQ ID NO: 33453 - protein, 36 aa, Artificial Sequence
  Synthetic polypeptide
AKSTSSLYKLPSLRPKKPSKILKFLLAVLWSTTMKL

SEQ ID NO: 33454 - protein, 41 aa, Artificial Sequence
  Synthetic polypeptide
GPHWKQMLIPYFLYSLENCEPNQLLLFINYPASGQRSPRKY

SEQ ID NO: 33455 - protein, 164 aa, Artificial Sequence
  Synthetic polypeptide
TTQPQAKEALENTEVPVGCLMVYNNEVVGKGRNEVNQTKNATRHAEMVAIDQVLDWCRQSGKSPSEVFEHTVLYVTVEPCIMCAAALRLMKIPLVVYGCQNERFGGCGSVLNIASADLPNTGRPFQCIPGYRAEEAVEMLKTFYKQENPNAPKSKVRKKECQKS

SEQ ID NO: 33456 - protein, 434 aa, Artificial Sequence
  Synthetic polypeptide
LMPVILTLRETEAGRSLEPRSLRPAWATYGNHISTKKKKIARWYWQKEKIPKYVEFMKDNYPPSFKYEDFGPLFTAKFFNANQWADIFQASGAKYIVLTSKHHEGFTLWGSEYSWNWNAIDEGPKRDIVKELEVAIRNRTDLRFGLYYSLFEWFHPLFLEDESSSFHKRQFPVSKTLPELYELVNNYQPEVLWSDGDGGAPDQYWNSTGFLAWLYNESPVRGTVVTNDRWGAGSICKHGGFYTCSDRYNPGHLLPHKWENCMTIDKLSWGYRREAGISDYLTIEELVKQLVETVSCGGNLLMNIGPTLDGTISVVFEERLRQMGSWLKVNGEAIYETHTWRSQNDTVTPDVWYTSKPKEKLVYAIFLKWPTSGQLFLGHPKAILGATEVKLLGHGQPLNWISLEQNGIMVELPQLTIHQMPCKWGWALALTNVI

SEQ ID NO: 33457 - protein, 16 aa, Artificial Sequence
  Synthetic polypeptide
PGGIGKRKRYRSMWNL

SEQ ID NO: 33458 - protein, 41 aa, Artificial Sequence
  Synthetic polypeptide
AQEFKTSLGNIWKPHLYKEKKNSQVVLAKGKDTEVCGIYER

SEQ ID NO: 33459 - protein, 132 aa, Artificial Sequence
  Synthetic polypeptide
LMPVILTLRETEAGRSLEPRSLRPAWATYGNHISTKKKKIARWYWQKEKIPKYVEFMKDNYPPSFKYEDFGPLFTAKFFNANQWADIFQASGAKYIVLTSKHHEATCRDSFMWRKSFDEYWAHTRWHHFCSF

SEQ ID NO: 33460 - protein, 10 aa, Artificial Sequence
  Synthetic polypeptide
FQHFEKLRQQ

SEQ ID NO: 33461 - protein, 33 aa, Artificial Sequence
  Synthetic polypeptide
ETEAAIRKELNEFKSTEMEVHEESRQFTRFHRP

SEQ ID NO: 33462 - protein, 69 aa, Artificial Sequence
  Synthetic polypeptide
PFVWVLFSQPSPTTGERDNGPLLLIPHSDQIPQLQSPAIGLHHQLNLIDEHNDVQKKTFTKWINARFSK

SEQ ID NO: 33463 - protein, 15 aa, Artificial Sequence
  Synthetic polypeptide
LMNTMTYRRKPLPNG

SEQ ID NO: 33464 - protein, 3455 aa, Artificial Sequence
  Synthetic polypeptide
PFVWVLFSQPSPTTGERDNGPLLLIPHSDQIPQLQSPAIGLHHQLNLIDEHNDVQKKTFTKWINARFSKSGKPPINDMFTDLKDGRKLLDLLEGLTGTSLPKERGSTRVHALNNVNRVLQVLHQNNVELVNIGGTDIVDGNHKLTLGLLWSIILHWQVKDVMKDVMSDLQQTNSEKILLSWVRQTTRPYSQVNVLNFTTSWTDGLAFNAVLHRHKPDLFSWDKVVKMSPIERLEHAFSKAQTYLGIEKLLDPEDVAVQLPDKKSIIMYLTSLFEVLPQQVTIDAIREVETLPRKYKKECEEEAINIQSTAPEEEHESPRAETPSTVTEVDMDLDSYQIALEEVLTWLLSAEDTFQEQDDISDDVEEVKDQFATHEAFMMELTAHQSSVGSVLQAGNQLITQGTLSDEEEFEIQEQMTLLNARWEALRVESMDRQSRLHDVLMELQKKQLQQLSAWLTLTEERIQKMETCPLDDDVKSLQKLLEEHKSLQSDLEAEQVKVNSLTHMVVIVDENSGESATAILEDQLQKLGERWTAVCRWTEERWNRLQEINILWQELLEEQCLLKAWLTEKEEALNKVQTSNFKDQKELSVSVRRLAILKEDMEMKRQTLDQLSEIGQDVGQLLDNSKASKKINSDSEELTQRWDSLVQRLEDSSNQVTQAVAKLGMSQIPQKDLLETVRVREQAITKKSKQELPPPPPPKKRQIHVDIEAKKKFDAISAELLNWILKWKTAIQTTEIKEYMKMQDTSEMKKKLKALEKEQRERIPRADELNQTGQILVEQMGKEGLPTEEIKNVLEKVSSEWKNVSQHLEDLERKIQLQEDINAYFKQLDELEKVIKTKEEWVKHTSISESSRQSLPSLKDSCQRELTNLLGLHPKIEMARASCSALMSQPSAPDFVQRGFDSFLGRYQAVQEAVEDRQQHLENELKGQPGHAYLETLKTLKDVLNDSENKAQVSLNVLNDLAKVEKALQEKKTLDEILENQKPALHKLAEETKALEKNVHPDVEKLYKQEFDDVQGKWNKLKVLVSKDLHLLEEIALTLRAFEADSTVIEKWMDGVKDFLMKQQAAQGDDAGLQRQLDQCSAFVNEIETIESSLKNMKEIETNLRSGPVAGIKTWVQTRLGDYQTQLEKLSKEIATQKSRLSESQEKAANLKKDLAEMQEWMTQAEEEYLERDFEYKSPEELESAVEEMKRAKEDVLQKEVRVKILKDNIKLLAAKVPSGGQELTSELNVVLENYQLLCNRIRGKCHTLEEVWSCWIELLHYLDLETTWLNTLEERMKSTEVLPEKTDAVNEALESLESVLRHPADNRTQIRELGQTLIDGGILDDIISEKLEAFNSRYEDLSHLAESKQISLEKQLQVLRETDQMLQVLQESLGELDKQLTTYLTDRIDAFQVPQEAQKIQAEISAHELTLEELRRNMRSQPLTSPESRTARGGSQMDVLQRKLREVSTKFQLFQKPANFEQRMLDCKRVLDGVKAELHVLDVKDVDPDVIQTHLDKCMKLYKTLSEVKLEVETVIKTGRHIVQKQQTDNPKGMDEQLTSLKVLYNDLGAQVTEGKQDLERASQLARKMKKEAASLSEWLSATETELVQKSTSEGLLGDLDTEISWAKNVLKDLEKRKADLNTITESSAALQNLIEGSEPILEERLCVLNAGWSRVRTWTEDWCNTLMNHQNQLEIFDGNVAHISTWLYQAEALLDEIEKKPTSKQEEIVKRLVSELDDANLQVENVRDQALILMNARGSSSRELVEPKLAELNRNFEKVSQHIKSAKLLIAQEPLYQCLVTTETFETGVPFSDLEKLENDIENMLKFVEKHLESSDEDEKMDEESAQIEEVLQRGEEMLHQPMEDNKKEKIRLQLLLLHTRYNKIKAIPIQQRKMGQLASGIRSSLLPTDYLVEINKILLCMDDVELSLNVPELNTAIYEDFSFQEDSLKNIKDQLDKLGEQIAVIHEKQPDVILEASGPEAIQIRDTLTQLNAKWDRINRMYSDRKGCFDRAMEEWRQFHCDLNDLTQWITEAEELLVDTCAPGGSLDLEKARIHQQELEVGISSHQPSFAALNRTGDGIVQKLSQADGSFLKEKLAGLNQRWDAIVAEVKDRQPRLKGESKQVMKYRHQLDEIICWLTKAEHAMQKRSTTELGENLQELRDLTQEMEVHAEKLKWLNRTELEMLSDKSLSLPERDKISESLRTVNMTWNKICREVPTTLKECIQEPSSVSQTRIAAHPNVQKVVLVSSASDIPVQSHRTSEISIPADLDKTITELADWLVLIDQMLKSNIVTVGDVEEINKTVSRMKITKADLEQRHPQLDYVFTLAQNLKNKASSSDMRTAITEKLERVKNQWDGTQHGVELRQQQLEDMIIDSLQWDDHREETEELMRKYEARLYILQQARRDPLTKQISDNQILLQELGPGDGIVMAFDNVLQKLLEEYGSDDTRNVKETTEYLKTSWINLKQSIADRQNALEAEWRTVQASRRDLENFLKWIQEAETTVNVLVDASHRENALQDSILARELKQQMQDIQAEIDAHNDIFKSIDGNRQKMVKALGNSEEATMLQHRLDDMNQRWNDLKAKSASIRAHLEASAEKWNRLLMSLEELIKWLNMKDEELKKQMPIGGDVPALQLQYDHCKALRRELKEKEYSVLNAVDQARVFLADQPIEAPEEPRRNLQSKTELTPEERAQKIAKAMRKQSSEVKEKWESLNAVTSNWQKQVDKALEKLRDLQGAMDDLDADMKEAESVRNGWKPVGDLLIDSLQDHIEKIMAFREEIAPINFKVKTVNDLSSQLSPLDLHPSLKMSRQLDDLNMRWKLLQVSVDDRLKQLQEAHRDFGPSSQHFLSTSVQLPWQRSISHNKVPYYINHQTQTTCWDHPKMTELFQSLADLNNVRFSAYRTAIKIRRLQKALCLDLLELSTTNEIFKQHKLNQNDQLLSVPDVINCLTTTYDGLEQMHKDLVNVPLCVDMCLNWLLNVYDTGRTGKIRVQSLKIGLMSLSKGLLEEKYRYLFKEVAGPTEMCDQRQLGLLLHDAIQIPRQLGEVAAFGGSNIEPSVRSCFQQNNNKPEISVKEFIDWMHLEPQSMVWLPVLHRVAAAETAKHQAKCNICKECPIVGFRYRSLKHFNYDVCQSCFFSGRTAKGHKLHYPMVEYCIPTTSGEDVRDFTKVLKNKFRSKKYFAKHPRLGYLPVQTVLEGDNLETPITLISMWPEHYDPSQSPQLFHDDTHSRIEQYATRLAQMERTNGSFLTDSSSTTGSVEDEHALIQQYCQTLGGESPVSQPQSPAQILKSVEREERGELERIIADLEEEQRNLQVEYEQLKDQHLRRGLPVGSPPESIISPHHTSEDSELIAEAKLLRQHKGRLEARMQILEDHNKQLESQLHRLRQLLEQPESDSRINGVSPWASPQHSALSYSLDPDASGPQFHQAAGEDLLAPPHDTSTDLTEVMEQIHSTFPSCCPNVPSRPQAM

SEQ ID NO: 33465 - protein, 171 aa, Artificial Sequence
  Synthetic polypeptide
PFVWVLFSQPSPTTGERDNGPLLLIPHSDQIPQLQSPAIGLHHQLNLIDEHNDVQKKTFTKWINARFSKSGKPPINDMFTDLKDGRKLLDLLEGLTGTSLPKERGSTRVHALNNVNRVLQVLHQNNVELVNIGGTDIVDGNHKLTLGLLWSIILHWQVKDVMKDVMSDLQQ

SEQ ID NO: 33466 - protein, 879 aa, Artificial Sequence
  Synthetic polypeptide
LSDGWADRDEVIEGYEVEANGGITIKLQSPEVRSFDDYFLKLRLDTNTRNPWFPEFWQHRFQCRLPGHLLENPNFKRICTGNESLEENYVQDSKMGFVINAIYAMAHGLQNMHHALCPGHVGLCDAMKPIDGSKLLDFLIKSSFIGVSGEEVWFDEKGDAPGRYDIMNLQYTEANRYDYVHVGTWHEGVLNIDDYKIQMNKSGVVRSVCSEPCLKGQIKVIRKGEVSCCWICTACKENEYVQDEFTCKACDLGWWPNADLTGCEPIPVRYLEWSNIESIIAIAFSCLGILVTLFVTLIFVLYRDTPVVKSSSRELCYIILAGIFLGYVCPFTLIAKPTTTSCYLQRLLVGLSSAMCYSALVTKTNRIARILAGSKKKICTRKPRFMSAWAQVIIASILISVQLTLVVTLIIMEPPMPILSYPSIKEVYLICNTSNLGVVAPLGYNGLLIMSCTYYAFKTRNVPANFNEAKYIAFTMYTTCIIWLAFVPIYFGSNYKIITTCFAVSLSVTVALGCMFTPKMYIIIAKPERNVRSAFTTSDVVRMHVGDGKLPCRSNTFLNIFRRKKAGAGNANSNGKSVSWSEPGGGQVPKGQHMWHRLSVHVKTNETACNQTAVIKPLTKSYQGSGKSLTFSDTSTKTLYNVEEEEDAQPIRFSPPGSPSMVVHRRVPSAATTPPLPSHLTAEETPLFLAEPALPKGLPPPLQQQQQPPPQQKSLMDQLQGVVSNFSTAIPDFHAVLAGPGGPGNGLRSLYPPPPPPQHLQMLPLQLSTFGEELVSPPADDDDDSERFKLLQEYVYEHEREGNTEEDELEEEEEDLQAASKLTPDDSPALTPPSPFRDSVASGSSVPSSPVSESVLCTPPNVSYASVILRDYKQSSSTL

SEQ ID NO: 33467 - protein, 591 aa, Artificial Sequence
  Synthetic polypeptide
LSDGWADRDEVIEGYEVEANGGITIKLQSPEVRSFDDYFLKLRLDTNTRNPWFPEFWQHRFQCRLPGHLLENPNFKRICTGNESLEENYVQDSKMGFVINAIYAMAHGLQNMHHALCPGHVGLCDAMKPIDGSKLLDFLIKSSFIGVSGEEVWFDEKGDAPGRYDIMNLQYTEANRYDYVHVGTWHEGVLNIDDYKIQMNKSGVVRSVCSEPCLKGQIKVIRKGEVSCCWICTACKENEYVQDEFTCKACDLGWWPNADLTGCEPIPVRYLEWSNIESIIAIAFSCLGILVTLFVTLIFVLYRDTPVVKSSSRELCYIILAGIFLGYVCPFTLIAKPTTTSCYLQRLLVGLSSAMCYSALVTKTNRIARILAGSKKKICTRKPRFMSAWAQVIIASILISVQLTLVVTLIIMEPPMPILSYPSIKEVYLICNTSNLGVVAPLGYNGLLIMSCTYYAFKTRNVPANFNEAKYIAFTMYTTCIIWLAFVPIYFGSNYKIITTCFAVSLSVTVALGCMFTPKMYIIIAKPERNVRSAFTTSDVVRMHVGDGKLPCRSNTFLNIFRRKKAGAGNAKKRQPEFSPTSQCPSAHVQL

SEQ ID NO: 33468 - protein, 593 aa, Artificial Sequence
  Synthetic polypeptide
LSDGWADRDEVIEGYEVEANGGITIKLQSPEVRSFDDYFLKLRLDTNTRNPWFPEFWQHRFQCRLPGHLLENPNFKRICTGNESLEENYVQDSKMGFVINAIYAMAHGLQNMHHALCPGHVGLCDAMKPIDGSKLLDFLIKSSFIGVSGEEVWFDEKGDAPGRYDIMNLQYTEANRYDYVHVGTWHEGVLNIDDYKIQMNKSGVVRSVCSEPCLKGQIKVIRKGEVSCCWICTACKENEYVQDEFTCKACDLGWWPNADLTGCEPIPVRYLEWSNIESIIAIAFSCLGILVTLFVTLIFVLYRDTPVVKSSSRELCYIILAGIFLGYVCPFTLIAKPTTTSCYLQRLLVGLSSAMCYSALVTKTNRIARILAGSKKKICTRKPRFMSAWAQVIIASILISVQLTLVVTLIIMEPPMPILSYPSIKEVYLICNTSNLGVVAPLGYNGLLIMSCTYYAFKTRNVPANFNEAKYIAFTMYTTCIIWLAFVPIYFGSNYKIITTCFAVSLSVTVALGCMFTPKMYIIIAKPERNVRSAFTTSDVVRMHVGDGKLPCRSNTFLNIFRRKKAGAGNAKWRTGAQGTAYVAPPLCAREDQ

SEQ ID NO: 33469 - protein, 19 aa, Artificial Sequence
  Synthetic polypeptide
WGHVTKIQDTAIQAPNMIT

SEQ ID NO: 33470 - protein, 72 aa, Artificial Sequence
  Synthetic polypeptide
GNAYKMMGTCDKDTGYCHTSSKHDNINIEEAARFLVEKILVNHQSFPNEENDVDKIKLDQETLRAENKSQCC

SEQ ID NO: 33471 - protein, 52 aa, Artificial Sequence
  Synthetic polypeptide
PCFPYSCGTVLLCRYLQEVICVLFIGAVNLIISIPRYYRMTIRRCIDISLDT

SEQ ID NO: 33472 - protein, 22 aa, Artificial Sequence
  Synthetic polypeptide
GLRSHASRTAVEPYYYAATFKK

SEQ ID NO: 33473 - protein, 53 aa, Artificial Sequence
  Synthetic polypeptide
KFSEASVAMLPVQLWNRIIMPLPSRSNLRAVYWSCEFNHLNPTLLQDDYKKMY

SEQ ID NO: 33474 - protein, 14 aa, Artificial Sequence
  Synthetic polypeptide
GLPSHVELKFHLLG

SEQ ID NO: 33475 - protein, 62 aa, Artificial Sequence
  Synthetic polypeptide
GETPFAWLSCSHLPPCKMCLSPSALIVRPPQPRGTEIPLTWMTMDHLLVRYYLSQARWCTTG

SEQ ID NO: 33476 - protein, 62 aa, Artificial Sequence
  Synthetic polypeptide
MQWLMPAIPALWEADARGLLEVRSSRPALSTGKHLFTFHHKLNSVLKLLILLLNFAEDPKIA

SEQ ID NO: 33477 - protein, 43 aa, Artificial Sequence
  Synthetic polypeptide
AECSGLCLQSQHFGRLTQEDCLKSGVQDQRYQLANISSHSTTS

SEQ ID NO: 33478 - protein, 176 aa, Artificial Sequence
  Synthetic polypeptide
SQEFKTSVINWQTSLHIPPQAKLSPEASDLIIKLCRGPEDRLGKNGADEIKAHPFFKTIDFSSDLRQQSASYIPKITHPTDTSNFDPVDPDKLWSDDNEEENVNDTLNGWYKNGKHPEHAFYEFTFRRFFDDNGYPYNYPKPIEYEYINSQGSEQQSDEDDQNTGSEIKNRDLVYV

SEQ ID NO: 33479 - protein, 20 aa, Artificial Sequence
  Synthetic polypeptide
DRLGQHSYQLANISSHSTTS

SEQ ID NO: 33480 - protein, 202 aa, Artificial Sequence
  Synthetic polypeptide
PGMVAHTCNPSALEGHSRKNTGTQEFEIGLGNIVINWQTSLHIPPQAKLSPEASDLIIKLCRGPEDRLGKNGADEIKAHPFFKTIDFSSDLRQQSASYIPKITHPTDTSNFDPVDPDKLWSDDNEEENVNDTLNGWYKNGKHPEHAFYEFTFRRFFDDNGYPYNYPKPIEYEYINSQGSEQQSDEDDQNTGSEIKNRDLVYV

SEQ ID NO: 33481 - protein, 65 aa, Artificial Sequence
  Synthetic polypeptide
GRARWLTPVIPAIWEAEEEEAVLFCLIALVTKLMFTSLSLAPGSALILQKTELKSQAYFPVGLCL

SEQ ID NO: 33482 - protein, 17 aa, Artificial Sequence
  Synthetic polypeptide
SQQFGRPRRKKQYFFVS

SEQ ID NO: 33483 - protein, 92 aa, Artificial Sequence
  Synthetic polypeptide
PGAVAHTCNPSNLGGRGGRSSTFLSHSISNQANVHQSVISSWLSTDPAKDRIEITSLLPSRSLSVNTLDVLGPCLVCGTDAEAIYVTRHLFS

SEQ ID NO: 33484 - protein, 250 aa, Artificial Sequence
  Synthetic polypeptide
SEAPNFLPLNFDPSTGFLKLVNGISVSMITSTPIPKSSQSENGIIKTDKVFEVMLATDRSHYAKCNPYMDSPQSIGFQATISAPHMHAYALELLFDQLHEGAKALDVGSGSGILTACFARMVGCTGKVIGIDHIKELVDDSVNNVRKDDPTLLSSGRVQLVVGDGRMGYAEEAPYDAIHVGAAAPVVPQALIDQLKPGGRLILPVGPAGGNQMLEQYDKLQDGSIKMKPLMGVIYVPLTDKEKQWSRDEL

SEQ ID NO: 33485 - protein, 24 aa, Artificial Sequence
  Synthetic polypeptide
LPPLPSPNPVSQKMESSRQIKYLK

SEQ ID NO: 33486 - protein, 29 aa, Artificial Sequence
  Synthetic polypeptide
IGKWHQRINDYLHSHPQIQSVRKWNHQDR

SEQ ID NO: 33487 - protein, 88 aa, Artificial Sequence
  Synthetic polypeptide
SEAPNFLPLNFDPSTGFLKLVNGISVSMITSTPIPKSSQSENGIIKTDKVFEVMLATDRSHYAKCNPYMDSPQSIGFAELLSLGSGRL

SEQ ID NO: 33488 - protein, 249 aa, Artificial Sequence
  Synthetic polypeptide
SEAPNFLPLNFDPSTGFLKLVNGISVSMITSTPIPKSSQSENGIIKTDKVFEVMLATDRSHYAKCNPYMDSPQSIGFQATISAPHMHAYALELLFDQLHEGAKALDVGSGSGILTACFARMVGCTGKVIGIDHIKELVDDSVNNVRKDDPTLLSSGRVQLVVGDGRMGYAEEAPYDAIHVGAAAPVVPQALIDQLKPGGRLILPVGPAGGNQMLEQYDKLQDGSIKMKPLMGVIYVPLTDKEKQWSRWK

SEQ ID NO: 33489 - protein, 84 aa, Artificial Sequence
  Synthetic polypeptide
SEAPNFLPLNFDPSTGFLKLVNGISVSMITSTPIPKSSQSENGIIKTDKVFEVMLATDRSHYAKCNPYMDSPQSIESPVFNSFS

SEQ ID NO: 33490 - protein, 94 aa, Artificial Sequence
  Synthetic polypeptide
SEAPNFLPLNFDPSTGFLKLVNGISVSMITSTPIPKSSQSENGIIKTDKVFEVMLATDRSHYAKCNPYMDSPQSIADSTGEEIFSCRTLEGLFY

SEQ ID NO: 33491 - protein, 56 aa, Artificial Sequence
  Synthetic polypeptide
VVQDIFRDVCTLAHATTSSVTMAAALTSRSPAMECSSVLMGLMKTSARIWAWTARW

SEQ ID NO: 33492 - protein, 28 aa, Artificial Sequence
  Synthetic polypeptide
AVSKQDAPELFKTFLGMFAHLLTLPLLL

SEQ ID NO: 33493 - protein, 59 aa, Artificial Sequence
  Synthetic polypeptide
TRGSREWNGGYWRLCGGRTGKGETLVKGYKVSLRPEEQVLVICCTAWMFAHLLTLPLLL

SEQ ID NO: 33494 - protein, 201 aa, Artificial Sequence
  Synthetic polypeptide
SVAQHGCLHTCSRYHFFCDDGCCIDITLACDGVQQCPDGSDEDFCQNLGLDRKMVTHTAASPALPRTTGPSEDAGGDSLVEKSQKATAPNKPPALSNTEKRNHSAFWGPESQIIPVMPDSSSSGKNRKEESYIFESKGDGGGGEHPAPETGAVLPLALGLAITALLLLMVACRLRLVKQKLKKARPITSEESDYLINGMYL

SEQ ID NO: 33495 - protein, 97 aa, Artificial Sequence
  Synthetic polypeptide
MNSWKQRVEWRLLEAVRGTDWERRDAGQRVQSVTETGGTGSGDLLHSMDVCTLAHATTSSVTMAAALTSRSPAMECSSVLMGLMKTSARIWAWTARW

SEQ ID NO: 33496 - protein, 515 aa, Artificial Sequence
  Synthetic polypeptide
GRMWWLMPVIPALWESEFNLHLTGDIHAITAANNLLAAAIDTRILHENTQTDKALYNRLVPLVNGVREFSEIQLARLKKLGINKTDPSTLTEEEVSKFARLDIDPSTITWQRVLDTNDRFLRKITIGQGNTEKGHYRQAQFDIAVASEIMAVLALTDSLADMKARLGRMVVASDKSGQPVTADDLGVTGALTVLMKDAIKPNLMQTLEGTPVFVHAGPFANIAHGNSSVLADKIALKLVGEEGFVVTEAGFGADIGMEKFFNIKCRASGLVPNVVVLVATVRALKMHGGGPSVTAGVPLKKEYTEENIQLVADGCCNLQKQIQITQLFGVPVVVALNVFKTDTRAEIDLVCELAKRAGAFDAVPCYHWSVGGKGSVDLARAVREAASKRSRFQFLYDVQVPIVDKIRTIAQAVYGAKDIELSPEAQAKIDRYTQQGFGNLPICMAKTHLSLSHQPDKKGVPRDFILPISDVRASIGAGFIYPLVGTMSTMPGLPTRPCFYDIDLDTETEQVKGLF

SEQ ID NO: 33497 - protein, 12 aa, Artificial Sequence
  Synthetic polypeptide
SQHFGSLSSTFT

SEQ ID NO: 33498 - protein, 2 aa, Artificial Sequence
  Synthetic polypeptide
AR

SEQ ID NO: 33499 - protein, 31 aa, Artificial Sequence
  Synthetic polypeptide
GQMSTMPGLPTRPCFYDIDLDTETEQVKGLF

SEQ ID NO: 33500 - protein, 15 aa, Artificial Sequence
  Synthetic polypeptide
PDEHHARTAHPALLL

SEQ ID NO: 33501 - protein, 37 aa, Artificial Sequence
  Synthetic polypeptide
VSSVLIRKMSTMPGLPTRPCFYDIDLDTETEQVKGLF

SEQ ID NO: 33502 - protein, 15 aa, Artificial Sequence
  Synthetic polypeptide
AHTLMPKCPLSSSVK

SEQ ID NO: 33503 - protein, 44 aa, Artificial Sequence
  Synthetic polypeptide
LLGRLRQENCLNPRGGGCGEPRSRQYTPAWATRTKLCLRKKSTV

SEQ ID NO: 33504 - protein, 43 aa, Artificial Sequence
  Synthetic polypeptide
TQEVEVVVSQDRANTLQPGQQEQNSVSEKKAPYKLEFRLPDYS

SEQ ID NO: 33505 - protein, 111 aa, Artificial Sequence
  Synthetic polypeptide
AKIAPIHSSLGNKNKTLSQKKKHRINLSSDFLITPDFYWDRENLEGLYDKTCQFLSIGRRVKVMNEKLQHCMELTDLMRNHLNEKRALRLEWMIVILITIEVMFELGRVFF

SEQ ID NO: 33506 - protein, 43 aa, Artificial Sequence
  Synthetic polypeptide
AKIAPIHSSLGNKNKTLSQKKKHRINLSSDFLITPDFYWDREN

SEQ ID NO: 33507 - protein, 33 aa, Artificial Sequence
  Synthetic polypeptide
QRVQSAAHRPNPPNLLCRKLTIIFRKSRSRGSS

SEQ ID NO: 33508 - protein, 45 aa, Artificial Sequence
  Synthetic polypeptide
RGFSLQPTGQTHQICSAGNLRSSFGSPGHAGAVKPLSECGSKCSK

SEQ ID NO: 33509 - protein, 713 aa, Artificial Sequence
  Synthetic polypeptide
EGSVCSPQAKPTKSALQETYDHLSEVPVTREQLNHYRNVAQNARSELAATLVKFECAQSELQDLRSKMLSKEVSCQELKAEMESYKENNARKSSLLTSLRDRVQELEEESAALSTSKIRTEITAHAAIKENQELKKKVVELNEKLQKCSKENEENKKQVSKNCRKHEEFLTQLRDCLDPDERNDKASDEDLILKLRDLRKENEFVKGQIVILEETINVHEMEAKASRETIMRLASEVNREQKKAASCTEEKEKLNQDLLSAVEAKEALEREVKIFQERLLAGQQVWDASKQEVSLLKKSSSELEKSLKASQDAVTTSQSQYFSFREKIAALLRGRLSMTGSTEDTILEKIREMDSREESRDRMVSQLEAQISELVEQLGKESGFHQKALQRAQKAENMLETLQGQLTHLEAELVSGGVLRDNLNFEKQKYLKFLDQLSQKMKLDQMAAELGFDMRLDVVLARTEQLVRLESNAVIENKTIAHNLQRKLKTQKERLESKELHMSLLRQKIAQLEEEKQARTALVVERDNAHLTIRNLQKKVERLQKELNTCRDLHTELKAKLADTNELKIKTLEQTKAIEDLNKSRDQLEKMKEKAEKKLMSVKSELDTTEHEAKENKERARNMIEVVTSEMKTLKKSLEEAEKREKQLADFREVVSQMLGLNVTSLALPDYEIIKCLERLVHSHQHHFVTCACLKDVTTGQERHPQGHLQLLH

SEQ ID NO: 33510 - protein, 720 aa, Artificial Sequence
  Synthetic polypeptide
EGSVCSPQAKPTKSALQETYDHLSEVPVTREQLNHYRNVAQNARSELAATLVKFECAQSELQDLRSKMLSKEVSCQELKAEMESYKENNARKSSLLTSLRDRVQELEEESAALSTSKIRTEITAHAAIKENQELKKKVVELNEKLQKCSKENEENKKQVSKNCRKHEEFLTQLRDCLDPDERNDKASDEDLILKLRDLRKENEFVKGQIVILEETINVHEMEAKASRETIMRLASEVNREQKKAASCTEEKEKLNQDLLSAVEAKEALEREVKIFQERLLAGQQVWDASKQEVSLLKKSSSELEKSLKASQDAVTTSQSQYFSFREKIAALLRGRLSMTGSTEDTILEKIREMDSREESRDRMVSQLEAQISELVEQLGKESGFHQKALQRAQKAENMLETLQGQLTHLEAELVSGGVLRDNLNFEKQKYLKFLDQLSQKMKLDQMAAELGFDMRLDVVLARTEQLVRLESNAVIENKTIAHNLQRKLKTQKERLESKELHMSLLRQKIAQLEEEKQARTALVVERDNAHLTIRNLQKKVERLQKELNTCRDLHTELKAKLADTNELKASAWLHFIKTLEQTKAIEDLNKSRDQLEKMKEKAEKKLMSVKSELDTTEHEAKENKERARNMIEVVTSEMKTLKKSLEEAEKREKQLADFREVVSQMLGLNVTSLALPDYEIIKCLERLVHSHQHHFVTCACLKDVTTGQERHPQGHLQLLH

SEQ ID NO: 33511 - protein, 131 aa, Artificial Sequence
  Synthetic polypeptide
SNVLCRDMGEAGNHHSQQTNTGTENHTLHVLTGQIQIIDARVAEKDWPVPMTREVWLWNLPRRLATVQCAMTMLQATIMESGPVRAARPSSREVFKDITTICVQPPTSAPLIKTGGRAARPAGSVNATKWE

SEQ ID NO: 33512 - protein, 86 aa, Artificial Sequence
  Synthetic polypeptide
KDTCTRMFIAALFTIAKTWNQPKCPSMIDWIKKMWHIYTMEYYADIKKDEVMSFAGTWVKLETIILSKLTQEQKTTHCMFSLAKFR

SEQ ID NO: 33513 - protein, 457 aa, Artificial Sequence
  Synthetic polypeptide
HRNRKPHTACSHWPNSDNRRQGGRERLASTNDKGSMAMESAKETRYCAVCNDYASGYHYGVWSCEGCKAFFKRSIQGHNDYMCPATNQCTIDKNRRKSCQACRLRKCYEVGMMKGGIRKDRRGGRMLKHKRQRDDGEGRGEVGSAGDMRAANLWPSPLMIKRSKKNSLALSLTADQMVSALLDAEPPILYSEYDPTRPFSEASMMGLLTNLADRELVHMINWAKRVPGFVDLTLHDQVHLLECAWLEILMIGLVWRSMEHPGKLLFAPNLLLDRNQGKCVEGMVEIFDMLLATSSRFRMMNLQGEEFVCLKSIILLNSGVYTFLSSTLKSLEEKDHIHRVLDKITDTLIHLMAKAGLTLQQQHQRLAQLLLILSHIRHMSNKGMEHLYSMKCKNVVPLYDLLLEMLDAHRLHAPTSRGGASVEETDQSHLATAGSTSSHSLQKYYITGEAEGFPATV

SEQ ID NO: 33514 - protein, 345 aa, Artificial Sequence
  Synthetic polypeptide
HRNRKPHTACSHWPNSDNRRQGGRERLASTNDKGSMAMESAKETRYCAVCNDYASGYHYGVWSCEGCKAFFKRSIQGHNDYMCPATNQCTIDKNRRKSCQACRLRKCYEVGMMKGGFVDLTLHDQVHLLECAWLEILMIGLVWRSMEHPGKLLFAPNLLLDRNQGKCVEGMVEIFDMLLATSSRFRMMNLQGEEFVCLKSIILLNSGVYTFLSSTLKSLEEKDHIHRVLDKITDTLIHLMAKAGLTLQQQHQRLAQLLLILSHIRHMSNKGMEHLYSMKCKNVVPLYDLLLEMLDAHRLHAPTSRGGASVEETDQSHLATAGSTSSHSLQKYYITGEAEGFPATV

SEQ ID NO: 33515 - protein, 167 aa, Artificial Sequence
  Synthetic polypeptide
VSLTRSDGYYEGEFSCTSSLRLLPSMQDVACSCLSSTRIVRPPQPCGNRTLSCPSLYPWQSGWYLEDLFGLCSFVCLEEEEPVLPSHSGVQAGDLGLLTPTASTELDFTATVAVNVEATSAWPVSPSSDKLPWNKQIPFQENQVSELLLSIPFCNVHHFLWKLRVSW

SEQ ID NO: 33516 - protein, 54 aa, Artificial Sequence
  Synthetic polypeptide
GLPSHVEIGPYHVLHCIHGNRAGTWRIYLGCVHLSVSKKKSQCSHLTVEFKQEI

SEQ ID NO: 33517 - protein, 25 aa, Artificial Sequence
  Synthetic polypeptide
HPTMHRTVPENKEVVKKKVLPFLSK

SEQ ID NO: 33518 - protein, 18 aa, Artificial Sequence
  Synthetic polypeptide
RLLNILQCTGQSLRTKRL

SEQ ID NO: 33519 - protein, 416 aa, Artificial Sequence
  Synthetic polypeptide
EQRGCKEESSTLSVKMKCDFNCNHVHSGLKLVKPDDIGRLVSYTPAYLEGSCKDCIKDYERLSCIGSPIVSPRIVQLETESKRLHNKENQHVQQTLNSTNEIEALETSRLYEDSGYSSFSLQSGLSEHEEGSLLEENFGDSLQSCLLQIQSPDQYPNKNLLPVLHFEKVVCSTLKKNAKRNPKVDREMLKEIIARGNFRLQNIIGRKMGLECVDILSELFRRGLRHVLATILAQLSDMDLINVSKVSTTWKKILEDDKGAFQLYSKAIQRVTENNNKFSPHASTREYVMFRTPLASVQKSAAQTSLKKDAQTKLSNQGDQKGSTYSRHNEFSEVAKTLKKNESLKACIRCNSPAKYDCYLQRATCKREGCGFDYCTKCLCNYHTTKDCSDGKLLKASCKIGPLPGTKKSKKNLRRL

SEQ ID NO: 33520 - protein, 783 aa, Artificial Sequence
  Synthetic polypeptide
LRRLRHKNLLNRGDRGLRKGNEIMTLNGEAVSDLDLKQMEALFSEKSVGLTLIARPPDTKATLCTSWSDSDLFSRDQKSLLPPPNQSQLLEEFLDNFKKNTANDFSNVPDITTGLKRSQTDGTLDQVSHREKMEQTFRSAEQITALCRSFNDSQANGMEGPRENQDPPPRSLARHLSDADRLRKVIQELVDTEKSYVKDLSCLFELYLEPLQNETFLTQDEMESLFGSLPEMLEFQKVFLETLEDGISASSDFNTLETPSQFRKLLFSLGGSFLYYADHFKLYSGFCANHIKVQKVLERAKTDKAFKAFLDARNPTKQHSSTLESYLIKPVQRVLKYPLLLKELVSLTDQESEEHYHLTEALKAMEKVASHINEMQKIYEDYGTVFDQLVAEQSGTEKEVTELSMGELLMHSTVSWLNPFLSLGKARKDLELTVFVFKRAVILVYKENCKLKKKLPSNSRPAHNSTDLDPFKFRWLIPISALQVRLGNPAGTENNSIWELIHTKSEIEGRPETIFQLCCSDSESKTNIVKVIRSILRENFRRHIKCELPLEKTCKDRLVPLKNRVPVSAKLASSRSLKVLKNSSSNEWTGETGKGTLLDSDEGSLSSGTQSSGCPTAEGRQDSKSTSPGKYPHPGLADFADNLIKESDILSDEDDDHRQTVKQGSPTKDIEIQFQRLRISEDPDVHPEAEQQPGPESGEGQKGGEQPKLVRGHFCPIKRKANSTKRDRGTLLKAQIRHQSLDSQSENATIDLNSVLEREFSVQSLTSVVSEECFYETESHGKS

SEQ ID NO: 33521 - protein, 6 aa, Artificial Sequence
  Synthetic polypeptide
TGETEG

SEQ ID NO: 33522 - protein, 20 aa, Artificial Sequence
  Synthetic polypeptide
QEAEAQESLEPGRQRAEKGQ

SEQ ID NO: 33523 - protein, 449 aa, Artificial Sequence
  Synthetic polypeptide
LRRLRHKNLLNRGDRGLRKGNEIMTLNGEAVSDLDLKQMEALFSEKSVGLTLIARPPDTKATLCTSWSDSDLFSRDQKSLLPPPNQSQLLEEFLDNFKKNTANDFSNVPDITTGLKRSQTDGTLDQVSHREKMEQTFRSAEQITALCRSFNDSQANGMEGPRENQDPPPRSLARHLSDADRLRKVIQELVDTEKSYVKDLSCLFELYLEPLQNETFLTQDEMESLFGSLPEMLEFQKVFLETLEDGISASSDFNTLETPSQFRKLLFSLGGSFLYYADHFKLYSGFCANHIKVQKVLERAKTDKAFKAFLDARNPTKQHSSTLESYLIKPVQRVLKYPLLLKELVSLTDQESEEHYHLTEALKAMEKVASHINEMQKIYEDYGTVFDQLVAEQSGTEKEVTELSMGELLMHSTVSWLNPFLSLGKARKDLELTVFVFKRAVILVYKENC

SEQ ID NO: 33524 - protein, 812 aa, Artificial Sequence
  Synthetic polypeptide
LRRLRHKNLLNRGDRGLRKGNEIMTLNGEAVSDLDLKQMEALFSEKSVGLTLIARPPDTKATLCTSWSDSDLFSRDQKSLLPPPNQSQLLEEFLDNFKKNTANDFSNVPDITTGLKRSQTDGTLDQVSHREKMEQTFRSAEQITALCRSFNDSQANGMEGPRENQDPPPRSLARHLSDADRLRKVIQELVDTEKSYVKDLSCLFELYLEPLQNETFLTQDEMESLFGSLPEMLEFQKVFLETLEDGISASSDFNTLETPSQFRKLLFSLGGSFLYYADHFKLYSGFCANHIKVQKVLERAKTDKAFKAFLDARNPTKQHSSTLESYLIKPVQRVLKYPLLLKELVSLTDQESEEHYHLTEALKAMEKVASHINEMQKIYEDYGTVFDQLVAEQSGTEKEQPEWSSEVMDVLDPRGKLTKGTLEEPRTLVTELSMGELLMHSTVSWLNPFLSLGKARKDLELTVFVFKRAVILVYKENCKLKKKLPSNSRPAHNSTDLDPFKFRWLIPISALQVRLGNPAGTENNSIWELIHTKSEIEGRPETIFQLCCSDSESKTNIVKVIRSILRENFRRHIKCELPLEKTCKDRLVPLKNRVPVSAKLASSRSLKVLKNSSSNEWTGETGKGTLLDSDEGSLSSGTQSSGCPTAEGRQDSKSTSPGKYPHPGLADFADNLIKESDILSDEDDDHRQTVKQGSPTKDIEIQFQRLRISEDPDVHPEAEQQPGPESGEGQKGGEQPKLVRGHFCPIKRKANSTKRDRGTLLKAQIRHQSLDSQSENATIDLNSVLEREFSVQSLTSVVSEECFYETESHGKS

SEQ ID NO: 33525 - protein, 791 aa, Artificial Sequence
  Synthetic polypeptide
LRRLRHKNLLNRGDRGLRKGNEIMTLNGEAVSDLDLKQMEALFSEKSVGLTLIARPPDTKATLCTSWSDSDLFSRDQKSLLPPPNQSQLLEEFLDNFKKNTANDFSNVPDITTGLKRSQTDGTLDQVSHREKMEQTFRSAEQITALCRSFNDSQANGMEGPRENQDPPPRSLARHLSDADRLRKVIQELVDTEKSYVKDLSCLFELYLEPLQNETFLTQDEMESLFGSLPEMLEFQKVFLETLEDGISASSDFNTLETPSQFRKLLFSLGGSFLYYADHFKLYSGFCANHIKVQKVLERAKTDKAFKAFLDARNPTKQHSSTLESYLIKPVQRVLKYPLLLKELVSLTDQESEEHYHLTEALKAMEKVASHINEMQKIYEDYGTVFDQLVAEQSGTEKEVTELSMGELLMHSTVSWLNPFLSLGKARKDLELTVFVFKRAVILVYKENCKLKKKLPSNSRPAHNSTDLDPFKFRWLIPISALQVRLGNPAGTENNSIWELIHTKSEIEGRPETIFQLCCSDSESKTNIVKVIRSILRENFRRHIKCELPLEKTCKDRLVPLKNRVPVSAKLAKCVFLTVASSRSLKVLKNSSSNEWTGETGKGTLLDSDEGSLSSGTQSSGCPTAEGRQDSKSTSPGKYPHPGLADFADNLIKESDILSDEDDDHRQTVKQGSPTKDIEIQFQRLRISEDPDVHPEAEQQPGPESGEGQKGGEQPKLVRGHFCPIKRKANSTKRDRGTLLKAQIRHQSLDSQSENATIDLNSVLEREFSVQSLTSVVSEECFYETESHGKS

SEQ ID NO: 33526 - protein, 186 aa, Artificial Sequence
  Synthetic polypeptide
NISGQKNVKRETGLASQPTSFLTCWMLPILKHWTPKFFSFGTWTGSPCFSACRWPIVGPCDHVDVGVVHFTPLIQPKIEQPFKLVEKVVQNVFQFRRKYCHRGLRMLFPEAQRLESTGRLLELADIDPTLRPRQLSISHFKSLCDVYRKMCDEDPQLFAYNFREELKRRKSKNEEKEEDDAENYRL

SEQ ID NO: 33527 - protein, 58 aa, Artificial Sequence
  Synthetic polypeptide
PPSPHLFSRAGCFLSSNIGLPSSSVLELGLALLASQPADGLLWDLVIMWTWAWCTSLP

SEQ ID NO: 33528 - protein, 48 aa, Artificial Sequence
  Synthetic polypeptide
SCGRGRGALHSLDTAQDRAAIQAGGKSGSECISVPKEILPSRAQNVIP

SEQ ID NO: 33529 - protein, 16 aa, Artificial Sequence
  Synthetic polypeptide
RNWACFNWRKEALDAF

SEQ ID NO: 33530 - protein, 269 aa, Artificial Sequence
  Synthetic polypeptide
EMRVEGTGHVSTGEKRPWMLSDAAPGKLRIVHGDVLTFKVEKAFSESLKRPWEDDPPNVHIIGNLPFSVSTPLIIKWLENISCRDGPFVYGRTQMTLTFQKEVAERLAANTGSKQRSRLSVMAQYLCNVRHIFTIPGQAFVPKPEVDVGVVHFTPLIQPKIEQPFKLVEKVVQNVFQFRRKYCHRGLRMLFPEAQRLESTGRLLELADIDPTLRPRQLSISHFKSLCDVYRKMCDEDPQLFAYNFREELKRRKSKNEEKEEDDAENYRL

SEQ ID NO: 33531 - protein, 25 aa, Artificial Sequence
  Synthetic polypeptide
ELKELGMFQLEKRGPGCFLMQHLGN

SEQ ID NO: 33532 - protein, 24 aa, Artificial Sequence
  Synthetic polypeptide
IQPGQHSETLSQTTTTTNSFRGEF

SEQ ID NO: 33533 - protein, 255 aa, Artificial Sequence
  Synthetic polypeptide
AQEFESSLGNIVRPCLKQQQQQTHLEASFEEVENNLLHLEDLCGQCELERCKHMQSQQLENYKKNKRKELETFKAELDAEHAQKVLEMEHTQQMKLKERQKFFEEAFQQDMEQYLSTGYLQIAERREPIGSMSSMEVNVDMLEQMDLMDISDQEALDVFLNSGGEENTVLSPALGPESSTCQNEITLQVPNPSELRAKPPSSSSTCTDSATRDISEGGESPVVQSDEEEVQVDTALATSHTDREATPDGGEDSDS

SEQ ID NO: 33534 - protein, 12 aa, Artificial Sequence
  Synthetic polypeptide
DLVSNNNNNKLI

SEQ ID NO: 33535 - protein, 256 aa, Artificial Sequence
  Synthetic polypeptide
AQEFESSLGNIVRPCLKQQQQQTHLEASFEEVENNLLHLEDLCGQCELERCKHMQSQQLENYKKNKRKELEVTFRSELDAEHAQKVLEMEHTQQMKLKERQKFFEEAFQQDMEQYLSTGYLQIAERREPIGSMSSMEVNVDMLEQMDLMDISDQEALDVFLNSGGEENTVLSPALGPESSTCQNEITLQVPNPSELRAKPPSSSSTCTDSATRDISEGGESPVVQSDEEEVQVDTALATSHTDREATPDGGEDSDS

SEQ ID NO: 33536 - protein, 129 aa, Artificial Sequence
  Synthetic polypeptide
AQEFESSLGNIVRPCLKQQQQQTHLEASFEEVENNLLHLEDLCGQCELERCKHMQSQQLENYKKNKRKELETFKAELDAEHAQKVLEMEHTQQMKLKERQKFFEEAFQQDMEQYLSTGYLQIAERRGDP

SEQ ID NO: 33537 - protein, 207 aa, Artificial Sequence
  Synthetic polypeptide
AQEFESSLGNIVRPCLKQQQQQTHLEASFEEVENNLLHLEDLCGQCELERCKHMQSQQLENYKKNKRKELETFKAELDAEHAQKVLEMEHTQQMKLKERQKFFEEAFQQDMEQYLSTGYLQIAERREPIGSMSSMEVNVDMLEQMDLMDISDQEALDVFLNSGGEENTVLSPALGRVDKLALAEPGQYRCHSPPKVRRENHLPVTYA

SEQ ID NO: 33538 - protein, 169 aa, Artificial Sequence
  Synthetic polypeptide
AQEFESSLGNIVRPCLKQQQQQTHLEASFEEVENNLLHLEDLCGQCELERCKHMQSQQLENYKKNKRKELETFKAELDAEHAQKVLEMEHTQQMKLKERQKFFEEAFQQDMEQYLSTGYLQIAERREPIGSMSSMEVNVDMLEQMDLMDISDQEALDVFLNSGGEENTV

SEQ ID NO: 33539 - protein, 6 aa, Artificial Sequence
  Synthetic polypeptide
TAEDFK

SEQ ID NO: 33540 - protein, 340 aa, Artificial Sequence
  Synthetic polypeptide
GLPSHDELLKTLSDKSREAKVKSKPRTVPFLPKYSAGLELLSRYEDTWAALHRRAKDCASAGELVDSEVVMLSAHWEKKKTSLVELQEQLQQLPALIADLESMTANLTHLEASFEEVENNLLHLEDLCGQCELERCKHMQSQQLENYKKNKRKELETFKAELDAEHAQKVLEMEHTQQMKLKERQKFFEEAFQQDMEQYLSTGYLQIAERREPIGSMSSMEVNVDMLEQMDLMDISDQEALDVFLNSGGEENTVLSPALGPESSTCQNEITLQVPNPSELRAKPPSSSSTCTDSATRDISEGGESPVVQSDEEEVQVDTALATSHTDREATPDGGEDSDS

SEQ ID NO: 33541 - protein, 65 aa, Artificial Sequence
  Synthetic polypeptide
LNREGGYLHAVLMIVSSQKIDGFLKGFLPLHSFFSSLPPGKEGCVCSHFHHDCKFPEASQAMMNC

SEQ ID NO: 33542 - protein, 33 aa, Artificial Sequence
  Synthetic polypeptide
GLPSHDELLKTLSDKSREAKVKSKPSWLNQEQF

SEQ ID NO: 33543 - protein, 341 aa, Artificial Sequence
  Synthetic polypeptide
GLPSHDELLKTLSDKSREAKVKSKPRTVPFLPKYSAGLELLSRYEDTWAALHRRAKDCASAGELVDSEVVMLSAHWEKKKTSLVELQEQLQQLPALIADLESMTANLTHLEASFEEVENNLLHLEDLCGQCELERCKHMQSQQLENYKKNKRKELEVTFRSELDAEHAQKVLEMEHTQQMKLKERQKFFEEAFQQDMEQYLSTGYLQIAERREPIGSMSSMEVNVDMLEQMDLMDISDQEALDVFLNSGGEENTVLSPALGPESSTCQNEITLQVPNPSELRAKPPSSSSTCTDSATRDISEGGESPVVQSDEEEVQVDTALATSHTDREATPDGGEDSDS

SEQ ID NO: 33544 - protein, 197 aa, Artificial Sequence
  Synthetic polypeptide
GLPSHDELLKTLSDKSREAKVKSKPRYEDTWAALHRRAKDCASAGELVDSEVVMLSAHWEKKKTSLVELQEQLQQLPALIADLESMTANLTHLEASFEEVENNLLHLEDLCGQCELERCKHMQSQQLENYKKNKRKELETFKAELDAEHAQKVLEMEHTQQMKLKERQKFFEEAFQQDMEQYLSTGYLQIAERRGDP

SEQ ID NO: 33545 - protein, 292 aa, Artificial Sequence
  Synthetic polypeptide
GLPSHDELLKTLSDKSREAKVKSKPRTVPFLPKYSAGLELLSRYEDTWAALHRRAKDCASAGELVDSEVVMLSAHWEKKKTSLVELQEQLQQLPALIADLESMTANLTHLEASFEEVENNLLHLEDLCGQCELERCKHMQSQQLENYKKNKRKELETFKAELDAEHAQKVLEMEHTQQMKLKERQKFFEEAFQQDMEQYLSTGYLQIAERREPIGSMSSMEVNVDMLEQMDLMDISDQEALDVFLNSGGEENTVLSPALGRVDKLALAEPGQYRCHSPPKVRRENHLPVTYA

SEQ ID NO: 33546 - protein, 362 aa, Artificial Sequence
  Synthetic polypeptide
RRCLLLFAFHHDCKFPEAFPVMWNYIANGTSSGGYRPPPRTKEVIINGQTVKLKYCFTCKIFRPPRASHCSLCDNCVERFDHHCPWVGNCVGKRNYRFFYMFILSLSFLTVFIFAFVITHVILRSQQTGFLNALKDSPASVLEAVVCFFSVWSIVGLSGFHTYLISSNQTTNEDIKGSWSNKRGKENYNPYSYGNIFTNCCVALCGPISPSLIDRRGYIQPDTPQPAAPSNGITMYGATQSQSDMAAATPLLQSEPSLTSDELHLPGKPGLGTPCASLTLGPPTPPASMPNLAEATLADVMPRKDEHMGHQFLTPDEAPSPPRLLAAGSPLAHSRTMHVLGLASQDSLHEDSVRGLVKLSSV

SEQ ID NO: 33547 - protein, 67 aa, Artificial Sequence
  Synthetic polypeptide
VAGISPACTHCVLLPCEEGACFSLPSTMIVNFLRLFQSCGTISQTAPVQGGTARLPEPKKSSSMARP

SEQ ID NO: 33548 - protein, 36 aa, Artificial Sequence
  Synthetic polypeptide
GFSSHVELYRKRHQFRGVPPASQNQRSHHQWPDRET

SEQ ID NO: 33549 - protein, 377 aa, Artificial Sequence
  Synthetic polypeptide
RRCLLLFAFHHDCKFPEAFPVMWNYIANGTSSGGYRPPPRTKEVIINGQTVKLKYCFTCKIFRPPRASHCSLCDNCVERFDHHCPWVGNCVGKRNYRFFYMFILSLSFLTVFIFAFVITHVILRSQQTGFLNALKDSPASVLEAVVCFFSVWSIVGLSGFHTYLISSNQTTNEDIKGSWSNKRGKENYNPYSYGNIFTNCCVALCGPISPSLIDRRGYIQPDTPQPAAPSNGITMYGATQSQSDMCDQDQCIQSTKFVLQAAATPLLQSEPSLTSDELHLPGKPGLGTPCASLTLGPPTPPASMPNLAEATLADVMPRKDEHMGHQFLTPDEAPSPPRLLAAGSPLAHSRTMHVLGLASQDSLHEDSVRGLVKLSSV

SEQ ID NO: 33550 - protein, 93 aa, Artificial Sequence
  Synthetic polypeptide
RRCLLLFAFHHDCKFPEAFPVMWNYIANGTSSGGYRPPPRTKEVIINGQTVKLKYCFTCKIFRPPRASHCSLCDNCVERFDHHCPWVHSKQDS

SEQ ID NO: 33551 - protein, 29 aa, Artificial Sequence
  Synthetic polypeptide
AEIAPLHSSLGYREPAVARALEAAPGELL

SEQ ID NO: 33552 - protein, 1143 aa, Artificial Sequence
  Synthetic polypeptide
DCSEPRSHHCTPAWATGNQLLHVPLRQHQVSCCDWLLKIICGVVTIRTVYASHKQAKACLVSRVSCERTGTRFHTRGVNDDGHVSNFVETEQMIYMDDGVSSFVQIRGSVPLFWEQPGLQVGSHHLRLHRGLEANAPAFDRHMVLLKEQYGQQVVVNLLGSRGGEEVLNRAFKKLLWASCHAGDTPMINFDFHQFAKGGKLEKLETLLRPQLKLHWEDFDVFTKGENVSPRFQKGTLRMNCLDCLDRTNTVQSFIALEVLHLQLKTLGLSSKPIVDRFVESFKAMWSLNGHSLSKVFTGSRALEGKAKVGKLKDGARSMSRTIQSNFFDGVKQEAIKLLLVGDVYGEEVADKGGMLLDSTALLVTPRILKAMTERQSEFTNFKRIRIAMGTWNVNGGKQFRSNVLRTAELTDWLLDSPQLSGATDSQDDSSPADIFAVGFEEMVELSAGNIVNASTTNKKMWGEQLQKAISRSHRYILLTSAQLVGVCLYIFVRPYHVPFIRDVAIDTVKTGMGGKAGNKGAVGIRFQFHSTSFCFICSHLTAGQSQVKERNEDYKEITQKLCFPMGRNVFSHDYVFWCGDFNYRIDLTYEEVFYFVKRQDWKKLLEFDQLQLQKSSGKIFKDFHEGAINFGPTYKYDVGSAAYDTSDKCRTPAWTDRVLWWRKKHPFDKTAGELNLLDSDLDVDTKVRHTWSPGALQYYGRAELQASDHRPVLAIVEVEVQEVDVGARERVFQEVSSFQGPLDATVVVNLQSPTLEEKNEFPEDLRTELMQTLGSYGTIVLVRINQGQMLVTFADSHSALSVLDVDGMKVKGRAVKIRPKTKDWLKGLREEIIRKRDSMAPVSPTANSCLLEENFDFTSLDYESEGDILEDDEDYLVDEFNQPGVSDSELGGDDLSDVPGPTALAPPSKSPALTKKKQHPTYKDDADLVELKRELEAVGEFRHRSPSRSLSVPNRPRPPQPPQRPPPPTGLMVKKSASDASISSGTHGQYSILQTARLLPGAPQQPPKARTGISKPYNVKQIKTTNAQEAEAAIRCLLEARGGASEEALSAVAPRDLEASSEPEPTPGAAKPETPQAPPLLPRRPPPRVPAIKKPTLRRTGKIVFCSRSQASQPCLLLQRHEFVRTVAAQRLASVDTSGSSV

SEQ ID NO: 33553 - protein, 29 aa, Artificial Sequence
  Synthetic polypeptide
TQEAEIAVSRDRTIALQPGLQGTSCCTCP

SEQ ID NO: 33554 - protein, 1306 aa, Artificial Sequence
  Synthetic polypeptide
DCSEPRSHHCTPAWATGNQLLHVPLRQHQVSCCDWLLKIICGVVTIRTVYASHKQAKACLVSRVSCERTGTRFHTRGVNDDGHVSNFVETEQMIYMDDGVSSFVQIRGSVPLFWEQPGLQVGSHHLRLHRGLEANAPAFDRHMVLLKEQYGQQVVVNLLGSRGGEEVLNRAFKKLLWASCHAGDTPMINFDFHQFAKGGKLEKLETLLRPQLKLHWEDFDVFTKGENVSPRFQKGTLRMNCLDCLDRTNTVQSFIALEVLHLQLKTLGLSSKPIVDRFVESFKAMWSLNGHSLSKVFTGSRALEGKAKVGKLKDGARSMSRTIQSNFFDGVKQEAIKLLLVGDVYGEEVADKGGMLLDSTALLVTPRILKAMTERQSEFTNFKRIRIAMGTWNVNGGKQFRSNVLRTAELTDWLLDSPQLSGATDSQDDSSPADIFAVGFEEMVELSAGNIVNASTTNKKMWGEQLQKAISRSHRYILLTSAQLVGVCLYIFVRPYHVPFIRDVAIDTVKTGMGGKAGNKGAVGIRFQFHSTSFCFICSHLTAGQSQVKERNEDYKEITQKLCFPMGRNVFSHDYVFWCGDFNYRIDLTYEEVFYFVKRQDWKKLLEFDQLQLQKSSGKIFKDFHEGAINFGPTYKYDVGSAAYDTSDKCRTPAWTDRVLWWRKKHPFDKTAGELNLLDSDLDVDTKVRHTWSPGALQYYGRAELQASDHRPVLAIVEVEVQEVDVGARERVFQEVSSFQGPLDATVVVNLQSPTLEEKNEFPEDLRTELMQTLGSYGTIVLVRINQGQMLVTFADSHSALSVLDVDGMKVKGRAVKIRPKTKDWLKGLREEIIRKRDSMAPVSPTANSCLLEENFDFTSLDYESEGDILEDDEDYLVDEFNQPGVSDSELGGDDLSDVPGPTALAPPSKSPALTKKKQHPTYKAGLMVKKSASDASISSGTHGQYSILQTARLLPGAPQQPPKARTGISKPYNVKQIKTTNAQEAEAAIRCLLEARGGASEEALSAVAPRDLEASSEPEPTPGAAKPETPQAPPLLPRRPPPRVPAIKKPTLRRTGKPLSPEEQFEQQTVHFTIGPPETSVEAPPVVTAPRVPPVPKPRTFQPGKAAERPSHRKPASDEAPPGAGASVPPPLEAPPLVPKVPPRRKKSAPAAFHLQVLQSNSQLLQGLTYNSSDSPSGHPPAAGTVFPQGDFLSTSSATSPDSDGTKAMKPEAAPLLGDYQDPFWNLLHHPKLLNNTWLSKSSDPLDSGTRSPKRDPIDPVSAGASAAKAELPPDHEHKTLGHWVTISDQEKRTALQVFDPLAKT

SEQ ID NO: 33555 - protein, 1351 aa, Artificial Sequence
  Synthetic polypeptide
DCSEPRSHHCTPAWATGNQLLHVPLRQHQVSCCDWLLKIICGVVTIRTVYASHKQAKACLVSRVSCERTGTRFHTRGVNDDGHVSNFVETEQMIYMDDGVSSFVQIRGSVPLFWEQPGLQVGSHHLRLHRGLEANAPAFDRHMVLLKEQYGQQVVVNLLGSRGGEEVLNRAFKKLLWASCHAGDTPMINFDFHQFAKGGKLEKLETLLRPQLKLHWEDFDVFTKGENVSPRFQKGTLRMNCLDCLDRTNTVQSFIALEVLHLQLKTLGLSSKPIVDRFVESFKAMWSLNGHSLSKVFTGSRALEGKAKVGKLKDGARSMSRTIQSNFFDGVKQEAIKLLLVGDVYGEEVADKGGMLLDSTALLVTPRILKAMTERQSEFTNFKRIRIAMGTWNVNGGKQFRSNVLRTAELTDWLLDSPQLSGATDSQDDSSPADIFAVGFEEMVELSAGNIVNASTTNKKMWGEQLQKAISRSHRYILLTSAQLVGVCLYIFVRPYHVPFIRDVAIDTVKTGMGGKAGNKGAVGIRFQFHSTSFCFICSHLTAGQSQVKERNEDYKEITQKLCFPMGRNVFSHDYVFWCGDFNYRIDLTYEEVFYFVKRQDWKKLLEFDQLQLQKSSGKIFKDFHEGAINFGPTYKYDVGSAAYDTSDKCRTPAWTDRVLWWRKKHPFDKTAGELNLLDSDLDVDTKVRHTWSPGALQYYGRAELQASDHRPVLAIVEVEVQEVDVGARERVFQEVSSFQGPLDATVVVNLQSPTLEEKNEFPEDLRTELMQTLGSYGTIVLVRINQGQMLVTFADSHSALSVLDVDGMKVKGRAVKIRPKTKDWLKGLREEIIRKRDSMAPVSPTANSCLLEENFDFTSLDYESEGDILEDDEDYLVDEFNQPGVSDSELGGDDLSDVPGPTALAPPSKSPALTKKKQHPTYKDDADLVELKRELEAVGEFRHRSPSRSLSVPNRPRPPQPPQRPPPPTGLMVKKSASDASISSGTHGQYSILQTARLLPGAPQQPPKARTGISKPYNVKQIKTTNAQEAEAAIRCLLEARGGASEEALSAVAPRDLEASSEPEPTPGAAKPETPQAPPLLPRRPPPRVPAIKKPTLRRTGKPLSPEEQFEQQTVHFTIGPPETSVEAPPVVTAPRVPPVPKPRTFQPGKAAERPSHRKPASDEAPPGAGASVPPPLEAPPLVPKVPPRRKKSAPAAFHLQVLQSNSQLLQGLTYNSSDSPSGHPPAAGTVFPQGDFLSTSSATSPDSDGTKAMKPEAAPLLGDYQDPFWNLLHHPKLLNNTWLSKSSDPLDSGTRSPKRDPIDPVSAGASAAKAELPPDHEHKTLGHWVTISDQEKRTALQVFDPLAKT

SEQ ID NO: 33556 - protein, 422 aa, Artificial Sequence
  Synthetic polypeptide
DCSEPRSHHCTPAWATGNQLLHVPLRQHQVSCCDWLLKIICGVVTIRTVYASHKQAKACLVSRVSCERTGTRFHTRGVNDDGHVSNFVETEQMIYMDDGVSSFVQIRGSVPLFWEQPGLQVGSHHLRLHRGLEANAPAFDRHMVLLKEQYGQQVVVNLLGSRGGEEVLNRAFKFAKGGKLEKLETLLRPQLKLHWEDFDVFTKGENVSPRFQKGTLRMNCLDCLDRTNTVQSFIALEVLHLQLKTLGLSSKPIVDRFVESFKAMWSLNGHSLSKVFTGSRALEGKAKVGKLKDGARSMSRTIQSNFFDGVKQEAIKLLLVGDVYGEEVADKGGMLLDSTALLVTPRILKAMTERQSEFTNFKRIRIAMGTWNVNGGKQFRSNVLRTAELTDWLLDSPQLSGATDSQGEGSDFGGDKIQLHLT

SEQ ID NO: 33557 - protein, 39 aa, Artificial Sequence
  Synthetic polypeptide
GRARWLTPVIPALWEAEAGGSRGQEIETILANTVPPKKP

SEQ ID NO: 33558 - protein, 38 aa, Artificial Sequence
  Synthetic polypeptide
SQHFGRPRRVDHEDRKSRPSWLTRCLRRSPKCRGPKGP

SEQ ID NO: 33559 - protein, 101 aa, Artificial Sequence
  Synthetic polypeptide
HGASEEALSAVAPRDLEASSEPEPTPGAAKPETPQAPPLLPRRPPPRVPAIKKPTLRRTGKIVFCSRSQASQPCLLLQRHEFVRTVAAQRLASVDTSGSSV

SEQ ID NO: 33560 - protein, 309 aa, Artificial Sequence
  Synthetic polypeptide
HGASEEALSAVAPRDLEASSEPEPTPGAAKPETPQAPPLLPRRPPPRVPAIKKPTLRRTGKPLSPEEQFEQQTVHFTIGPPETSVEAPPVVTAPRVPPVPKPRTFQPGKAAERPSHRKPASDEAPPGAGASVPPPLEAPPLVPKVPPRRKKSAPAAFHLQVLQSNSQLLQGLTYNSSDSPSGHPPAAGTVFPQGDFLSTSSATSPDSDGTKAMKPEAAPLLGDYQDPFWNLLHHPKLLNNTWLSKSSDPLDSGTRSPKRDPIDPVSAGASAAKAELPPDHEHKTLGHWVTISDQEKRTALQVFDPLAKT

SEQ ID NO: 33561 - protein, 10 aa, Artificial Sequence
  Synthetic polypeptide
DQPGQHVILP

SEQ ID NO: 33562 - protein, 92 aa, Artificial Sequence
  Synthetic polypeptide
WVQWLTPVIPTLQEAEAGGWLEVRSLRPAWPTCDPAMKQFLLYLDESNALGKKFIIQDIDDTHVFVIAELVNVLQERVGELMDQNAFSLTQK

SEQ ID NO: 33563 - protein, 158 aa, Artificial Sequence
  Synthetic polypeptide
SHHFGRPRRVDHEVKRSGPSWSTWISIEARKSPKLPRAAQELSRSPRLPLRKPSVGSPSLTRREFPFEDITQHNYLAQVTSNIWGTKFKIVGLAAFLPTNLGAVIYKTSLLHLQPRQMTIYLPEVRKISMDYINLPVFNPNVFSEDEDDLPGDAVWTD

SEQ ID NO: 33564 - protein, 68 aa, Artificial Sequence
  Synthetic polypeptide
PGTVAHACNPITLGGRGGWITKSRDLDHPGQHGSALRPASHPSCPGLLRSSPGPHGCPCASPLWARPA

SEQ ID NO: 33565 - protein, 35 aa, Artificial Sequence
  Synthetic polypeptide
RAQWLTPVIPSLWAAEAGGSRSQEIWTILVNMDQH

SEQ ID NO: 33566 - protein, 1023 aa, Artificial Sequence
  Synthetic polypeptide
SHHFGRPRRVDHEVKRSGPSWSTWISIEARKSPKLPRAAQELSRSPRLPLRKPSVGSPSLTRREFPFEDITQHNYLAQVTSNIWGTKFKIVGLAAFLPTNLGAVIYKTSLLHLQPRQMTIYLPEVRKISMDYINLPVFNPNVFSEDEDDLPVTGASGVPENSPPCTVNIPIAPIHSSAQAMSPTQSIGLVQSLLANQNVQLDVLTNQTTAVGTAEHAGDSATQYPVSNRYSNPGQVIFGSVEMGRIIQNPPPLSLPPPPQGPMQLSTVGHGDRDHEHLQKSAKALRPTPQLAAEGDAVVFSAPQEVQVTKINPPPPYPGTIPAAPTTAAPPPPLPPPQPPVDVCLKKGDFSLYPTSVHYQTPLGYERITTFDSSGNVEEVCRPRTRMLCSQNTYTLPGPGSSATLRLTATEKKVPQPCSSATLNRLTVPRYSIPTGDPPPYPEIASQLAQGRGAAQRSDNSLIHATLRRNNREATLKMAQLADSPRAPLQPLAKSKGGPGGVVTQLPARPPPALYTCSQCSGTGPSSQPGASLAHTASASPLASQSSYSLLSPPDSARDRTDYVNSAFTEDEALSQHCQLEKPLRHPPLPEAAVTLKRPPPYQWDPMLGEDVWVPQERTAQTSGPNPLKLSSLMLSQGQHLDVSRLPFISPKSPASPTATFQTGYGMGVPYPGSYNNPPLPGVQAPCSPKDALSPTQFAQQEPAVVLQPLYPPSLSYCTLPPMYPGSSTCSSLQLPPVALHPWSSYSACPPMQNPQGTLPPKPHLVVEKPLVSPPPADLQSHLGTEVMVETADNFQEVLSLTESPVPQRTEKFGKKNRKRLDSRAEEGSVQAITEGKVKKEARTLSDFNSLISSPHLGREKKKVKSQKDQLKSKKLNKTNEFQDSSESEPELFISGDELMNQSQGSRKGWKSKRSPRAAGELEEAKCRRASEKEDGRLGSQGFVYVMANKQPLWNEATQVYQLDFGGRVTQESAKNFQIELEGRQVMQFGRIDGSAYILDFQYPFSAVQAFAVALANVTQRLK

SEQ ID NO: 33567 - protein, 10 aa, Artificial Sequence
  Synthetic polypeptide
SHMISVKDLK

SEQ ID NO: 33568 - protein, 454 aa, Artificial Sequence
  Synthetic polypeptide
NERTLDSNLKPYDFSKGPKVIQTSAANFSLNNSKKLKPIQILSNPLSTYNQQLWLTCVVELDQSKETSIKTSFPMTVKVDGVAQDGTTMYIHNKVHNRTRTLTCAGKCAEIIVAHLGYLNYTQYTVIVGFEHLKLPIKGMNFTWKTYNPAFSRLEIWFRFFFVVLTFIVTCLFAHSLRKFSMRDWGIEQKWMSVLLPLLLLYNDPFFPLSFLVNSWLPGMLDDLFQSMFLCALLLFWLCVYHGIRVQGERKCLTFYLPKFFIVGLLWLASVTLGIWQTVNELHDPMYQYRVDTGNFQGMKVFFMVVAAVYILYLLFLIVRACSELRHMPYVDLRLKFLTALTFVVLVISIAILYLRFGAQVLQDNFVAELSTHYQNSAEFLSFYGLLNFYLYTLAFVYSPSKNALYESQLKDNPAFSMLNDSDDDVIYGSDYEEMPLQNGQAIRAKYKEESDSD

SEQ ID NO: 33569 - protein, 106 aa, Artificial Sequence
  Synthetic polypeptide
GQTAFVVDEVSNIVKEAIESAIGGNAYQHSKVNQWTTNVVEQTLSQLTKLGKPFKYIVTCVIMQKNGAGLHTASSCFWDSSTDGSCTVRWENKTMYCIVSAFGLSI

SEQ ID NO: 33570 - protein, 9 aa, Artificial Sequence
  Synthetic polypeptide
ARLLLLLMK

SEQ ID NO: 33571 - protein, 6 aa, Artificial Sequence
  Synthetic polypeptide
PDCFCC

SEQ ID NO: 33572 - protein, 85 aa, Artificial Sequence
  Synthetic polypeptide
GQTAFVVDEVSNIVKEAIESAIGGNAYQHSKVNQWTTNVVEQTLSQLTKLGKPFKYIGNGVLFLLYLRDGFLTLIRGASSTRNNS

SEQ ID NO: 33573 - protein, 86 aa, Artificial Sequence
  Synthetic polypeptide
ADCSCWLVQLAGVPVGRWHSTRLGCQNEEEVKIRNHSKPVSGAGTVVAGTAAVVLSICSSEGWHILASIFSPEKIPLVCSSPVSAF

SEQ ID NO: 33574 - protein, 48 aa, Artificial Sequence
  Synthetic polypeptide
QLWAAPLCPSLGSRKNSEQIAPVGWCSWLVFLLAGGIAQDWAARMRKK

SEQ ID NO: 33575 - protein, 21 aa, Artificial Sequence
  Synthetic polypeptide
SQLLRRLRHAQENRKCKNCLP

SEQ ID NO: 33576 - protein, 21 aa, Artificial Sequence
  Synthetic polypeptide
AWWYVPVVPATKEAEACPRES

SEQ ID NO: 33577 - protein, 20 aa, Artificial Sequence
  Synthetic polypeptide
SQLLRRLRHKRPATLSSQLC

SEQ ID NO: 33578 - protein, 16 aa, Artificial Sequence
  Synthetic polypeptide
AWWYVPVVPATKEAET

SEQ ID NO: 33579 - protein, 72 aa, Artificial Sequence
  Synthetic polypeptide
MFTCLSCILQPGIYTPRGQGVFVLFIAVLSCASRIIHGKLLIPKIMYFIKSTSVEVWILSSAGHQVLFVCTT

SEQ ID NO: 33580 - protein, 40 aa, Artificial Sequence
  Synthetic polypeptide
CLLVYLVSCNLEYTLREGRASLFCSLLYSPVPPALYMGSC

SEQ ID NO: 33581 - protein, 2475 aa, Artificial Sequence
  Synthetic polypeptide
VYLFILYPATWNIHSERAGRLCFVHCCTLLCLPHYTWEAVDTKNNVLYKINICGSVDIVQCGPSSAVCMHDLKTRTYHSVGDSVLRSATRSLLEFNTTVSCDQQGTNHRVQSSIAFLCGKTLGTPEFVTATECVHYFEWRTTAACKKDIFKANKEVPCYVFDEELRKHDLNPLIKLSGAYLVDDSDPDTSLFINVCRDIDTLRDPGSQLRACPPGTAACLVRGHQAFDVGQPRDGLKLVRKDRLVLSYVREEAGKLDFCDGHSPAVTITFVCPSERREGTIPKLTAKSNCRYEIEWITEYACHRDYLESKTCSLSGEQQDVSIDLTPLAQSGGSSYISDGKEYLFYLNVCGETEIQFCNKKQAAVCQVKKSDTSQVKAAGRYHNQTLRYSDGDLTLIYFGGDECSSGFQRMSVINFECNKTAGNDGKGTPVFTGEVDCTYFFTWDTEYACVKEKEDLLCGATDGKKRYDLSALVRHAEPEQNWEAVDGSQTETEKKHFFINICHRVLQEGKARGCPEDAAVCAVDKNGSKNLGKFISSPMKEKGNIQLSYSDGDDCGHGKKIKTNITLVCKPGDLESAPVLRTSGEGGCFYEFEWHTAAACVLSKTEGENCTVFDSQAGFSFDLSPLTKKNGAYKVETKKYDFYINVCGPVSVSPCQPDSGACQVAKSDEKTWNLGLSNAKLSYYDGMIQLNYRGGTPYNNERHTPRATLITFLCDRDAGVGFPEYQEEDNSTYNFRWYTSYACPEEPLECVVTDPSTLEQYDLSSLAKSEGGLGGNWYAMDNSGEHVTWRKYYINVCRPLNPVPGCNRYASACQMKYEKDQGSFTEVVSISNLGMAKTGPVVEDSGSLLLEYVNGSACTTSDGRQTTYTTRIHLVCSRGRLNSHPIFSLNWECVVSFLWNTEAACPIQTTTDTDQACSIRDPNSGFVFNLNPLNSSQGYNVSGIGKIFMFNVCGTMPVCGTILGKPASGCEAETQTEELKNWKPARPVGIEKSLQLSTEGFITLTYKGPLSAKGTADAFIVRFVCNDDVYSGPLKFLHQDIDSGQGIRNTYFEFETALACVPSPVDCQVTDLAGNEYDLTGLSTVRKPWTAVDTSVDGRKRTFYLSVCNPLPYIPGCQGSAVGSCLVSEGNSWNLGVVQMSPQAAANGSLSIMYVNGDKCGNQRFSTRITFECAQISGSPAFQLQDGCEYVFIWRTVEACPVVRVEGDNCEVKDPRHGNLYDLKPLGLNDTIVSAGEYTYYFRVCGKLSSDVCPTSDKSKVVSSCQEKREPQGFHKVAGLLTQKLTYENGLLKMNFTGGDTCHKVYQRSTAIFFYCDRGTQRPVFLKETSDCSYLFEWRTQYACPPFDLTECSFKDGAGNSFDLSSLSRYSDNWEAITGTGDPEHYLINVCKSLAPQAGTEPCPPEAAACLLGGSKPVNLGRVRDGPQWRDGIIVLKYVDGDLCPDGIRKKSTTIRFTCSESQVNSRPMFISAVEDCEYTFAWPTATACPMKSNEHDDCQVTNPSTGHLFDLSSLSGRAGFTAAYSEKGLVYMSICGENENCPPGVGACFGQTRISVGKANKRLRYVDQVLQLVYKDGSPCPSKSGLSYKSVISFVCRPEARPTNRPMLISLDKQTCTLFFSWHTPLACEQATECSVRNGSSIVDLSPLIHRTGGYEAYDESEDDASDTNPDFYINICQPLNPMHGVPCPAGAAVCKVPIDGPPIDIGRVAGPPILNPIANEIYLNFESSTPCLADKHFNYTSLIAFHCKRGVSMGTPKLLRTSECDFVFEWETPVVCPDEVRMDGCTLTDEQLLYSFNLSSLSTSTFKVTRDSRTYSVGVCTFAVGPEQGGCKDGGVCLLSGTKGASFGRLQSMKLDYRHQDEAVVLSYVNGDRCPPETDDGVPCVFPFIFNGKSYEECIIESRAKLWCSTTADYDRDHEWGFCRHSNSYRTSSIIFKCDEDEDIGRPQVFSEVRGCDVTFEWKTKVVCPPKKLECKFVQKHKTYDLRLLSSLTGSWSLVHNGVSYYINLCQKIYKGPLGCSERASICRRTTTGDVQVLGLVHTQKLGVIGDKVVVTYSKGYPCGGNKTASSVIELTCTKTVGRPAFKRFDIDSCTYYFSWDSRAACAVKPQEVQMVNGTITNPINGKSFSLGDIYFKLFRASGDMRTNGDNYLYEIQLSSITSSRNPACSGANICQVKPNDQHFSRKVGTSDKTKYYLQDGDLDVVFASSSKCGKDKTKSVSSTIFFHCDPLVEDGIPEFSHETADCQYLFSWYTSAVCPLGVGFDSENPGDDGQMHKGLSERSQAVGAVLSLLLVALTCCLLALLLYKKERRETVISKLTTCCRRSSNVSYKYSKVNKEEETDENETEWLMEEIQLPPPRQGKEGQENGHITTKSVKALSSLHGDDQDSEDEVLTIPEVKVHSGRGAGAESSHPVRNAQSNALQEREDDRVGLVRGEKARKGKSSSAQQKTVSSTKLVSFHDDSDEDLLHI

SEQ ID NO: 33582 - protein, 2453 aa, Artificial Sequence
  Synthetic polypeptide
KRMCLLPLLSRFYTWEAVDTKNNVLYKINICGSVDIVQCGPSSAVCMHDLKTRTYHSVGDSVLRSATRSLLEFNTTVSCDQQGTNHRVQSSIAFLCGKTLGTPEFVTATECVHYFEWRTTAACKKDIFKANKEVPCYVFDEELRKHDLNPLIKLSGAYLVDDSDPDTSLFINVCRDIDTLRDPGSQLRACPPGTAACLVRGHQAFDVGQPRDGLKLVRKDRLVLSYVREEAGKLDFCDGHSPAVTITFVCPSERREGTIPKLTAKSNCRYEIEWITEYACHRDYLESKTCSLSGEQQDVSIDLTPLAQSGGSSYISDGKEYLFYLNVCGETEIQFCNKKQAAVCQVKKSDTSQVKAAGRYHNQTLRYSDGDLTLIYFGGDECSSGFQRMSVINFECNKTAGNDGKGTPVFTGEVDCTYFFTWDTEYACVKEKEDLLCGATDGKKRYDLSALVRHAEPEQNWEAVDGSQTETEKKHFFINICHRVLQEGKARGCPEDAAVCAVDKNGSKNLGKFISSPMKEKGNIQLSYSDGDDCGHGKKIKTNITLVCKPGDLESAPVLRTSGEGGCFYEFEWHTAAACVLSKTEGENCTVFDSQAGFSFDLSPLTKKNGAYKVETKKYDFYINVCGPVSVSPCQPDSGACQVAKSDEKTWNLGLSNAKLSYYDGMIQLNYRGGTPYNNERHTPRATLITFLCDRDAGVGFPEYQEEDNSTYNFRWYTSYACPEEPLECVVTDPSTLEQYDLSSLAKSEGGLGGNWYAMDNSGEHVTWRKYYINVCRPLNPVPGCNRYASACQMKYEKDQGSFTEVVSISNLGMAKTGPVVEDSGSLLLEYVNGSACTTSDGRQTTYTTRIHLVCSRGRLNSHPIFSLNWECVVSFLWNTEAACPIQTTTDTDQACSIRDPNSGFVFNLNPLNSSQGYNVSGIGKIFMFNVCGTMPVCGTILGKPASGCEAETQTEELKNWKPARPVGIEKSLQLSTEGFITLTYKGPLSAKGTADAFIVRFVCNDDVYSGPLKFLHQDIDSGQGIRNTYFEFETALACVPSPVDCQVTDLAGNEYDLTGLSTVRKPWTAVDTSVDGRKRTFYLSVCNPLPYIPGCQGSAVGSCLVSEGNSWNLGVVQMSPQAAANGSLSIMYVNGDKCGNQRFSTRITFECAQISGSPAFQLQDGCEYVFIWRTVEACPVVRVEGDNCEVKDPRHGNLYDLKPLGLNDTIVSAGEYTYYFRVCGKLSSDVCPTSDKSKVVSSCQEKREPQGFHKVAGLLTQKLTYENGLLKMNFTGGDTCHKVYQRSTAIFFYCDRGTQRPVFLKETSDCSYLFEWRTQYACPPFDLTECSFKDGAGNSFDLSSLSRYSDNWEAITGTGDPEHYLINVCKSLAPQAGTEPCPPEAAACLLGGSKPVNLGRVRDGPQWRDGIIVLKYVDGDLCPDGIRKKSTTIRFTCSESQVNSRPMFISAVEDCEYTFAWPTATACPMKSNEHDDCQVTNPSTGHLFDLSSLSGRAGFTAAYSEKGLVYMSICGENENCPPGVGACFGQTRISVGKANKRLRYVDQVLQLVYKDGSPCPSKSGLSYKSVISFVCRPEARPTNRPMLISLDKQTCTLFFSWHTPLACEQATECSVRNGSSIVDLSPLIHRTGGYEAYDESEDDASDTNPDFYINICQPLNPMHGVPCPAGAAVCKVPIDGPPIDIGRVAGPPILNPIANEIYLNFESSTPCLADKHFNYTSLIAFHCKRGVSMGTPKLLRTSECDFVFEWETPVVCPDEVRMDGCTLTDEQLLYSFNLSSLSTSTFKVTRDSRTYSVGVCTFAVGPEQGGCKDGGVCLLSGTKGASFGRLQSMKLDYRHQDEAVVLSYVNGDRCPPETDDGVPCVFPFIFNGKSYEECIIESRAKLWCSTTADYDRDHEWGFCRHSNSYRTSSIIFKCDEDEDIGRPQVFSEVRGCDVTFEWKTKVVCPPKKLECKFVQKHKTYDLRLLSSLTGSWSLVHNGVSYYINLCQKIYKGPLGCSERASICRRTTTGDVQVLGLVHTQKLGVIGDKVVVTYSKGYPCGGNKTASSVIELTCTKTVGRPAFKRFDIDSCTYYFSWDSRAACAVKPQEVQMVNGTITNPINGKSFSLGDIYFKLFRASGDMRTNGDNYLYEIQLSSITSSRNPACSGANICQVKPNDQHFSRKVGTSDKTKYYLQDGDLDVVFASSSKCGKDKTKSVSSTIFFHCDPLVEDGIPEFSHETADCQYLFSWYTSAVCPLGVGFDSENPGDDGQMHKGLSERSQAVGAVLSLLLVALTCCLLALLLYKKERRETVISKLTTCCRRSSNVSYKYSKVNKEEETDENETEWLMEEIQLPPPRQGKEGQENGHITTKSVKALSSLHGDDQDSEDEVLTIPEVKVHSGRGAGAESSHPVRNAQSNALQEREDDRVGLVRGEKARKGKSSSAQQKTVSSTKLVSFHDDSDEDLLHI

SEQ ID NO: 33583 - protein, 72 aa, Artificial Sequence
  Synthetic polypeptide
VLTRSDGFIRGFFPFCSALLLAEKECVCFPFCHDFIHGKLLIPKIMYFIKSTSVEVWILSSAGHQVLFVCTT

SEQ ID NO: 33584 - protein, 31 aa, Artificial Sequence
  Synthetic polypeptide
GAFSPFAPHFSLLKKNVFASPSVTILYMGSC

SEQ ID NO: 33585 - protein, 32 aa, Artificial Sequence
  Synthetic polypeptide
MGPGHRTPGPCSSAPWRTVSTPLPGPQPQPVP

SEQ ID NO: 33586 - protein, 18 aa, Artificial Sequence
  Synthetic polypeptide
WARVTELQAHVHQRRGGL

SEQ ID NO: 33587 - protein, 1015 aa, Artificial Sequence
  Synthetic polypeptide
GPGSQNSRPMFISAVEDCEYTFAWPTATACPMKSNEHDDCQVTNPSTGHLFDLSSLSGRAGFTAAYSEKGLVYMSICGENENCPPGVGACFGQTRISVGKANKRLRYVDQVLQLVYKDGSPCPSKSGLSYKSVISFVCRPEARPTNRPMLISLDKQTCTLFFSWHTPLACEQATECSVRNGSSIVDLSPLIHRTGGYEAYDESEDDASDTNPDFYINICQPLNPMHGVPCPAGAAVCKVPIDGPPIDIGRVAGPPILNPIANEIYLNFESSTPCLADKHFNYTSLIAFHCKRGVSMGTPKLLRTSECDFVFEWETPVVCPDEVRMDGCTLTDEQLLYSFNLSSLSTSTFKVTRDSRTYSVGVCTFAVGPEQGGCKDGGVCLLSGTKGASFGRLQSMKLDYRHQDEAVVLSYVNGDRCPPETDDGVPCVFPFIFNGKSYEECIIESRAKLWCSTTADYDRDHEWGFCRHSNSYRTSSIIFKCDEDEDIGRPQVFSEVRGCDVTFEWKTKVVCPPKKLECKFVQKHKTYDLRLLSSLTGSWSLVHNGVSYYINLCQKIYKGPLGCSERASICRRTTTGDVQVLGLVHTQKLGVIGDKVVVTYSKGYPCGGNKTASSVIELTCTKTVGRPAFKRFDIDSCTYYFSWDSRAACAVKPQEVQMVNGTITNPINGKSFSLGDIYFKLFRASGDMRTNGDNYLYEIQLSSITSSRNPACSGANICQVKPNDQHFSRKVGTSDKTKYYLQDGDLDVVFASSSKCGKDKTKSVSSTIFFHCDPLVEDGIPEFSHETADCQYLFSWYTSAVCPLGVGFDSENPGDDGQMHKGLSERSQAVGAVLSLLLVALTCCLLALLLYKKERRETVISKLTTCCRRSSNVSYKYSKVNKEEETDENETEWLMEEIQLPPPRQGKEGQENGHITTKSVKALSSLHGDDQDSEDEVLTIPEVKVHSGRGAGAESSHPVRNAQSNALQEREDDRVGLVRGEKARKGKSSSAQQKTVSSTKLVSFHDDSDEDLLHI

SEQ ID NO: 33588 - protein, 384 aa, Artificial Sequence
  Synthetic polypeptide
KYIEETYGRIVIYLLSCLGVGVTGVVVAFAPNFPVFVIFRFLQGVFGKGTWMTCYVIVTEIVGSKQRRIVGIVIQMFFTLGIIILPGIAYFIPNWQGIQLAITLPSFLFLLYYWVVPESPRWLITRKKGDKALQILRRIAKCNGKYLSSNYSEITVTDEEVSNPSFLDLVRTPQMRKCTLILMFAWFTSAVVYQGLVMRLGIIGGNLYIDFFISGVVELPGALLILLTIERLGRRLPFAASNIVAGVACLVTAFLPEGIAWLRTTVATLGRLGITMAFEIVYLVNSELYPTTLRNFGVSLCSGLCDFGGIIAPFLLFRLAAVWLELPLIIFGILASICGGLVMLLPETKGIALPETVDDVEKLGSPHSCKCGRNKKTPVSRSHL

SEQ ID NO: 33589 - protein, 33 aa, Artificial Sequence
  Synthetic polypeptide
RKRMAGSSFTCYPALVLASLGLWWPLHQTSLCL

SEQ ID NO: 33590 - protein, 125 aa, Artificial Sequence
  Synthetic polypeptide
KEMSYQAMKIHRGNVWQDRHLLAILPWCWRHWGCGGLCTKLPCVCDLPLPARCIWKGDVDDLLRDCDRNSRFETKEDCGNRDSNVLYPWNHNSPWNCLLHPQLARNPVSHHAAQLSLPPLLLGGP

SEQ ID NO: 33591 - protein, 385 aa, Artificial Sequence
  Synthetic polypeptide
KYIEETYGRIVIYLLSCLGVGVTGVVVAFAPNFPVFVIFRFLQGVFGKGTWMTCYVIVTEIVGSKQRRIVGIVIQMFFTLGIIILPGIAYFIPNWQGIQLAITLPSFLFLLYYWVVPESPRWLITRKKGDKALQILRRIAKCNGKYLSSNYSEITVTDEEVSNPSFLDLVRTPQMRKCTLILMFAWFTSAVVYQGLVMRLGIIGGNLYIDFFISGVVELPGALLILLTIERLGRRLPFAASNIVAGVACLVTAFLPEAGIAWLRTTVATLGRLGITMAFEIVYLVNSELYPTTLRNFGVSLCSGLCDFGGIIAPFLLFRLAAVWLELPLIIFGILASICGGLVMLLPETKGIALPETVDDVEKLGSPHSCKCGRNKKTPVSRSHL

SEQ ID NO: 33592 - protein, 98 aa, Artificial Sequence
  Synthetic polypeptide
WVYQGSPLLLLSHFLLLSLLKKSLSPPTMIVRTPQPCGTGSKVLAKKELAYVPIIGWMWYFTEMVFCSRKWEQDRKTVATSLQHLRDYPEKYFFLIHC

SEQ ID NO: 33593 - protein, 63 aa, Artificial Sequence
  Synthetic polypeptide
ELLSHVELAPRSWPRKSWPMSQLSAGCGTSPRWSSVRASGSRIARRLPPVCSTSGTTPRSIFS

SEQ ID NO: 33594 - protein, 77 aa, Artificial Sequence
  Synthetic polypeptide
EEPFASHHDCENSSAMWNWLQGPGQERAGLCPNYRLDVVLHRDGLLFAQVGAGSQDGCHQFAAPPGLPREVFFPDSL

SEQ ID NO: 33595 - protein, 301 aa, Artificial Sequence
  Synthetic polypeptide
WVYQGSPLLLLSHFLLLSLLKKSLSPPTMIVRTPQPCGTGSKVLAKKELAYVPIIGWMWYFTEMVFCSRKWEQDRKTVATSLQHLRDYPEKYFFLIHCEGTRFTEKKHEISMQVARAKGLPRLKHHLLPRTKGFAITVRSLRNVVSAVYDCTLNFRNNENPTLLGVLNGKKYHADLYVRRIPLEDIPEDDDECSAWLHKLYQEKDAFQEEYYRTGTFPETPMVPPRRPWTLVNWLFWASLVLYPFFQFLVSMIRSGSSLTLASFILVFFVASVGVRWMIGVTEIDKGSAYGNSDSKQKLND

SEQ ID NO: 33596 - protein, 109 aa, Artificial Sequence
  Synthetic polypeptide
WVYQGSPLLLLSHFLLLSLLKKSLSPPTMIVRTPQPCGTGSKVLAKKELAYVPIIGWMWYFTEMVFCSRKWEQDRKTVATSLQHLRDYPEKYFVCRHQSSCVPRAPAGL

SEQ ID NO: 33597 - protein, 78 aa, Artificial Sequence
  Synthetic polypeptide
ELLSHVELAPRSWPRKSWPMSQLSAGCGTSPRWSSVRASGSRIARRLPPVCSTSGTTPRSILYVGTRAAVSQGLLQDC

SEQ ID NO: 33598 - protein, 74 aa, Artificial Sequence
  Synthetic polypeptide
EEPFASHHDCENSSAMWNWLQGPGQERAGLCPNYRLDVVLHRDGLLFAQVGAGSQDGCHQFAAPPGLPREVFCM

SEQ ID NO: 33599 - protein, 18 aa, Artificial Sequence
  Synthetic polypeptide
SQHFGRPRQVDHLRQGTW

SEQ ID NO: 33600 - protein, 212 aa, Artificial Sequence
  Synthetic polypeptide
WAQWLTTVIPALWEAEAGGSPEAGNVVTGEMVEELILSGADIIKVGVGPGSVCTTRTKTGVGYPQLSAVIECADSAHGLKGHIISDGGCTCPGDVAKAFGAGADFVMLGGMFSGHTECAGEVFERNGRKLKLFYGMSSDTAMNKHAGGVAEYRASEGKTVEVPYKGDVENTILDILGGLRSTCTYVGAAKLKELSRRATFIRVTQQHNTVFS

SEQ ID NO: 33601 - protein, 55 aa, Artificial Sequence
  Synthetic polypeptide
DPLSCIPRQLSHSKTQDKIEGQHKIQIIKTLLMKQTAVKKPAKSHQNQGPGCLIP

SEQ ID NO: 33602 - protein, 148 aa, Artificial Sequence
  Synthetic polypeptide
RNRPNPTKTKVLDASSLSFNTRLKWFAICFVCGVFFSILGTGLLWLPGGIKLFAVFYTLGNLAALASTCFLMGPVKQLKKMFEATRLLATIVMLLCFIFTLCAALWWHKKGLAVLFCILQFLSMTWYSLSYIPYARDAVIKCCSSLLS

SEQ ID NO: 33603 - protein, 43 aa, Artificial Sequence
  Synthetic polypeptide
DRRSAQDTDHKDLADETDCSKETGQIPPKPRSWMPHPLVSTPD

SEQ ID NO: 33604 - protein, 1371 aa, Artificial Sequence
  Synthetic polypeptide
CPRLKVMLPPGAQHSDEKGAKEIILDDDECPLQIFREWPSDKGILVFQLKRRPPDHIPKKTKKHLEGKTPKGKERADGSGYGSTLPPEKLPYLVELSPGRRNHFAYYNYHTYEDGSDSRDKPKLYRLQLSVTEVGTEKLDDNSIQLFGPGIQPHHCDLTNMDGVVTVTPRSMDAETYVEGQRISETTMLQSGMKVQFGASHVFKFVDPSQDHALAKRSVDGGLMVKGPRHKPGIVQETTFDLGGDIHSGTALPTSKSTTRLDSDRVSSASSTAERGMVKPMIRVEQQPDYRRQESRTQDASGPELILPASIEFRESSEDSFLSAIINYTNSSTVHFKLSPTYVLYMACRYVLSNQYRPDISPTERTHKVIAVVNKMVSMMEGVIQKQKNIAGALAFWMANASELLNFIKQDRDLSRITLDAQDVLAHLVQMAFKYLVHCLQSELNNYMPAFLDDPEENSLQRPKIDDVLHTLTGAMSLLRRCRVNAALTIQLFSQLFHFINMWLFNRLVTDPDSGLCSHYWGAIIRQQLGHIEAWAEKQGLELAADCHLSRIVQATTLLTMDKYAPDDIPNINSTCFKLNSLQLQALLQNYHCAPDEPFIPTDLIENVVTVAENTADELARSDGREVQLEEDPDLQLPFLLPEDGYSCDVVRNIPNGLQEFLDPLCQRGFCRLIPHTRSPGTWTIYFEGADYESHLLRENTELAQPLRKEPEIITVTLKKQNGMGLSIVAAKGAGQDKLGIYVKSVVKGGAADVDGRLAAGDQLLSVDGRSLVGLSQERAAELMTRTSSVVTLEVAKQGAIYHGLATLLNQPSPMMQRISDRRGSGKPRPKSEGFELYNNSTQNGSPESPQLPWAEYSEPKKLPGDDRLMKNRADHRSSPNVANQPPSPGGKSAYASGTTAKITSVSTGNLCTEEQTPPPRPEAYPIPTQTYTREYFTFPASKSQDRMAPPQNQWPNYEEKPHMHTDSNHSSIAIQRVTRSQEELREDKAYQLERHRIEAAMDRKSDSDMWINQSSSLDSSTSSQEHLNHSSKSVTPASTLTKSGPGRWKTPAAIPATPVAVSQPIRTDLPPPPPPPPVHYAGDFDGMSMDLPLPPPPSANQIGLPSAQVAAAERRKREEHQRWYEKEKARLEEERERKRREQERKLGQMRTQSLNPAPFSPLTAQQMKPEKPSTLQRPQETVIRELQPQQQPRTIERRDLQYITVSKEELSSGDSLSPDPWKRDAKEKLEKQQQMHIVDMLSKEIQELQSKPDRSAEESDRLRKLMLEWQFQKRLQESKQKDEDDEEEEDDDVDTMLIMQRLEAERRARQTAMPAISVLDLLQDEERRRQQQLEEMRKREAEDRARQEEERRRQEEERTKRDAEEKVMVL

SEQ ID NO: 33605 - protein, 16 aa, Artificial Sequence
  Synthetic polypeptide
IMSKTEGYASSWSPAF

SEQ ID NO: 33606 - protein, 1537 aa, Artificial Sequence
  Synthetic polypeptide
CPRLKVMLPPGAQHSDEKGAKEIILDDDECPLQIFREWPSDKGILVFQLKRRPPDHIPKKTKKHLEGKTPKGKERADGSGYGSTLPPEKLPYLVELSPGRRNHFAYYNYHTYEDGSDSRDKPKLYRLQLSVTEVGTEKLDDNSIQLFGPGIQPHHCDLTNMDGVVTVTPRSMDAETYVEGQRISETTMLQSGMKVQFGASHVFKFVDPSQDHALAKRSVDGGLMVKGPRHKPGIVQETTFDLGGDIHSGTALPTSKSTTRLDSDRVSSASSTAERGMVKPMIRVEQQPDYRRQESRTQDASGPELILPASIEFRESSEDSFLSAIINYTNSSTVHFKLSPTYVLYMACRYVLSNQYRPDISPTERTHKVIAVVNKMVSMMEGVIQEVDQVDQKQKNIAGALAFWMANASELLNFIKQDRDLSRITLDAQDVLAHLVQMAFKYLVHCLQSELNNYMPAFLDDPEENSLQRPKIDDVLHTLTGAMSLLRRCRVNAALTIQLFSQLFHFINMWLFNRLVTDPDSGLCSHYWGAIIRQQLGHIEAWAEKQGLELAADCHLSRIVQATTLLTMDKYAPDDIPNINSTCFKLNSLQLQALLQNYHCAPDEPFIPTDLIENVVTVAENTADELARSDGREVQLEEDPDLQLPFLLPEDGYSCDVVRNIPNGLQEFLDPLCQRGFCRLIPHTRSPGTWTIYFEGADYESHLLRENTELAQPLRKEPEIITVTLKKQNGMGLSIVAAKGAGQDKLGIYVKSVVKGGAADVDGRLAAGDQLLSVDGRSLVGLSQERAAELMTRTSSVVTLEVAKQGAIYHGLATLLNQPSPMMQRISDRRGSGKPRPKSEGFELYNNSTQNGSPESPQLPWAEYSEPKKLPGDDRLMKNRADHRSSPNVANQPPSPGGKSAYASGTTAKITSVSTGNLCTEEQTPPPRPEAYPIPTQTYTREYFTFPASKSQDRMAPPQNQWPNYEEKPHMHTDSNHSSIAIQRVTRSQEELREDKAYQLERHRIEAAMDRKSDSDMWINQSSSLDSSTSSQEHLNHSSKSVTPASTLTKSGPGRWKTPAAIPATPVAVSQPIRTDLPPPPPPPPVHYAGDFDGMSMDLPLPPPPSANQIGLPSAQVAAAERRKREEHQRWYEKEKARLEEERERKRREQERKLGQMRTQSLNPAPFSPLTAQQMKPEKPSTLQRPQETVIRELQPQQQPRTIERRDLQYITVSKEELSSGDSLSPDPWKRDAKEKLEKQQQMHIVDMLSKEIQELQSKPDRSAEESDRLRKLMLEWQFQKRLQESKQKDEDDEEEEDDDVDTMLIMQRLEAERRARLQDEERRRQQQLEEMRKREAEDRARQEEERRRQEEERTKRDAEEKRRQEEGYYSRLEAERRRQHDEAARRLLEPEAPGLCRPPLPRDYEPPSPSPAPGAPPPPPQRNASYLKTQVLSPDSLFTAKFVAYNEEEEEEDCSLAGPNSYPGSTGAAVGAHDACRDAKEKRSKSQDADSPGSSGAPENLTFKERQRLFSQGQDVSNKVKASRKLTELENELNTK

SEQ ID NO: 33607 - protein, 1357 aa, Artificial Sequence
  Synthetic polypeptide
CPRLKVMLPPGAQHSDEKGAKEIILDDDECPLQIFREWPSDKGILVFQLKRRPPDHIPKKTKKHLEGKTPKGKERADGSGYGSTLPPEKLPYLVELSPGRRNHFAYYNYHTYEDGSDSRDKPKLYRLQLSVTEVGTEKLDDNSIQLFGPGIQPHHCDLTNMDGVVTVTPRSMDAETYVEGQRISETTMLQSGMKVQFGASHVFKFVDPSQDHALAKRSVDGGLMVKGPRHKPGIVQETTFDLGGDIHSGTALPTSKSTTRLDSDRVSSASSTAERGMVKPMIRVEQQPDYRRQESRTQDASGPELILPASIEFRESSEDSFLSAIINYTNSSTVHFKLSPTYVLYMACRYVLSNQYRPDISPTERTHKVIAVVNKMVSMMEGVIQKQKNIAGALAFWMANASELLNFIKQDRDLSRITLDAQDVLAHLVQMAFKYLVHCLQSELNNYMPAFLDDPEENSLQRPKIDDVLHTLTGAMSLLRRCRVNAALTIQLFSQLFHFINMWLFNRLVTDPDSGLCSHYWGAIIRQQLGHIEAWAEKQGLELAADCHLSRIVQATTLLTMDKYAPDDIPNINSTCFKLNSLQLQALLQNYHCAPDEPFIPTDLIENVVTVAENTADELARSDGREVQLEEDPDLQLPFLLPEDGYSCDVVRNIPNGLQEFLDPLCQRGFCRLIPHTRSPGTWTIYFEGADYESHLLRENTELAQPLRKEPEIITVTLKKQNGMGLSIVAAKGAGQDKLGIYVKSVVKGGAADVDGRLAAGDQLLSVDGRSLVGLSQERAAELMTRTSSVVTLEVAKQGAIYHGLATLLNQPSPMMQRISDRRGSGKPRPKSEGFELYNNSTQNGSPESPQLPWAEYSEPKKLPGDDRLMKNRADHRSSPNVANQPPSPGGKSAYASGTTAKITSVSTGNLCTEEQTPPPRPEAYPIPTQTYTREYFTFPASKSQDRMAPPQNQWPNYEEKPHMHTDSNHSSIAIQRVTRSQEELREDKAYQLERHRIEAAMDRKSDSDMWINQSSSLDSSTSSQEHLNHSSKSVTPASTLTKSGPGRWKTPAAIPATPVAVSQPIRTDLPPPPPPPPVHYAGDFDGMSMDLPLPPPPSANQIGLPSAQVAAAERRKREEHQRWYEKEKARLEEERERKRREQERKLGQMRTQSLNPAPFSPLTAQQMKPEKPSTLQRPQETVIRELQPQQQPRTIERRDLQYITVSKEELSSGDSLSPDPWKRDAKEKLEKQQQMHIVDMLSKEIQELQSKPDRSAEESDRLRKLMLEWQFQKRLQESKQKDEDDEEEEDDDVDTMLIMQRLEAERRARDEERRRQQQLEEMRKREAEDRARQEEERRRQEEERTKRDAEEKVMVL

SEQ ID NO: 33608 - protein, 1530 aa, Artificial Sequence
  Synthetic polypeptide
CPRLKVMLPPGAQHSDEKGAKEIILDDDECPLQIFREWPSDKGILVFQLKRRPPDHIPKKTKKHLEGKTPKGKERADGSGYGSTLPPEKLPYLVELSPGRRNHFAYYNYHTYEDGSDSRDKPKLYRLQLSVTEVGTEKLDDNSIQLFGPGIQPHHCDLTNMDGVVTVTPRSMDAETYVEGQRISETTMLQSGMKVQFGASHVFKFVDPSQDHALAKRSVDGGLMVKGPRHKPGIVQETTFDLGGDIHSGTALPTSKSTTRLDSDRVSSASSTAERGMVKPMIRVEQQPDYRRQESRTQDASGPELILPASIEFRESSEDSFLSAIINYTNSSTVHFKLSPTYVLYMACRYVLSNQYRPDISPTERTHKVIAVVNKMVSMMEGVIQKQKNIAGALAFWMANASELLNFIKQDRDLSRITLDAQDVLAHLVQMAFKYLVHCLQSELNNYMPAFLDDPEENSLQRPKIDDVLHTLTGAMSLLRRCRVNAALTIQLFSQLFHFINMWLFNRLVTDPDSGLCSHYWGAIIRQQLGHIEAWAEKQGLELAADCHLSRIVQATTLLTMDKYAPDDIPNINSTCFKLNSLQLQALLQNYHCAPDEPFIPTDLIENVVTVAENTADELARSDGREVQLEEDPDLQLPFLLPEDGYSCDVVRNIPNGLQEFLDPLCQRGFCRLIPHTRSPGTWTIYFEGADYESHLLRENTELAIPLRKEPEIITVTLKKQNGMGLSIVAAKGAGQDKLGIYVKSVVKGGAADVDGRLAAGDQLLSVDGRSLVGLSQERAAELMTRTSSVVTLEVAKQGAIYHGLATLLNQPSPMMQRISDRRGSGKPRPKSEGFELYNNSTQNGSPESPQLPWAEYSEPKKLPGDDRLMKNRADHRSSPNVANQPPSPGGKSAYASGTTAKITSVSTGNLCTEEQTPPPRPEAYPIPTQTYTREYFTFPASKSQDRMAPPQNQWPNYEEKPHMHTDSNHSSIAIQRVTRSQEELREDKAYQLERHRIEAAMDRKSDSDMWINQSSSLDSSTSSQEHLNHSSKSVTPASTLTKSGPGRWKTPAAIPATPVAVSQPIRTDLPPPPPPPPVHYAGDFDGMSMDLPLPPPPSANQIGLPSAQVAAAERRKREEHQRWYEKEKARLEEERERKRREQERKLGQMRTQSLNPAPFSPLTAQQMKPEKPSTLQRPQETVIRELQPQQQPRTIERRDLQYITVSKEELSSGDSLSPDPWKRDAKEKLEKQQQMHIVDMLSKEIQELQSKPDRSAEESDRLRKLMLEWQFQKRLQESKQKDEDDEEEEDDDVDTMLIMQRLEAERRARLQDEERRRQQQLEEMRKREAEDRARQEEERRRQEEERTKRDAEEKRRQEEGYYSRLEAERRRQHDEAARRLLEPEAPGLCRPPLPRDYEPPSPSPAPGAPPPPPQRNASYLKTQVLSPDSLFTAKFVAYNEEEEEEDCSLAGPNSYPGSTGAAVGAHDACRDAKEKRSKSQDADSPGSSGAPENLTFKERQRLFSQGQDVSNKVKASRKLTELENELNTK

SEQ ID NO: 33609 - protein, 1450 aa, Artificial Sequence
  Synthetic polypeptide
CPRLKVMLPPGAQHSDEKGAKEIILDDDECPLQIFREWPSDKGILVFQLKRRPPDHIPKKTKKHLEGKTPKGKERADGSGYGSTLPPEKLPYLVELSPDGSDSRDKPKLYRLQLSVTEVGTEKLDDNSIQLFGPGIQPHHCDLTNMDGVVTVTPRSMDAETYVEGQRISETTMLQSGMKVQFGASHVFKFVDPSQDHALAKRSVDGGLMVKGPRHKPGIVQETTFDLGGDIHSGTALPTSKSTTRLDSDRVSSASSTAERGMVKPMIRVEQQPDYRRQESRTQDASGPELILPASIEFRESSEDSFLSAIINYTNSSTVHFKLSPTYVLYMACRYVLSNQYRPDISPTERTHKVIAVVNKMVSMMEGVIQKQKNIAGALAFWMANASELLNFIKQDRDLSRITLDAQDVLAHLVQMAFKYLVHCLQSELNNYMPAFLDDPEENSLQRPKIDDVLHTLTGAMSLLRRCRVNAALTIQLFSQLFHFINMWLFNRLVTDPDSGLCSHYWGAIIRQQLGHIEAWAEKQGLELAADCHLSRIVQATTLLTMDKYAPDDIPNINSTCFKLNSLQLQALLQNYHCAPDEPFIPTDLIENVVTVAENTADELARSDGREVQLEEDPDLQLPFLLPEDGYSCDVVRNIPNGLQEFLDPLCQRGFCRLIPHTRSPGTWTIYFEGADYESHLLRENTELAIPLRKEPEIITVTLKKQNGMGLSIVAAKGAGQDKLGIYVKSVVKGGAADDGRLAAGDQLLSVDGRSLVGLSQERAAELMTRTSSVVTLEVAKQGAIYHGLATLLNQPSPMMQRISDRRGSGKPRPKSEGFELYNNSTQNGSPESPQLPWAEYSEPKKLPGDDRLMKNRADHRSSPNVANQPPSPGGKSAYASGTTAKITSVSTGNLCTEEQTPPPRPEAYPIPTQTYTREYFTFPASKSQDRMAPPQNQWPNYEEKPHMHTDSNHSSIAIQRVTRSQEELREDKAYQLERHRIEAAMDRKSDSDMWINQSSSLDSSTSSQEHLNHSSKSVTPASTLTKSGPGRWKTPAAIPATPVAVSQPIRTDLPPPPPPPPVHYAGDFDGMSMDLPLPPPPSANQIGLPSAQVAAAERRKREEHQRWYEKEKARLEEERERKRREQERKLGQMRTQSLNPAPFSPLTAQQMKPEKPSTLQRPQETVIRELQPQQQPRTIERRDLQYITVSKEELSSGDSLSPDPWKRDAKEKLEKQQQMHIVDMLSKEIQELQSKPDRSAEESDRLRKLMLEWQFQKRLQESKQKDEDDEEEEDDDVDTMLIMQRLEAERRARLQDEERRRQQQLEEMRKREAEDRARQEEERRRQEEERTKRDAEEKRRQEEGYYSRLEAERRRQHDEAARRLLEPEAPGPNSYPGSTGAAVGAHDACRDAKEKRSKSQDADSPGSSGAPENLTFKERQRLFSQGQDVSNKVKASRKLTELENELNTK

SEQ ID NO: 33610 - protein, 1530 aa, Artificial Sequence
  Synthetic polypeptide
CPRLKVMLPPGAQHSDEKGAKEIILDDDECPLQIFREWPSDKGILVFQLKRRPPDHIPKKTKKHLEGKTPKGKERADGSGYGSTLPPEKLPYLVELSPGRRNHFAYYNYHTYEDGSDSRDKPKLYRLQLSVTEVGTEKLDDNSIQLFGPGIQPHHCDLTNMDGVVTVTPRSMDAETYVEGQRISETTMLQSGMKVQFGASHVFKFVDPSQDHALAKRSVDGGLMVKGPRHKPGIVQETTFDLGGDIHSGTALPTSKSTTRLDSDRVSSASSTAERGMVKPMIRVEQQPDYRRQESRTQDASGPELILPASIEFRESSEDSFLSAIINYTNSSTVHFKLSPTYVLYMACRYVLSNQYRPDISPTERTHKVIAVVNKMVSMMEGVIQKQKNIAGALAFWMANASELLNFIKQDRDLSRITLDAQDVLAHLVQMAFKYLVHCLQSELNNYMPAFLDDPEENSLQRPKIDDVLHTLTGAMSLLRRCRVNAALTIQLFSQLFHFINMWLFNRLVTDPDSGLCSHYWGAIIRQQLGHIEAWAEKQGLELAADCHLSRIVQATTLLTMDKYAPDDIPNINSTCFKLNSLQLQALLQNYHCAPDEPFIPTDLIENVVTVAENTADELARSDGREVQLEEDPDLQLPFLLPEDGYSCDVVRNIPNGLQEFLDPLCQRGFCRLIPHTRSPGTWTIYFEGADYESHLLRENTELAQPLRKEPEIITVTLKKQNGMGLSIVAAKGAGQDKLGIYVKSVVKGGAADVDGRLAAGDQLLSVDGRSLVGLSQERAAELMTRTSSVVTLEVAKQGAIYHGLATLLNQPSPMMQRISDRRGSGKPRPKSEGFELYNNSTQNGSPESPQLPWAEYSEPKKLPGDDRLMKNRADHRSSPNVANQPPSPGGKSAYASGTTAKITSVSTGNLCTEEQTPPPRPEAYPIPTQTYTREYFTFPASKSQDRMAPPQNQWPNYEEKPHMHTDSNHSSIAIQRVTRSQEELREDKAYQLERHRIEAAMDRKSDSDMWINQSSSLDSSTSSQEHLNHSSKSVTPASTLTKSGPGRWKTPAAIPATPVAVSQPIRTDLPPPPPPPPVHYAGDFDGMSMDLPLPPPPSANQIGLPSAQVAAAERRKREEHQRWYEKEKARLEEERERKRREQERKLGQMRTQSLNPAPFSPLTAQQMKPEKPSTLQRPQETVIRELQPQQQPRTIERRDLQYITVSKEELSSGDSLSPDPWKRDAKEKLEKQQQMHIVDMLSKEIQELQSKPDRSAEESDRLRKLMLEWQFQKRLQESKQKDEDDEEEEDDDVDTMLIMQRLEAERRARLQDEERRRQQQLEEMRKREAEDRARQEEERRRQEEERTKRDAEEKRRQEEGYYSRLEAERRRQHDEAARRLLEPEAPGLCRPPLPRDYEPPSPSPAPGAPPPPPQRNASYLKTQVLSPDSLFTAKFVAYNEEEEEEDCSLAGPNSYPGSTGAAVGAHDACRDAKEKRSKSQDADSPGSSGAPENLTFKERQRLFSQGQDVSNKVKASRKLTELENELNTK

SEQ ID NO: 33611 - protein, 1541 aa, Artificial Sequence
  Synthetic polypeptide
CPRLKVMLPPGAQHSDEKGAKEIILDDDECPLQIFREWPSDKGILVFQLKRRPPDHIPKKTKKHLEGKTPKGKERADGSGYGSTLPPEKLPYLVELSPGRRNHFAYYNYHTYEDGSDSRDKPKLYRLQLSVTEVGTEKLDDNSIQLFGPGIQPHHCDLTNMDGVVTVTPRSMDAETYVEGQRISETTMLQSGMKVQFGASHVFKFVDPSQDHALAKRSVDGGLMVKGPRHKPGIVQETTFDLGGDIHSGTALPTSKSTTRLDSDRVSSASSTAERGMVKPMIRVEQQPDYRRQESRTQDASGPELILPASIEFRESSEDSFLSAIINYTNSSTVHFKLSPTYVLYMACRYVLSNQYRPDISPTERTHKVIAVVNKMVSMMEGVIQKQKNIAGALAFWMANASELLNFIKQDRDLSRITLDAQDVLAHLVQMAFKYLVHCLQSELNNYMPAFLDDPEENSLQRPKIDDVLHTLTGAMSLLRRCRVNAALTIQLFSQLFHFINMWLFNRLVTDPDSGLCSHYWGAIIRQQLGHIEAWAEKQGLELAADCHLSRIVQATTLLTMDKYAPDDIPNINSTCFKLNSLQLQALLQNYHCAPDEPFIPTDLIENVVTVAENTADELARSDGREVQLEEDPDLQLPFLLPEDGYSCDVVRNIPNGLQEFLDPLCQRGFCRLIPHTRSPGTWTIYFEGADYESHLLRENTELAQPLRKEPEIITVTLKKQNGMGLSIVAAKGAGQDKLGIYVKSVVKGGAADVDGRLAAGDQLLSVDGRSLVGLSQERAAELMTRTSSVVTLEVAKQGAIYHGLATLLNQPSPMMQRISDRRGSGKPRPKSEGFELYNNSTQNGSPESPQLPWAEYSEPKKLPGDDRLMKNRADHRSSPNVANQPPSPGGKSAYASGTTAKITSVSTGNLCTEEQTPPPRPEAYPIPTQTYTREYFTFPASKSQDRMAPPQNQWPNYEEKPHMHTDSNHSSIAIQRVTRSQEELREDKAYQLERHRIEAAMDRKSDSDMWINQSSSLDSSTSSQEHLNHSSKSVTPASTLTKSGPGRWKTPAAIPATPVAVSQPIRTDLPPPPPPPPVHYAGDFDGMSMDLPLPPPPSANQIGLPSAQVAAAERRKREEHQRWYEKEKARLEEERERKRREQERKLGQMRTQSLNPAPFSPLTAQQMKPEKPSTLQRPQETVIRELQPQQQPRTIERRDLQYITVSKEELSSGDSLSPDPWKRDAKEKLEKQQQMHIVDMLSKEIQELQSKPDRSAEESDRLRKLMLEWQFQKRLQESKQKDEDDEEEEDDDVDTMLIMQRLEAERRARTAMPAISVLDLLQDEERRRQQQLEEMRKREAEDRARQEEERRRQEEERTKRDAEEKRRQEEGYYSRLEAERRRQHDEAARRLLEPEAPGLCRPPLPRDYEPPSPSPAPGAPPPPPQRNASYLKTQVLSPDSLFTAKFVAYNEEEEEEDCSLAGPNSYPGSTGAAVGAHDACRDAKEKRSKSQDADSPGSSGAPENLTFKERQRLFSQGQDVSNKVKASRKLTELENELNTK

SEQ ID NO: 33612 - protein, 381 aa, Artificial Sequence
  Synthetic polypeptide
CPRLKVMLPPGAQHSDEKGAKEIILDDDECPLQIFREWPSDKGILVFQLKRRPPDHIPKKTKKHLEGKTPKGKERADGSGYGSTLPPEKLPYLVELSPDGSDSRDKPKLYRLQLSVTEVGTEKLDDNSIQLFGPGIQPHHCDLTNMDGVVTVTPRSMDAETYVEGQRISETTMLQSGMKVQFGASHVFKFVDPSQDHALAKRSVDGGLMVKGPRHKPGIVQETTFDLGGDIHSGTALPTSKSTTRLDSDRVSSASSTAERGMVKPMIRVEQQPDYRRQESRTQDASGPELILPASIEFRESSEDSFLSAIINYTNSSTVHFKLSPTYVLYMACRYVLSNQYRPDISPTERTHKVIAVVNKMVSMMEGVIQVRSSRPAMLLQ

SEQ ID NO: 33613 - protein, 1233 aa, Artificial Sequence
  Synthetic polypeptide
PHSIRHSLFGPGIQPHHCDLTNMDGVVTVTPRSMDAETYVEGQRISETTMLQSGMKVQFGASHVFKFVDPSQDHALAKRSVDGGLMVKGPRHKPGIVQETTFDLGGDIHSGTALPTSKSTTRLDSDRVSSASSTAERGMVKPMIRVEQQPDYRRQESRTQDASGPELILPASIEFRESSEDSFLSAIINYTNSSTVHFKLSPTYVLYMACRYVLSNQYRPDISPTERTHKVIAVVNKMVSMMEGVIQKQKNIAGALAFWMANASELLNFIKQDRDLSRITLDAQDVLAHLVQMAFKYLVHCLQSELNNYMPAFLDDPEENSLQRPKIDDVLHTLTGAMSLLRRCRVNAALTIQLFSQLFHFINMWLFNRLVTDPDSGLCSHYWGAIIRQQLGHIEAWAEKQGLELAADCHLSRIVQATTLLTMDKYAPDDIPNINSTCFKLNSLQLQALLQNYHCAPDEPFIPTDLIENVVTVAENTADELARSDGREVQLEEDPDLQLPFLLPEDGYSCDVVRNIPNGLQEFLDPLCQRGFCRLIPHTRSPGTWTIYFEGADYESHLLRENTELAQPLRKEPEIITVTLKKQNGMGLSIVAAKGAGQDKLGIYVKSVVKGGAADVDGRLAAGDQLLSVDGRSLVGLSQERAAELMTRTSSVVTLEVAKQGAIYHGLATLLNQPSPMMQRISDRRGSGKPRPKSEGFELYNNSTQNGSPESPQLPWAEYSEPKKLPGDDRLMKNRADHRSSPNVANQPPSPGGKSAYASGTTAKITSVSTGNLCTEEQTPPPRPEAYPIPTQTYTREYFTFPASKSQDRMAPPQNQWPNYEEKPHMHTDSNHSSIAIQRVTRSQEELREDKAYQLERHRIEAAMDRKSDSDMWINQSSSLDSSTSSQEHLNHSSKSVTPASTLTKSGPGRWKTPAAIPATPVAVSQPIRTDLPPPPPPPPVHYAGDFDGMSMDLPLPPPPSANQIGLPSAQVAAAERRKREEHQRWYEKEKARLEEERERKRREQERKLGQMRTQSLNPAPFSPLTAQQMKPEKPSTLQRPQETVIRELQPQQQPRTIERRDLQYITVSKEELSSGDSLSPDPWKRDAKEKLEKQQQMHIVDMLSKEIQELQSKPDRSAEESDRLRKLMLEWQFQKRLQESKQKDEDDEEEEDDDVDTMLIMQRLEAERRARQTAMPAISVLDLLQDEERRRQQQLEEMRKREAEDRARQEEERRRQEEERTKRDAEEKVMVL

SEQ ID NO: 33614 - protein, 48 aa, Artificial Sequence
  Synthetic polypeptide
VYFRITGYNLCRSAYHWRSDHIALGIRCLAQEFSPITVTLPTWMEWSL

SEQ ID NO: 33615 - protein, 13 aa, Artificial Sequence
  Synthetic polypeptide
AFVVWPRNSAPSL

SEQ ID NO: 33616 - protein, 1399 aa, Artificial Sequence
  Synthetic polypeptide
PHSIRHSLFGPGIQPHHCDLTNMDGVVTVTPRSMDAETYVEGQRISETTMLQSGMKVQFGASHVFKFVDPSQDHALAKRSVDGGLMVKGPRHKPGIVQETTFDLGGDIHSGTALPTSKSTTRLDSDRVSSASSTAERGMVKPMIRVEQQPDYRRQESRTQDASGPELILPASIEFRESSEDSFLSAIINYTNSSTVHFKLSPTYVLYMACRYVLSNQYRPDISPTERTHKVIAVVNKMVSMMEGVIQEVDQVDQKQKNIAGALAFWMANASELLNFIKQDRDLSRITLDAQDVLAHLVQMAFKYLVHCLQSELNNYMPAFLDDPEENSLQRPKIDDVLHTLTGAMSLLRRCRVNAALTIQLFSQLFHFINMWLFNRLVTDPDSGLCSHYWGAIIRQQLGHIEAWAEKQGLELAADCHLSRIVQATTLLTMDKYAPDDIPNINSTCFKLNSLQLQALLQNYHCAPDEPFIPTDLIENVVTVAENTADELARSDGREVQLEEDPDLQLPFLLPEDGYSCDVVRNIPNGLQEFLDPLCQRGFCRLIPHTRSPGTWTIYFEGADYESHLLRENTELAQPLRKEPEIITVTLKKQNGMGLSIVAAKGAGQDKLGIYVKSVVKGGAADVDGRLAAGDQLLSVDGRSLVGLSQERAAELMTRTSSVVTLEVAKQGAIYHGLATLLNQPSPMMQRISDRRGSGKPRPKSEGFELYNNSTQNGSPESPQLPWAEYSEPKKLPGDDRLMKNRADHRSSPNVANQPPSPGGKSAYASGTTAKITSVSTGNLCTEEQTPPPRPEAYPIPTQTYTREYFTFPASKSQDRMAPPQNQWPNYEEKPHMHTDSNHSSIAIQRVTRSQEELREDKAYQLERHRIEAAMDRKSDSDMWINQSSSLDSSTSSQEHLNHSSKSVTPASTLTKSGPGRWKTPAAIPATPVAVSQPIRTDLPPPPPPPPVHYAGDFDGMSMDLPLPPPPSANQIGLPSAQVAAAERRKREEHQRWYEKEKARLEEERERKRREQERKLGQMRTQSLNPAPFSPLTAQQMKPEKPSTLQRPQETVIRELQPQQQPRTIERRDLQYITVSKEELSSGDSLSPDPWKRDAKEKLEKQQQMHIVDMLSKEIQELQSKPDRSAEESDRLRKLMLEWQFQKRLQESKQKDEDDEEEEDDDVDTMLIMQRLEAERRARLQDEERRRQQQLEEMRKREAEDRARQEEERRRQEEERTKRDAEEKRRQEEGYYSRLEAERRRQHDEAARRLLEPEAPGLCRPPLPRDYEPPSPSPAPGAPPPPPQRNASYLKTQVLSPDSLFTAKFVAYNEEEEEEDCSLAGPNSYPGSTGAAVGAHDACRDAKEKRSKSQDADSPGSSGAPENLTFKERQRLFSQGQDVSNKVKASRKLTELENELNTK

SEQ ID NO: 33617 - protein, 1219 aa, Artificial Sequence
  Synthetic polypeptide
PHSIRHSLFGPGIQPHHCDLTNMDGVVTVTPRSMDAETYVEGQRISETTMLQSGMKVQFGASHVFKFVDPSQDHALAKRSVDGGLMVKGPRHKPGIVQETTFDLGGDIHSGTALPTSKSTTRLDSDRVSSASSTAERGMVKPMIRVEQQPDYRRQESRTQDASGPELILPASIEFRESSEDSFLSAIINYTNSSTVHFKLSPTYVLYMACRYVLSNQYRPDISPTERTHKVIAVVNKMVSMMEGVIQKQKNIAGALAFWMANASELLNFIKQDRDLSRITLDAQDVLAHLVQMAFKYLVHCLQSELNNYMPAFLDDPEENSLQRPKIDDVLHTLTGAMSLLRRCRVNAALTIQLFSQLFHFINMWLFNRLVTDPDSGLCSHYWGAIIRQQLGHIEAWAEKQGLELAADCHLSRIVQATTLLTMDKYAPDDIPNINSTCFKLNSLQLQALLQNYHCAPDEPFIPTDLIENVVTVAENTADELARSDGREVQLEEDPDLQLPFLLPEDGYSCDVVRNIPNGLQEFLDPLCQRGFCRLIPHTRSPGTWTIYFEGADYESHLLRENTELAQPLRKEPEIITVTLKKQNGMGLSIVAAKGAGQDKLGIYVKSVVKGGAADVDGRLAAGDQLLSVDGRSLVGLSQERAAELMTRTSSVVTLEVAKQGAIYHGLATLLNQPSPMMQRISDRRGSGKPRPKSEGFELYNNSTQNGSPESPQLPWAEYSEPKKLPGDDRLMKNRADHRSSPNVANQPPSPGGKSAYASGTTAKITSVSTGNLCTEEQTPPPRPEAYPIPTQTYTREYFTFPASKSQDRMAPPQNQWPNYEEKPHMHTDSNHSSIAIQRVTRSQEELREDKAYQLERHRIEAAMDRKSDSDMWINQSSSLDSSTSSQEHLNHSSKSVTPASTLTKSGPGRWKTPAAIPATPVAVSQPIRTDLPPPPPPPPVHYAGDFDGMSMDLPLPPPPSANQIGLPSAQVAAAERRKREEHQRWYEKEKARLEEERERKRREQERKLGQMRTQSLNPAPFSPLTAQQMKPEKPSTLQRPQETVIRELQPQQQPRTIERRDLQYITVSKEELSSGDSLSPDPWKRDAKEKLEKQQQMHIVDMLSKEIQELQSKPDRSAEESDRLRKLMLEWQFQKRLQESKQKDEDDEEEEDDDVDTMLIMQRLEAERRARDEERRRQQQLEEMRKREAEDRARQEEERRRQEEERTKRDAEEKVMVL

SEQ ID NO: 33618 - protein, 1392 aa, Artificial Sequence
  Synthetic polypeptide
PHSIRHSLFGPGIQPHHCDLTNMDGVVTVTPRSMDAETYVEGQRISETTMLQSGMKVQFGASHVFKFVDPSQDHALAKRSVDGGLMVKGPRHKPGIVQETTFDLGGDIHSGTALPTSKSTTRLDSDRVSSASSTAERGMVKPMIRVEQQPDYRRQESRTQDASGPELILPASIEFRESSEDSFLSAIINYTNSSTVHFKLSPTYVLYMACRYVLSNQYRPDISPTERTHKVIAVVNKMVSMMEGVIQKQKNIAGALAFWMANASELLNFIKQDRDLSRITLDAQDVLAHLVQMAFKYLVHCLQSELNNYMPAFLDDPEENSLQRPKIDDVLHTLTGAMSLLRRCRVNAALTIQLFSQLFHFINMWLFNRLVTDPDSGLCSHYWGAIIRQQLGHIEAWAEKQGLELAADCHLSRIVQATTLLTMDKYAPDDIPNINSTCFKLNSLQLQALLQNYHCAPDEPFIPTDLIENVVTVAENTADELARSDGREVQLEEDPDLQLPFLLPEDGYSCDVVRNIPNGLQEFLDPLCQRGFCRLIPHTRSPGTWTIYFEGADYESHLLRENTELAIPLRKEPEIITVTLKKQNGMGLSIVAAKGAGQDKLGIYVKSVVKGGAADVDGRLAAGDQLLSVDGRSLVGLSQERAAELMTRTSSVVTLEVAKQGAIYHGLATLLNQPSPMMQRISDRRGSGKPRPKSEGFELYNNSTQNGSPESPQLPWAEYSEPKKLPGDDRLMKNRADHRSSPNVANQPPSPGGKSAYASGTTAKITSVSTGNLCTEEQTPPPRPEAYPIPTQTYTREYFTFPASKSQDRMAPPQNQWPNYEEKPHMHTDSNHSSIAIQRVTRSQEELREDKAYQLERHRIEAAMDRKSDSDMWINQSSSLDSSTSSQEHLNHSSKSVTPASTLTKSGPGRWKTPAAIPATPVAVSQPIRTDLPPPPPPPPVHYAGDFDGMSMDLPLPPPPSANQIGLPSAQVAAAERRKREEHQRWYEKEKARLEEERERKRREQERKLGQMRTQSLNPAPFSPLTAQQMKPEKPSTLQRPQETVIRELQPQQQPRTIERRDLQYITVSKEELSSGDSLSPDPWKRDAKEKLEKQQQMHIVDMLSKEIQELQSKPDRSAEESDRLRKLMLEWQFQKRLQESKQKDEDDEEEEDDDVDTMLIMQRLEAERRARLQDEERRRQQQLEEMRKREAEDRARQEEERRRQEEERTKRDAEEKRRQEEGYYSRLEAERRRQHDEAARRLLEPEAPGLCRPPLPRDYEPPSPSPAPGAPPPPPQRNASYLKTQVLSPDSLFTAKFVAYNEEEEEEDCSLAGPNSYPGSTGAAVGAHDACRDAKEKRSKSQDADSPGSSGAPENLTFKERQRLFSQGQDVSNKVKASRKLTELENELNTK

SEQ ID NO: 33619 - protein, 1327 aa, Artificial Sequence
  Synthetic polypeptide
PHSIRHSLFGPGIQPHHCDLTNMDGVVTVTPRSMDAETYVEGQRISETTMLQSGMKVQFGASHVFKFVDPSQDHALAKRSVDGGLMVKGPRHKPGIVQETTFDLGGDIHSGTALPTSKSTTRLDSDRVSSASSTAERGMVKPMIRVEQQPDYRRQESRTQDASGPELILPASIEFRESSEDSFLSAIINYTNSSTVHFKLSPTYVLYMACRYVLSNQYRPDISPTERTHKVIAVVNKMVSMMEGVIQKQKNIAGALAFWMANASELLNFIKQDRDLSRITLDAQDVLAHLVQMAFKYLVHCLQSELNNYMPAFLDDPEENSLQRPKIDDVLHTLTGAMSLLRRCRVNAALTIQLFSQLFHFINMWLFNRLVTDPDSGLCSHYWGAIIRQQLGHIEAWAEKQGLELAADCHLSRIVQATTLLTMDKYAPDDIPNINSTCFKLNSLQLQALLQNYHCAPDEPFIPTDLIENVVTVAENTADELARSDGREVQLEEDPDLQLPFLLPEDGYSCDVVRNIPNGLQEFLDPLCQRGFCRLIPHTRSPGTWTIYFEGADYESHLLRENTELAIPLRKEPEIITVTLKKQNGMGLSIVAAKGAGQDKLGIYVKSVVKGGAADDGRLAAGDQLLSVDGRSLVGLSQERAAELMTRTSSVVTLEVAKQGAIYHGLATLLNQPSPMMQRISDRRGSGKPRPKSEGFELYNNSTQNGSPESPQLPWAEYSEPKKLPGDDRLMKNRADHRSSPNVANQPPSPGGKSAYASGTTAKITSVSTGNLCTEEQTPPPRPEAYPIPTQTYTREYFTFPASKSQDRMAPPQNQWPNYEEKPHMHTDSNHSSIAIQRVTRSQEELREDKAYQLERHRIEAAMDRKSDSDMWINQSSSLDSSTSSQEHLNHSSKSVTPASTLTKSGPGRWKTPAAIPATPVAVSQPIRTDLPPPPPPPPVHYAGDFDGMSMDLPLPPPPSANQIGLPSAQVAAAERRKREEHQRWYEKEKARLEEERERKRREQERKLGQMRTQSLNPAPFSPLTAQQMKPEKPSTLQRPQETVIRELQPQQQPRTIERRDLQYITVSKEELSSGDSLSPDPWKRDAKEKLEKQQQMHIVDMLSKEIQELQSKPDRSAEESDRLRKLMLEWQFQKRLQESKQKDEDDEEEEDDDVDTMLIMQRLEAERRARLQDEERRRQQQLEEMRKREAEDRARQEEERRRQEEERTKRDAEEKRRQEEGYYSRLEAERRRQHDEAARRLLEPEAPGPNSYPGSTGAAVGAHDACRDAKEKRSKSQDADSPGSSGAPENLTFKERQRLFSQGQDVSNKVKASRKLTELENELNTK

SEQ ID NO: 33620 - protein, 1392 aa, Artificial Sequence
  Synthetic polypeptide
PHSIRHSLFGPGIQPHHCDLTNMDGVVTVTPRSMDAETYVEGQRISETTMLQSGMKVQFGASHVFKFVDPSQDHALAKRSVDGGLMVKGPRHKPGIVQETTFDLGGDIHSGTALPTSKSTTRLDSDRVSSASSTAERGMVKPMIRVEQQPDYRRQESRTQDASGPELILPASIEFRESSEDSFLSAIINYTNSSTVHFKLSPTYVLYMACRYVLSNQYRPDISPTERTHKVIAVVNKMVSMMEGVIQKQKNIAGALAFWMANASELLNFIKQDRDLSRITLDAQDVLAHLVQMAFKYLVHCLQSELNNYMPAFLDDPEENSLQRPKIDDVLHTLTGAMSLLRRCRVNAALTIQLFSQLFHFINMWLFNRLVTDPDSGLCSHYWGAIIRQQLGHIEAWAEKQGLELAADCHLSRIVQATTLLTMDKYAPDDIPNINSTCFKLNSLQLQALLQNYHCAPDEPFIPTDLIENVVTVAENTADELARSDGREVQLEEDPDLQLPFLLPEDGYSCDVVRNIPNGLQEFLDPLCQRGFCRLIPHTRSPGTWTIYFEGADYESHLLRENTELAQPLRKEPEIITVTLKKQNGMGLSIVAAKGAGQDKLGIYVKSVVKGGAADVDGRLAAGDQLLSVDGRSLVGLSQERAAELMTRTSSVVTLEVAKQGAIYHGLATLLNQPSPMMQRISDRRGSGKPRPKSEGFELYNNSTQNGSPESPQLPWAEYSEPKKLPGDDRLMKNRADHRSSPNVANQPPSPGGKSAYASGTTAKITSVSTGNLCTEEQTPPPRPEAYPIPTQTYTREYFTFPASKSQDRMAPPQNQWPNYEEKPHMHTDSNHSSIAIQRVTRSQEELREDKAYQLERHRIEAAMDRKSDSDMWINQSSSLDSSTSSQEHLNHSSKSVTPASTLTKSGPGRWKTPAAIPATPVAVSQPIRTDLPPPPPPPPVHYAGDFDGMSMDLPLPPPPSANQIGLPSAQVAAAERRKREEHQRWYEKEKARLEEERERKRREQERKLGQMRTQSLNPAPFSPLTAQQMKPEKPSTLQRPQETVIRELQPQQQPRTIERRDLQYITVSKEELSSGDSLSPDPWKRDAKEKLEKQQQMHIVDMLSKEIQELQSKPDRSAEESDRLRKLMLEWQFQKRLQESKQKDEDDEEEEDDDVDTMLIMQRLEAERRARLQDEERRRQQQLEEMRKREAEDRARQEEERRRQEEERTKRDAEEKRRQEEGYYSRLEAERRRQHDEAARRLLEPEAPGLCRPPLPRDYEPPSPSPAPGAPPPPPQRNASYLKTQVLSPDSLFTAKFVAYNEEEEEEDCSLAGPNSYPGSTGAAVGAHDACRDAKEKRSKSQDADSPGSSGAPENLTFKERQRLFSQGQDVSNKVKASRKLTELENELNTK

SEQ ID NO: 33621 - protein, 1403 aa, Artificial Sequence
  Synthetic polypeptide
PHSIRHSLFGPGIQPHHCDLTNMDGVVTVTPRSMDAETYVEGQRISETTMLQSGMKVQFGASHVFKFVDPSQDHALAKRSVDGGLMVKGPRHKPGIVQETTFDLGGDIHSGTALPTSKSTTRLDSDRVSSASSTAERGMVKPMIRVEQQPDYRRQESRTQDASGPELILPASIEFRESSEDSFLSAIINYTNSSTVHFKLSPTYVLYMACRYVLSNQYRPDISPTERTHKVIAVVNKMVSMMEGVIQKQKNIAGALAFWMANASELLNFIKQDRDLSRITLDAQDVLAHLVQMAFKYLVHCLQSELNNYMPAFLDDPEENSLQRPKIDDVLHTLTGAMSLLRRCRVNAALTIQLFSQLFHFINMWLFNRLVTDPDSGLCSHYWGAIIRQQLGHIEAWAEKQGLELAADCHLSRIVQATTLLTMDKYAPDDIPNINSTCFKLNSLQLQALLQNYHCAPDEPFIPTDLIENVVTVAENTADELARSDGREVQLEEDPDLQLPFLLPEDGYSCDVVRNIPNGLQEFLDPLCQRGFCRLIPHTRSPGTWTIYFEGADYESHLLRENTELAQPLRKEPEIITVTLKKQNGMGLSIVAAKGAGQDKLGIYVKSVVKGGAADVDGRLAAGDQLLSVDGRSLVGLSQERAAELMTRTSSVVTLEVAKQGAIYHGLATLLNQPSPMMQRISDRRGSGKPRPKSEGFELYNNSTQNGSPESPQLPWAEYSEPKKLPGDDRLMKNRADHRSSPNVANQPPSPGGKSAYASGTTAKITSVSTGNLCTEEQTPPPRPEAYPIPTQTYTREYFTFPASKSQDRMAPPQNQWPNYEEKPHMHTDSNHSSIAIQRVTRSQEELREDKAYQLERHRIEAAMDRKSDSDMWINQSSSLDSSTSSQEHLNHSSKSVTPASTLTKSGPGRWKTPAAIPATPVAVSQPIRTDLPPPPPPPPVHYAGDFDGMSMDLPLPPPPSANQIGLPSAQVAAAERRKREEHQRWYEKEKARLEEERERKRREQERKLGQMRTQSLNPAPFSPLTAQQMKPEKPSTLQRPQETVIRELQPQQQPRTIERRDLQYITVSKEELSSGDSLSPDPWKRDAKEKLEKQQQMHIVDMLSKEIQELQSKPDRSAEESDRLRKLMLEWQFQKRLQESKQKDEDDEEEEDDDVDTMLIMQRLEAERRARTAMPAISVLDLLQDEERRRQQQLEEMRKREAEDRARQEEERRRQEEERTKRDAEEKRRQEEGYYSRLEAERRRQHDEAARRLLEPEAPGLCRPPLPRDYEPPSPSPAPGAPPPPPQRNASYLKTQVLSPDSLFTAKFVAYNEEEEEEDCSLAGPNSYPGSTGAAVGAHDACRDAKEKRSKSQDADSPGSSGAPENLTFKERQRLFSQGQDVSNKVKASRKLTELENELNTK

SEQ ID NO: 33622 - protein, 258 aa, Artificial Sequence
  Synthetic polypeptide
PHSIRHSLFGPGIQPHHCDLTNMDGVVTVTPRSMDAETYVEGQRISETTMLQSGMKVQFGASHVFKFVDPSQDHALAKRSVDGGLMVKGPRHKPGIVQETTFDLGGDIHSGTALPTSKSTTRLDSDRVSSASSTAERGMVKPMIRVEQQPDYRRQESRTQDASGPELILPASIEFRESSEDSFLSAIINYTNSSTVHFKLSPTYVLYMACRYVLSNQYRPDISPTERTHKVIAVVNKMVSMMEGVIQVRSSRPAMLLQ

SEQ ID NO: 33623 - protein, 33 aa, Artificial Sequence
  Synthetic polypeptide
FAALESLSQSLRISALPSSFWKIPQEAQRLKSP

SEQ ID NO: 33624 - protein, 33 aa, Artificial Sequence
  Synthetic polypeptide
GHSDLRHWNPSVRVSESLLFQAHFGKYLKKPKG

SEQ ID NO: 33625 - protein, 299 aa, Artificial Sequence
  Synthetic polypeptide
GTVICGTGIPQSESQNLCSSKLILENTSRSPKVEVSIVEVYNNDIFDLLAKDSIAAVSGVKREVVTAKDGRTEVALLASEAVGSASKLMELVHGGLQLRAKHPTLVHADSSRSHLIITVTLTTASCSDSTADQACSATLPREQTEAGRAGRSRRASQGALAPQLVPGNPAGHAEQVQARLQLVDSAGSECVGVSGVTGLALREMACISRSLAALAGVLGALLEHRGHAPYRNSRLTHLLQDCLGGDAKLLVILCISPSQRHLAQTLQGLGFGIRARQVQRGPARKKPPSSQTEGKRRPD

SEQ ID NO: 33626 - protein, 247 aa, Artificial Sequence
  Synthetic polypeptide
GTVICGTGIPQSESQNLCSSKLILENTSRSPKVEVSIVEVYNNDIFDLLAKDSIAAVSGVKREVVTAKDGRTEVALLASEAVGSASKLMELVHGGLQLRAKHPTLVHADSSRSHLIITVTLTTASCSDSTADQACSATLPREQTEAGRAGRSRRASQGALAPQLVPGNPAGHAEQVQARLQLVDSAGSECVGGDAKLLVILCISPSQRHLAQTLQGLGFGIRARQVQRGPARKKPPSSQTEGKRRPD

SEQ ID NO: 33627 - protein, 88 aa, Artificial Sequence
  Synthetic polypeptide
WFYKGEFPCTRPLACRHRRHLFAPPSPFTTIVRLPQPCGTGRDVWNPVLRGLHAVSRSRPWEWTRWPRNTGMSSCCCPAGSNCGWPWG

SEQ ID NO: 33628 - protein, 16 aa, Artificial Sequence
  Synthetic polypeptide
GFPSHVELGAMYGTQS

SEQ ID NO: 33629 - protein, 548 aa, Artificial Sequence
  Synthetic polypeptide
KTSLCSSFTFHHDCEASPAMWNWARCMEPSPERPACSQQEPTLGMDAMASEHRDVLVLLPSREQLRLAVGVKATGRELFQQVCNVASIRDAQFFGLCVVRNNEYIFMDLEQKLSKYFSKDWKKERNEGNEKPRAPFVAFLRVQHYVENGRVISDHRARHLYYCHLKERVLRSQCAHREEAYFLLAACALQADLGEHRESAHAGRYFEPHSYFPQWIITKRGIDYILRHMPTLHRERQGLSPKEAMLCFIQEACRLEDVPVHFFRLHKDKKEGRPTVILGLALRGVHIYQGKKLEIQLDGLPAAQKLVYYTGCTWRSRHLLHLLRASHQLHLRVRPTLQQLRQREEAEEKQHYRESYISDELELDLASRSFPGSGVSSQHCPHCLSRHSADSHGSSYTSGIKANSWLRESREMSVDVPLEVHGLHEKEPSSSPRTSRSHPSTRGDSQATRQEPCTQVRTRGQSAEAVHQIQEMTAGVSEEQHSHGLDDMQLHQLALHPAPTSLSHTFHRALDCRLAGPCETRATLPSKRSSNCLALDLFGEAPPQEFVV

SEQ ID NO: 33630 - protein, 140 aa, Artificial Sequence
  Synthetic polypeptide
KTSLCSSFTFHHDCEASPAMWNWARCMEPSPERPACSQQEPTLGMDAMASEHRDVLVLLPSREQLRLAVGVKATGRELFQQVCNVASIRDAQFFGLCVVRNNEYIFMDLEQKLSKYFSKDWKKERNELLRPEGLSAGGLW

SEQ ID NO: 33631 - protein, 153 aa, Artificial Sequence
  Synthetic polypeptide
KTSLCSSFTFHHDCEASPAMWNWARCMEPSPERPACSQQEPTLGMDAMASEHRDVLVLLPSREQLRLAVGVKATGRELFQQVCNVASIRDAQFFGLCVVRNNEYIFMDLEQKLSKYFSKDWKKERNEGNEKPRAPFVAFLRVQHYVENGRVIS

SEQ ID NO: 33632 - protein, 179 aa, Artificial Sequence
  Synthetic polypeptide
GLPNHAKLYEQPKCDNTARAHPAKARDLYKGRQLQGCPGAKKHEFLTSVLDALSTDMVHAASDPSSSSGRLSEPDPSHTLEERVVHWYFKLLDKNSSGDIGKKEIKPFKRFLRKKSKPKKCVKKFVEYCDVNNDKSISVQELMGCLGVAKEDGKADTKKRHTPRGHAESTSNRQPRKQG

SEQ ID NO: 33633 - protein, 62 aa, Artificial Sequence
  Synthetic polypeptide
KGACVSFAFCHDCNFPEASPTMPNCTSSRNVTTRPGPTQPKPGTCTRAASYKVVRVPKSMSF

SEQ ID NO: 33634 - protein, 53 aa, Artificial Sequence
  Synthetic polypeptide
DPMVLYVSDISPACTHSILPPCERVPASPLLSAMTVIFLRPPQPCQTVRAAEM

SEQ ID NO: 33635 - protein, 16 aa, Artificial Sequence
  Synthetic polypeptide
ADNEGFIIYNPTASGL

SEQ ID NO: 33636 - protein, 168 aa, Artificial Sequence
  Synthetic polypeptide
DTGVKKKLLRQIMKGSSFTTQQPQAYNLFLTTAIGDGMRLWDLRTLRCERHFEGHPTRGYPCGIAFSPCGRFAACGAEDRHAYVYEMGSSTFSHRLAGHTDTVTGVAFNPSAPQMESRSVAHAGVQWHDLGSLQPPPSRFKQFFCLSLPSSWDYSLPQLPWMVNSSSF

SEQ ID NO: 33637 - protein, 130 aa, Artificial Sequence
  Synthetic polypeptide
DTGVKKKLLRQIMKGSSFTTQQPQAYNLFLTTAIGDGMRLWDLRTLRCERHFEGHPTRGYPCGIAFSPCGRFAACGAEDRHAYVYEMGSSTFSHRLAGHTDTVTGVAFNPSAPQLATATLDGKLQLFLAE

SEQ ID NO: 33638 - protein, 68 aa, Artificial Sequence
  Synthetic polypeptide
DKNSTGWSQEDGKPRQQRRQERGKVTTGRQKTQSEGERRRTHQRDVSSVLPGKPDCTERHEGPTPGFP

SEQ ID NO: 33639 - protein, 457 aa, Artificial Sequence
  Synthetic polypeptide
PQGGRKPKAREREGEPTSVMCPLFSRENPTARNVMKDQRLVFHSKVRSSGYASAPHVTMFSPKTNIKSEGKGSSRSRSSCAREAYPVECAVPTKPGPQVAAAPTCTRVCCIQYSGDGQWLACGLANHLLLVFDASLTGTPAVFSGHDGAVNAVCWSQDRRWLLSAARDGTLRMWSARGAELALLLGKDMFSKPIQSAQFYYIDAFILLSSGPEFQLLRYHIDTCKDEIKRYKQKSKSKLICRLSTTGAVDMTSLSAVNDFYSHIVLAAGRNRTVEVFDLNAGCSAAVIAEAHSRPVHQICQNKGSSFTTQQPQAYNLFLTTAIGDGMRLWDLRTLRCERHFEGHPTRGYPCGIAFSPCGRFAACGAEDRHAYVYEMGSSTFSHRLAGHTDTVTGVAFNPSAPQMESRSVAHAGVQWHDLGSLQPPPSRFKQFFCLSLPSSWDYSLPQLPWMVNSSSF

SEQ ID NO: 33640 - protein, 15 aa, Artificial Sequence
  Synthetic polypeptide
CVLCSPGKTRLHGTS

SEQ ID NO: 33641 - protein, 419 aa, Artificial Sequence
  Synthetic polypeptide
PQGGRKPKAREREGEPTSVMCPLFSRENPTARNVMKDQRLVFHSKVRSSGYASAPHVTMFSPKTNIKSEGKGSSRSRSSCAREAYPVECAVPTKPGPQVAAAPTCTRVCCIQYSGDGQWLACGLANHLLLVFDASLTGTPAVFSGHDGAVNAVCWSQDRRWLLSAARDGTLRMWSARGAELALLLGKDMFSKPIQSAQFYYIDAFILLSSGPEFQLLRYHIDTCKDEIKRYKQKSKSKLICRLSTTGAVDMTSLSAVNDFYSHIVLAAGRNRTVEVFDLNAGCSAAVIAEAHSRPVHQICQNKGSSFTTQQPQAYNLFLTTAIGDGMRLWDLRTLRCERHFEGHPTRGYPCGIAFSPCGRFAACGAEDRHAYVYEMGSSTFSHRLAGHTDTVTGVAFNPSAPQLATATLDGKLQLFLAE

SEQ ID NO: 33642 - protein, 123 aa, Artificial Sequence
  Synthetic polypeptide
PQGGRKPKAREREGEPTSVMCPLFSRENPTARNVMKDQRLVFHSKVRSSGYASAPHVTMFSPKTNIKSEGKGSSRSRSSCAREAYPVECAVPTKPGPQVAAAPTCTRVCCIQYSGAPRPAGAG

SEQ ID NO: 33643 - protein, 84 aa, Artificial Sequence
  Synthetic polypeptide
DQPGQHNIVRSCLHWKKKKRPGVVAAKTRGSLEPDPFPEFSYGCERFARICGKYLPTYMYSSKFQRTGRAPPKQVSWMYPYHCG

SEQ ID NO: 33644 - protein, 942 aa, Artificial Sequence
  Synthetic polypeptide
DLVSTGKKKKGQVWWQLRQEDRLNLILSRSSVMGVRGLQGFVGSTCPHICTVVNFKELAEHHRSKYPGCTPTIVVDAMCCLRYWYTPESWICGGQWREYFSALRDFVKTFTAAGIKLIFFFDGMVEQDKRDEWVKRRLKNNREISRIFHYIKSHKEQPGRNMFFIPSGLAVFTRFALKTLGQETLCSLQEADYEVASYGLQHNCLGILGEDTDYLIYDTCPYFSISELCLESLDTVMLCREKLCESLGLCVADLPLLACLLGNDIIPEGMFESFRYKCLSSYTSVKENFDKKGNIILAVSDHISKVLYLYQGEKKLEEILPLGPNKALFYKGMASYLLPGQKSPWFFQKPKGVITLDKQVISTSSDAESREEVPMCSDAESRQEVPMCTGPESRREVPVYTDSEPRQEVPMCSDPEPRQEVPTCTGPESRREVPMCSDPEPRQEVPMCTGPEARQEVPMYTDSEPRQEVPMYTDSEPRQEVPMYTGSEPRQEVPMYTGPESRQEVPMYTGPESRQEVLIRTDPESRQEIMCTGHESKQEVPICTDPISKQEDSMCTHAEINQKLPVATDFEFKLEALMCTNPEIKQEDPTNVGPEVKQQVTMVSDTEILKVARTHHVQAESYLVYNIMSSGEIECSNTLEDELDQALPSQAFIYRPIRQRVYSLLLEDCQDVTSTCLAVKEWFVYPGNPLRHPDLVRPLQMTIPGGTPSLKILWLNQEPEIQVRRLDTLLACFNLSSSREELQAVESPFQALCCLLIYLFVQVDTLCLEDLHAFIAQALCLQGKSTSQLVNLQPDYINPRAVQLGSLLVRGLTTLVLVNSACGFPWKTSDFMPWNVFDGKLFHQKYLQSEKGYAVEVLLEQNRSRLTKFHNLKAVVCKACMKENRRITGRAHWGSHHAGRWGRQGSSYHRTGSGYSRSSQGQPWRDQGPGSRQYEHDQWRRY

SEQ ID NO: 33645 - protein, 26 aa, Artificial Sequence
  Synthetic polypeptide
GFTRLSWERPLRPGVQDQPGQHVDYD

SEQ ID NO: 33646 - protein, 150 aa, Artificial Sequence
  Synthetic polypeptide
GQVFKTSLGNMLTTTEKPLRKPPSRLKKLKIKKQVKDFTMKDIEEKMEAAEERRKTKEEEIRKRLRSDRLLPSANHSDSAELDGAEVAFAKGLQRVRSAGFEPSDLQGGKPLKRKKSKCDATLIDRNESDESFGVVESDMSYNQADDIVY

SEQ ID NO: 33647 - protein, 32 aa, Artificial Sequence
  Synthetic polypeptide
AWWLTFVILGLYEAQLGASLEARCSRPAWATC

SEQ ID NO: 33648 - protein, 82 aa, Artificial Sequence
  Synthetic polypeptide
GQVFKTSLGNMLTTTEKPLRKPPSRLKKLKIKKQVKDFTMKDIEEKMEAAEERRKTKEEEIRKRLRSDRLLPSANHSDSAEL

SEQ ID NO: 33649 - protein, 21 aa, Artificial Sequence
  Synthetic polypeptide
SSTLGGRGEPITRCGTLRGSL

SEQ ID NO: 33650 - protein, 457 aa, Artificial Sequence
  Synthetic polypeptide
DAVAHACNPALWEAAASRSRGVAPSVEAFDKLMDSMVAEFLKNSRILAGDVETHAEMVHSAFQAQRAFLLMASQYQQPHENDVAALLKPISEKIQEIQTFRERNRGSNMFNHLSAVSESIPALGWIAVSPKPGPYVKEMNDAATFYTNRVLKDYKHSDLRHVDWVKSYLNIWSELQAYIKEHHTTGLTWSKTGPVASTVSAFSVLSSGPGLPPPPPPLPPPGPPPLFENEGKKEESSPSRSALFAQLNQGEAITKGLRHVTDDQKTYKNPSLRAQGGQTQSPTKSHTPSPTSPKSYPSQKHAPVLELEGKKWRVEYQEDRNDLVISETELKQVAYIFKCEKSTIQIKGKVNSIIIDNCKKLGLVFDNVVGIVEVINSQDIQIQVMGRVPTISINKTEGCHIYLSEDALDCEIVSAKSSEMNILIPQDGDYREFPIPEQFKTAWDGSKLITEPAEIMA

SEQ ID NO: 33651 - protein, 31 aa, Artificial Sequence
  Synthetic polypeptide
TQWLTPVIQHFGRPRRADHEVWHPPWKPLTS

SEQ ID NO: 33652 - protein, 345 aa, Artificial Sequence
  Synthetic polypeptide
DAVAHACNPALWEAAASRSRGVAPSVEAFDKLMDSMVAEFLKNSRILAGDVETHAEMVHSAFQAQRAFLLMASQYQQPHEGPVASTVSAFSVLSSGPGLPPPPPPLPPPGPPPLFENEGKKEESSPSRSALFAQLNQGEAITKGLRHVTDDQKTYKNPSLRAQGGQTQSPTKSHTPSPTSPKSYPSQKHAPVLELEGKKWRVEYQEDRNDLVISETELKQVAYIFKCEKSTIQIKGKVNSIIIDNCKKLGLVFDNVVGIVEVINSQDIQIQVMGRVPTISINKTEGCHIYLSEDALDCEIVSAKSSEMNILIPQDGDYREFPIPEQFKTAWDGSKLITEPAEIMA

SEQ ID NO: 33653 - protein, 431 aa, Artificial Sequence
  Synthetic polypeptide
DAVAHACNPALWEAAASRSRGVAPSVEAFDKLMDSMVAEFLKNSRILAGDVETHNDVAALLKPISEKIQEIQTFRERNRGSNMFNHLSAVSESIPALGWIAVSPKPGPYVKEMNDAATFYTNRVLKDYKHSDLRHVDWVKSYLNIWSELQAYIKEHHTTGLTWSKTGPVASTVSAFSVLSSGPGLPPPPPPLPPPGPPPLFENEGKKEESSPSRSALFAQLNQGEAITKGLRHVTDDQKTYKNPSLRAQGGQTQSPTKSHTPSPTSPKSYPSQKHAPVLELEGKKWRVEYQEDRNDLVISETELKQVAYIFKCEKSTIQIKGKVNSIIIDNCKKLGLVFDNVVGIVEVINSQDIQIQVMGRVPTISINKTEGCHIYLSEDALDCEIVSAKSSEMNILIPQDGDYREFPIPEQFKTAWDGSKLITEPAEIMA

SEQ ID NO: 33654 - protein, 197 aa, Artificial Sequence
  Synthetic polypeptide
DAVAHACNPALWEAAASRSRGVAPSVEAFDKLMDSMVAEFLKNSRILAGDVETHEYQEDRNDLVISETELKQVAYIFKCEKSTIQIKGKVNSIIIDNCKKLGLVFDNVVGIVEVINSQDIQIQVMGRVPTISINKTEGCHIYLSEDALDCEIVSAKSSEMNILIPQDGDYREFPIPEQFKTAWDGSKLITEPAEIMA

SEQ ID NO: 33655 - protein, 174 aa, Artificial Sequence
  Synthetic polypeptide
DAVAHACNPALWEAAASRSRGVAPSVEAFDKLMDSMVAEFLKNSRILAGDVETHNDVAALLKPISEKIQEIQTFRERNRGSNMFNHLSAVSESIPALGWIAVSPKPGPYVKEMNDAATFYTNRVLKDYKHSDLRHVDWVKSYLNIWSELQAYIKEHHTTGLTWSKTNEKRRRQR

SEQ ID NO: 33656 - protein, 393 aa, Artificial Sequence
  Synthetic polypeptide
DAVAHACNPALWEAAASRSRGVAPSVEAFDKLMDSMVAEFLKNSRILAGDVETHAEMVHSAFQAQRAFLLMASQYQQPHENDVAALLKPISEKIQEIQTFRERNRGSNMFNHLSAVSESIPALGWIAVGPVASTVSAFSVLSSGPGLPPPPPPLPPPGPPPLFENEGKKEESSPSRSALFAQLNQGEAITKGLRHVTDDQKTYKNPSLRAQGGQTQSPTKSHTPSPTSPKSYPSQKHAPVLELEGKKWRVEYQEDRNDLVISETELKQVAYIFKCEKSTIQIKGKVNSIIIDNCKKLGLVFDNVVGIVEVINSQDIQIQVMGRVPTISINKTEGCHIYLSEDALDCEIVSAKSSEMNILIPQDGDYREFPIPEQFKTAWDGSKLITEPAEIMA

SEQ ID NO: 33657 - protein, 84 aa, Artificial Sequence
  Synthetic polypeptide
DAVAHACNPALWEAAASRSRGVAPSVEAFDKLMDSMVAEFLKNSRILAGDVETHAEMVHSAFQAQRAFLLMASQYQQPHEANKF

SEQ ID NO: 33658 - protein, 438 aa, Artificial Sequence
  Synthetic polypeptide
HGVAPSVEAFDKLMDSMVAEFLKNSRILAGDVETHAEMVHSAFQAQRAFLLMASQYQQPHENDVAALLKPISEKIQEIQTFRERNRGSNMFNHLSAVSESIPALGWIAVSPKPGPYVKEMNDAATFYTNRVLKDYKHSDLRHVDWVKSYLNIWSELQAYIKEHHTTGLTWSKTGPVASTVSAFSVLSSGPGLPPPPPPLPPPGPPPLFENEGKKEESSPSRSALFAQLNQGEAITKGLRHVTDDQKTYKNPSLRAQGGQTQSPTKSHTPSPTSPKSYPSQKHAPVLELEGKKWRVEYQEDRNDLVISETELKQVAYIFKCEKSTIQIKGKVNSIIIDNCKKLGLVFDNVVGIVEVINSQDIQIQVMGRVPTISINKTEGCHIYLSEDALDCEIVSAKSSEMNILIPQDGDYREFPIPEQFKTAWDGSKLITEPAEIMA

SEQ ID NO: 33659 - protein, 42 aa, Artificial Sequence
  Synthetic polypeptide
DAVAHACNPALWEAAASRSRGQEIKTILANTVWHPPWKPLTS

SEQ ID NO: 33660 - protein, 39 aa, Artificial Sequence
  Synthetic polypeptide
TQWLTPVIQHFGRPRRADHEVRRSRPSWLTRCGTLRGSL

SEQ ID NO: 33661 - protein, 326 aa, Artificial Sequence
  Synthetic polypeptide
HGVAPSVEAFDKLMDSMVAEFLKNSRILAGDVETHAEMVHSAFQAQRAFLLMASQYQQPHEGPVASTVSAFSVLSSGPGLPPPPPPLPPPGPPPLFENEGKKEESSPSRSALFAQLNQGEAITKGLRHVTDDQKTYKNPSLRAQGGQTQSPTKSHTPSPTSPKSYPSQKHAPVLELEGKKWRVEYQEDRNDLVISETELKQVAYIFKCEKSTIQIKGKVNSIIIDNCKKLGLVFDNVVGIVEVINSQDIQIQVMGRVPTISINKTEGCHIYLSEDALDCEIVSAKSSEMNILIPQDGDYREFPIPEQFKTAWDGSKLITEPAEIMA

SEQ ID NO: 33662 - protein, 412 aa, Artificial Sequence
  Synthetic polypeptide
HGVAPSVEAFDKLMDSMVAEFLKNSRILAGDVETHNDVAALLKPISEKIQEIQTFRERNRGSNMFNHLSAVSESIPALGWIAVSPKPGPYVKEMNDAATFYTNRVLKDYKHSDLRHVDWVKSYLNIWSELQAYIKEHHTTGLTWSKTGPVASTVSAFSVLSSGPGLPPPPPPLPPPGPPPLFENEGKKEESSPSRSALFAQLNQGEAITKGLRHVTDDQKTYKNPSLRAQGGQTQSPTKSHTPSPTSPKSYPSQKHAPVLELEGKKWRVEYQEDRNDLVISETELKQVAYIFKCEKSTIQIKGKVNSIIIDNCKKLGLVFDNVVGIVEVINSQDIQIQVMGRVPTISINKTEGCHIYLSEDALDCEIVSAKSSEMNILIPQDGDYREFPIPEQFKTAWDGSKLITEPAEIMA

SEQ ID NO: 33663 - protein, 178 aa, Artificial Sequence
  Synthetic polypeptide
HGVAPSVEAFDKLMDSMVAEFLKNSRILAGDVETHEYQEDRNDLVISETELKQVAYIFKCEKSTIQIKGKVNSIIIDNCKKLGLVFDNVVGIVEVINSQDIQIQVMGRVPTISINKTEGCHIYLSEDALDCEIVSAKSSEMNILIPQDGDYREFPIPEQFKTAWDGSKLITEPAEIMA

SEQ ID NO: 33664 - protein, 155 aa, Artificial Sequence
  Synthetic polypeptide
HGVAPSVEAFDKLMDSMVAEFLKNSRILAGDVETHNDVAALLKPISEKIQEIQTFRERNRGSNMFNHLSAVSESIPALGWIAVSPKPGPYVKEMNDAATFYTNRVLKDYKHSDLRHVDWVKSYLNIWSELQAYIKEHHTTGLTWSKTNEKRRRQR

SEQ ID NO: 33665 - protein, 374 aa, Artificial Sequence
  Synthetic polypeptide
HGVAPSVEAFDKLMDSMVAEFLKNSRILAGDVETHAEMVHSAFQAQRAFLLMASQYQQPHENDVAALLKPISEKIQEIQTFRERNRGSNMFNHLSAVSESIPALGWIAVGPVASTVSAFSVLSSGPGLPPPPPPLPPPGPPPLFENEGKKEESSPSRSALFAQLNQGEAITKGLRHVTDDQKTYKNPSLRAQGGQTQSPTKSHTPSPTSPKSYPSQKHAPVLELEGKKWRVEYQEDRNDLVISETELKQVAYIFKCEKSTIQIKGKVNSIIIDNCKKLGLVFDNVVGIVEVINSQDIQIQVMGRVPTISINKTEGCHIYLSEDALDCEIVSAKSSEMNILIPQDGDYREFPIPEQFKTAWDGSKLITEPAEIMA

SEQ ID NO: 33666 - protein, 65 aa, Artificial Sequence
  Synthetic polypeptide
HGVAPSVEAFDKLMDSMVAEFLKNSRILAGDVETHAEMVHSAFQAQRAFLLMASQYQQPHEANKF

SEQ ID NO: 33667 - protein, 11 aa, Artificial Sequence
  Synthetic polypeptide
ASYKKFSTCFK

SEQ ID NO: 33668 - protein, 660 aa, Artificial Sequence
  Synthetic polypeptide
DHEHLTRSSVPASSSSTVPVSLPSGGSLGLEKFKKPEGSWDCELCLVQNKADSTKCLACESAKPGTKSGFKGFDTSSSSSNSAASSSFKFGVSSSSSGPSQTLTSTGNFKFGDQGGFKIGVSSDSGSINPMSEGFKFSKPIGDFKFGVSSESKPEEVKKDSKNDNFKFGLSSGLSNPVSLTPFQFGVSNLGQEEKKEELPKSSSAGFSFGTGVINSTPAPANTIVTSENKSSFNLGTIETKSASVAPFTCKTSEAKKEEMPATKGGFSFGNVEPASLPSASVFVLGRTEEKQQEPVTSTSLVFGKKADNEEPKCQPVFSFGNSEQTKDENSSKSTFSFSMTKPSEKESEQPAKATFAFGAQTSTTADQGAAKPVFSFLNNSSSSSSTPATSAGGGIFGSSTSSSNPPVATFVFGQSSNPVSSSAFGNTAESSTSQSLLFSQDSKLATTSSTGTAVTPFVFGPGASSNNTTTSGFGFGATTTSSSAGSSFVFGTGPSAPSASPAFGANQTPTFGQSQGASQPNPPGFGSISSSTALFPTGSQPAPPTFGTVSSSSQPPVFGQQPSQSAFGSGTTPNSSSAFQFGSSTTNFNFTNNSPSGVFTFGANSSTPAASAQPSGSGGFPFNQSPAAFTVGSNGKNVFSSSGTSFSGRKIKTAVRRRK

SEQ ID NO: 33669 - protein, 31 aa, Artificial Sequence
  Synthetic polypeptide
SPFKTMSILQEVQYLLQVAALYLSLCLLEAL

SEQ ID NO: 33670 - protein, 30 aa, Artificial Sequence
  Synthetic polypeptide
EDHVRAQEFEAKVNCDSTTALWLGLDMKKI

SEQ ID NO: 33671 - protein, 13 aa, Artificial Sequence
  Synthetic polypeptide
TVIAPLHSGLDWI

SEQ ID NO: 33672 - protein, 1077 aa, Artificial Sequence
  Synthetic polypeptide
HHCTLAWTGYEKNMTPGQNREQRESGFSYPNFSLPAANGLSSGVGGGGGKMRRERTRFVASKPLEEEEMEVPVLPKISLPITSSSLPTFNFSSPEITTSSPSPINSSQALTNKVQMTSPSSTGSPMFKFSSPIVKSTEANVLPPSSIGFTFSVPVAKTAELSGSSSTLEPIISSSAHHVTTVNSTNCKKTPPEDCEGPFRPAEILKEGSVLDILKSPGFASPKIDSVAAQPTATSPVVYTRPAISSFSSSGIGFGESLKAGSSWQCDTCLLQNKVTDNKCIACQAAKLSPRDTAKQTGIETPNKSGKTTLSASGTGFGDKFKPVIGTWDCDTCLVQNKPEAIKCVACETPKPGTCVKRALTLTVVSESAETMTASSSSCTVTTGTLGFGDKFKRPIGSWECSVCCVSNNAEDNKCVSCMSEKPGSSVPASSSSTVPVSLPSGGSLGLEKFKKPEGSWDCELCLVQNKADSTKCLACESAKPGTKSGFKGFDTSSSSSNSAASSSFKFGVSSSSSGPSQTLTSTGNFKFGDQGGFKIGVSSDSGSINPMSEGFKFSKPIGDFKFGVSSESKPEEVKKDSKNDNFKFGLSSGLSNPVSLTPFQFGVSNLGQEEKKEELPKSSSAGFSFGTGVINSTPAPANTIVTSENKSSFNLGTIETKSASVAPFTCKTSEAKKEEMPATKGGFSFGNVEPASLPSASVFVLGRTEEKQQEPVTSTSLVFGKKADNEEPKCQPVFSFGNSEQTKDENSSKSTFSFSMTKPSEKESEQPAKATFAFGAQTSTTADQGAAKPVFSFLNNSSSSSSTPATSAGGGIFGSSTSSSNPPVATFVFGQSSNPVSSSAFGNTAESSTSQSLLFSQDSKLATTSSTGTAVTPFVFGPGASSNNTTTSGFGFGATTTSSSAGSSFVFGTGPSAPSASPAFGANQTPTFGQSQGASQPNPPGFGSISSSTALFPTGSQPAPPTFGTVSSSSQPPVFGQQPSQSAFGSGTTPNSSSAFQFGSSTTNFNFTNNSPSGVFTFGANSSTPAASAQPSGSGGFPFNQSPAAFTVGSNGKNVFSSSGTSFSGRKIKTAVRRRK

SEQ ID NO: 33673 - protein, 1108 aa, Artificial Sequence
  Synthetic polypeptide
HHCTLAWTGYEKNMTPGQNREQRESGFSYPNFSLPAANGLSSGVGGGGGKMRRERTRFVASKPLEEERQGLTVLPKLISSSCAQAIIPSWPLKVLRLQEMEVPVLPKISLPITSSSLPTFNFSSPEITTSSPSPINSSQALTNKVQMTSPSSTGSPMFKFSSPIVKSTEANVLPPSSIGFTFSVPVAKTAELSGSSSTLEPIISSSAHHVTTVNSTNCKKTPPEDCEGPFRPAEILKEGSVLDILKSPGFASPKIDSVAAQPTATSPVVYTRPAISSFSSSGIGFGESLKAGSSWQCDTCLLQNKVTDNKCIACQAAKLSPRDTAKQTGIETPNKSGKTTLSASGTGFGDKFKPVIGTWDCDTCLVQNKPEAIKCVACETPKPGTCVKRALTLTVVSESAETMTASSSSCTVTTGTLGFGDKFKRPIGSWECSVCCVSNNAEDNKCVSCMSEKPGSSVPASSSSTVPVSLPSGGSLGLEKFKKPEGSWDCELCLVQNKADSTKCLACESAKPGTKSGFKGFDTSSSSSNSAASSSFKFGVSSSSSGPSQTLTSTGNFKFGDQGGFKIGVSSDSGSINPMSEGFKFSKPIGDFKFGVSSESKPEEVKKDSKNDNFKFGLSSGLSNPVSLTPFQFGVSNLGQEEKKEELPKSSSAGFSFGTGVINSTPAPANTIVTSENKSSFNLGTIETKSASVAPFTCKTSEAKKEEMPATKGGFSFGNVEPASLPSASVFVLGRTEEKQQEPVTSTSLVFGKKADNEEPKCQPVFSFGNSEQTKDENSSKSTFSFSMTKPSEKESEQPAKATFAFGAQTSTTADQGAAKPVFSFLNNSSSSSSTPATSAGGGIFGSSTSSSNPPVATFVFGQSSNPVSSSAFGNTAESSTSQSLLFSQDSKLATTSSTGTAVTPFVFGPGASSNNTTTSGFGFGATTTSSSAGSSFVFGTGPSAPSASPAFGANQTPTFGQSQGASQPNPPGFGSISSSTALFPTGSQPAPPTFGTVSSSSQPPVFGQQPSQSAFGSGTTPNSSSAFQFGSSTTNFNFTNNSPSGVFTFGANSSTPAASAQPSGSGGFPFNQSPAAFTVGSNGKNVFSSSGTSFSGRKIKTAVRRRK

SEQ ID NO: 33674 - protein, 21 aa, Artificial Sequence
  Synthetic polypeptide
GLMQLVTNLQQLVLLQIIQMC

SEQ ID NO: 33675 - protein, 26 aa, Artificial Sequence
  Synthetic polypeptide
PEDKWMNSSDKAWQNCESSWLKLIPW

SEQ ID NO: 33676 - protein, 12 aa, Artificial Sequence
  Synthetic polypeptide
RDTVRSDQKTSG

SEQ ID NO: 33677 - protein, 1089 aa, Artificial Sequence
  Synthetic polypeptide
EVTRRQVDELFRQSLAKLREQLVKANTLVREANFLAEEMSKLTDYQVTLQIPAANLSANRKRGAIVSEPAIQVRRKGKSTQVWTIEKLENKLIDMRDLYQEWKEKVPEAKRLYGKRGDPFYEAQENHNLIGVANVFLECLFCDVKLQYAVPIISQQGEVAGRLHVEVMRVTGAVPERVVEDDSSENSSESGSLEVVDSSGEIIHRVKKLTCRVKIKEATGLPLNLSNFVFCQYTFWDQCESTVAAPVVDPEVPSPQSKDAQYTVTFSHCKDYVVNVTEEFLEFISDGALAIEVWGHRCAGNGSSIWEVDSLHAKTRTLHDRWNEVTRRIEMWISILELNELGEYAAVELHQAKDVNTGGIFQLRQGHSRRVQVTVKPVQHSGTLPLMVEAILSVSIGCVTARSTKLQRGLDSYQEEDLNCVRERWSDALIKRREYLDEQIKKVSNKTEKTEDDVEREAQLVEQWVGLTEERNAVLVPAPGSGIPGAPADWIPPPGMETHIPVLFLDLNADDLSANEQLVGPHASGVNSILPKEHGSQFFYLPIIKHSDDEVSATASWDSSVHDSVHLNRVTPQNERIYLIVKTTVQLSHPAAMELVLRKRIAANIYNKQSFTQSLKRRISLKNIFYSCGVTYEIVSNIPKATEEIEDRETLALLAARSENEGTSDGETYIEKYTRGVLQVENILSLERLRQAVTVKEALSTKARHIRRSLSTPNVHNVSSSRPDLSGFDEDDKGWPENQLDMSDYSSSYQDVACYGTLPRDSPRRNKEGCTSETPHALTVSPFKAFSPQPPKFFKPLMPVKEEHKKRIALEARPLLSQEDSEEEENELEAINRKLISSQPYVPVEFADFSVYNASLENREWFSSKVDLSNSRVLEKEVSRSPTTSSITSGYFSHSASNATLSDMVVPSSDSSDQLAIQTKDADSTEHSTPSLVHDFRPSSNKELTEVEKGLVKDKIIVVPLKENSALAKGSPSSQSIPEKNSKSLCRTGSCSELDACPSKISQPARGFCPREVTVEHTTNILEDHSFTEFMGVSEGKDFDGLTDSSAGELSSRRSLPNKTGGKTVSDGLHHPSQLHSKLENDQGGTTSR

SEQ ID NO: 33678 - protein, 1145 aa, Artificial Sequence
  Synthetic polypeptide
EVTRRQVDELFRQSLAKLREQLVKANTLVREANFLAEEMSKLTDYQVTLQIPAANLSANRKRGAIVSEPAIQVRRKGKSTQVWTIEKLENKLIDMRDLYQEWKEKVPEAKRLYGKRGDPFYEAQENHNLIGVANVFLECLFCDVKLQYAVPIISQQGEVAGRLHVEVMRVTGAVPERVVEDDSSENSSESGSLEVVDSSGEIIHRVKKLTCRVKIKEATGLPLNLSNFVFCQYTFWDQCESTVAAPVVDPEVPSPQSKDAQYTVTFSHCKDYVVNVTEEFLEFISDGALAIEVWGHRCAGNGSSIWEVDSLHAKTRTLHDRWNEVTRRIEMWISILELNELGEYAAVELHQAKDVNTGGIFQLRQGHSRRVQVTVKPVQHSGTLPLMVEAILSVSIGCVTARSTKLQRGLDSYQRDDEDGDDMDSYQEEDLNCVRERWSDALIKRREYLDEQIKKVSNKTEKTEDDVEREAQLVEQWVGLTEERNAVLVPAPGSGIPGAPADWIPPPGMETHIPVLFLDLNADDLSANEQLVGPHASGVNSILPKEHGSQFFYLPIIKHSDDEVSATASWDSSVHDSVHLNRVTPQNERIYLIVKTTVQLSHPAAMELVLRKRIAANIYNKQSFTQSLKRRISLKNIFYSCGVTYEIVSNIPKATEEIEDRETLALLAARSENEGTSDGETYIEKYTRGVLQVENILSLERLRQAVTVKEALSTKARHIRRSLSTPNVHNVSSSRPDLSGFDEDDKGWPENQLDMSDYSSSYQDVACYGTLPRDSPRRNKEGCTSETPHALTVSPFKAFSPQPPKFFKPLMPVKEEHKKRIALEARPLLSQESMPPPQAHNPGCIVPSGSNGSSMPVEHNSKREKKIDSEEEENELEAINRKLISSQPYVPVEFADFSVYNASLENREWFSSKVDLSNSRVLEKEVSRSPTTSSITSGYFSHSASNATLSDMVVPSSDSSDQLAIQTKDADSTEHSTPSLVHDFRPSSNKELTEVEKGLVKDKIIVVPLKENSALAKGSPSSQSIPEKNSKSLCRTGSCSELDACPSKISQPARGFCPREVTVEHTTNILEDHSFTEFMGVSEGKDFDGLTDSSAGELSSRRSLPNKTGGKTVSDGLHHPSQLHSKLENDQVIIPEAAFWVLCCQ

SEQ ID NO: 33679 - protein, 1097 aa, Artificial Sequence
  Synthetic polypeptide
EVTRRQVDELFRQSLAKLREQLVKANTLVREANFLAEEMSKLTDYQVTLQIPAANLSANRKRGAIVSEPAIQVRRKGKSTQVWTIEKLENKLIDMRDLYQEWKEKVPEAKRLYGKRGDPFYEAQENHNLIGVANVFLECLFCDVKLQYAVPIISQQGEVAGRLHVEVMRVTGAVPERVVEDDSSENSSESGSLEVVDSSGEIIHRVKKLTCRVKIKEATGLPLNLSNFVFCQYTFWDQCESTVAAPVVDPEVPSPQSKDAQYTVTFSHCKDYVVNVTEEFLEFISDGALAIEVWGHRCAGNGSSIWEVDSLHAKTRTLHDRWNEVTRRIEMWISILELNELGEYAAVELHQAKDVNTGGIFQLRQGHSRRVQVTVKPVQHSGTLPLMVEAILSVSIGCVTARSTKLQRGLDSYQEEDLNCVRERWSDALIKRREYLDEQIKKVSNKTEKTEDDVEREAQLVEQWVGLTEERNAVLVPAPGSGIPGAPADWIPPPGMETHIPVLFLDLNADDLSANEQLVGPHASGVNSILPKEHGSQFFYLPIIKHSDDEVSATASWDSSVHDSVHLNRVTPQNERIYLIVKTTVQLSHPAAMELVLRKRIAANIYNKQSFTQSLKRRISLKNIFYSCGVTYEIVSNIPKATEEIEDRETLALLAARSENEGTSDGETYIEKYTRGVLQVENILSLERLRQAVTVKEALSTKARHIRRSLSTPNVHNVSSSRPDLSGFDEDDKGWPENQLDMSDYSSSYQDVACYGTLPRDSPRRNKEGCTSETPHALTVSPFKAFSPQPPKFFKPLMPVKEEHKKRIALEARPLLSQEDSEEEENELEAINRKLISSQPYVPVEFADFSVYNASLENREWFSSKVDLSNSRVLEKEVSRSPTTSSITSGYFSHSASNATLSDMVVPSSDSSDQLAIQTKDADSTEHSTPSLVHDFRPSSNKELTEVEKGLVKDKIIVVPLKENSALAKGSPSSQSIPEKNSKSLCRTGSCSELDACPSKISQPARGFCPREVTVEHTTNILEDHSFTEFMGVSEGKDFDGLTDSSAGELSSRRSLPNKTGGKTVSDGLHHPSQLHSKLENDQVIIPEAAFWVLCCQ

SEQ ID NO: 33680 - protein, 1110 aa, Artificial Sequence
  Synthetic polypeptide
EVTRRQVDELFRQSLAKLREQLVKANTLVREANFLAEEMSKLTDYQVTLQIPAANLSANRKRGAIVSEPAIQVRRKGKSTQVWTIEKLENKLIDMRDLYQEWKEKVPEAKRLYGKRGDPFYEAQENHNLIGVANVFLECLFCDVKLQYAVPIISQQGEVAGRLHVEVMRVTGAVPERVVEDDSSENSSESGSLEVVDSSGEIIHRVKKLTCRVKIKEATGLPLNLSNFVFCQYTFWDQCESTVAAPVVDPEVPSPQSKDAQYTVTFSHCKDYVVNVTEEFLEFISDGALAIEVWGHRCAGNGSSIWEVDSLHAKTRTLHDRWNEVTRRIEMWISILELNELGEYAAVELHQAKDVNTGGIFQLRQGHSRRVQVTVKPVQHSGTLPLMVEAILSVSIGCVTARSTKLQRGLDSYQRDDEDGDDMDSYQEEDLNCVRERWSDALIKRREYLDEQIKKVSNKTEKTEDDVEREAQLVEQWVGLTEERNAVLVPAPGSGIPGAPADWIPPPGMETHIPVLFLDLNADDLSANEQLVGPHASGVNSILPKEHGSQFFYLPIIKHSDDEVSATASWDSSVHDSVHLNRVTPQNERIYLIVKTTVQLSHPAAMELVLRKRIAANIYNKQSFTQSLKRRISLKNIFYSCGVTYEIVSNIPKATEEIEDRETLALLAARSENEGTSDGETYIEKYTRGVLQVENILSLERLRQAVTVKEALSTKARHIRRSLSTPNVHNVSSSRPDLSGFDEDDKGWPENQLDMSDYSSSYQDVACYGTLPRDSPRRNKEGCTSETPHALTVSPFKAFSPQPPKFFKPLMPVKEEHKKRIALEARPLLSQEDSEEEENELEAINRKLISSQPYVPVEFADFSVYNASLENREWFSSKVDLSNSRVLEKEVSRSPTTSSITSGYFSHSASNATLSDMVVPSSDSSDQLAIQTKDADSTEHSTPSLVHDFRPSSNKELTEVEKGLVKDKIIVVPLKENSALAKGSPSSQSIPEKNSKSLCRTGSCSELDACPSKISQPARGFCPREVTVEHTTNILEDHSFTEFMGVSEGKDFDGLTDSSAGELSSRRSLPNKTGGKTVSDGLHHPSQLHSKLENDQVIIPEAAFWVLCCQ

SEQ ID NO: 33681 - protein, 835 aa, Artificial Sequence
  Synthetic polypeptide
EVTRRQVDELFRQSLAKLREQLVKANTLVREANFLAEEMSKLTDYQVTLQIPAANLSANRKRGAIVSEPAIQVRRKGKSTQVWTIEKLENKLIDMRDLYQEWKEKVPEAKRLYGKRGDPFYEAQENHNLIGVANVFLECLFCDVKLQYAVPIISQQGEVAGRLHVEVMRVTGAVPERVVEDDSSENSSESGSLEVVDSSGEIIHRVKKLTCRVKIKEATGLPLNLSNFVFCQYTFWDQCESTVAAPVVDPEVPSPQSKDAQYTVTFSHCKDYVVNVTEEFLEFISDGALAIEVWGHRCAGNGSSIWEVDSLHAKTRTLHDRWNEVTRRIEMWISILELNELGEYAAVELHQAKDVNTGGIFQLRQGHSRRVQVTVKPVQHSGTLPLMVEAILSVSIGCVTARSTKLQRGLDSYQRDDEDGDDMDSYQEEDLNCVRERWSDALIKRREYLDEQIKKVSNKTEKTEDDVEREAQLVEQWVGLTEERNAVLVPAPGSGIPGAPADWIPPPGMETHIPVLFLDLNADDLSANEQLVGPHASGVNSILPKEHGSQFFYLPIIKHSDDEVSATASWDSSVHDSVHLNRVTPQNERIYLIVKTTVQLSHPAAMELVLRKRIAANIYNKQSFTQSLKRRISLKNIFYSCGVTYEIVSNIPKATEEIEDRETLALLAARSENEGTSDGETYIEKYTRGVLQVENILSLERLRQAVTVKEALSTKARHIRRSLSTPNVHNVSSSRPDLSGFDEDDKGWPENQLDMSDYSSSYQDVACYGTLPRDSPRRNKEGCTSETPHALTVSPFKAFSPQPPKFFKPLMPVKEEHKKRIALEARPLLSQEVNA

SEQ ID NO: 33682 - protein, 1377 aa, Artificial Sequence
  Synthetic polypeptide
MILESTYHNTLHIAMKAPELKEKLEESEKLIKELTVTWEEKLRKTEEIAQERQRQLESMGISLEMSGIKVGDDKCYLVNLNADPALNELLVYYLKDHTRVGADTSQDIQLFGIGIQPQHCEIDIASDGDVTLTPKENARSCVNGTLVCSTTQLWHGDRILWGNNHFFRINLPKRKRRDWLKDFEKETGPPEHDLDAASEASSEPDYNYEFAQMEVIMKTLNSNDPVQNVVQVLEKQYLEEKRSALEEQRLMYERELEQLRQQLSPDRQPQSSGPDRLAYSSQTAQQKVTQWAEERDELFRQSLAKLREQLVKANTLVREANFLAEEMSKLTDYQVTLQIPAANLSANRKRGAIVSEPAIQVRRKGKSTQVWTIEKLENKLIDMRDLYQEWKEKVPEAKRLYGKRGDPFYEAQENHNLIGVANVFLECLFCDVKLQYAVPIISQQGEVAGRLHVEVMRVTGAVPERVVEDDSSENSSESGSLEVVDSSGEIIHRVKKLTCRVKIKEATGLPLNLSNFVFCQYTFWDQCESTVAAPVVDPEVPSPQSKDAQYTVTFSHCKDYVVNVTEEFLEFISDGALAIEVWGHRCAGNGSSIWEVDSLHAKTRTLHDRWNEVTRRIEMWISILELNELGEYAAVELHQAKDVNTGGIFQLRQGHSRRVQVTVKPVQHSGTLPLMVEAILSVSIGCVTARSTKLQRGLDSYQEEDLNCVRERWSDALIKRREYLDEQIKKVSNKTEKTEDDVEREAQLVEQWVGLTEERNAVLVPAPGSGIPGAPADWIPPPGMETHIPVLFLDLNADDLSANEQLVGPHASGVNSILPKEHGSQFFYLPIIKHSDDEVSATASWDSSVHDSVHLNRVTPQNERIYLIVKTTVQLSHPAAMELVLRKRIAANIYNKQSFTQSLKRRISLKNIFYSCGVTYEIVSNIPKATEEIEDRETLALLAARSENEGTSDGETYIEKYTRGVLQVENILSLERLRQAVTVKEALSTKARHIRRSLSTPNVHNVSSSRPDLSGFDEDDKGWPENQLDMSDYSSSYQDVACYGTLPRDSPRRNKEGCTSETPHALTVSPFKAFSPQPPKFFKPLMPVKEEHKKRIALEARPLLSQEDSEEEENELEAINRKLISSQPYVPVEFADFSVYNASLENREWFSSKVDLSNSRVLEKEVSRSPTTSSITSGYFSHSASNATLSDMVVPSSDSSDQLAIQTKDADSTEHSTPSLVHDFRPSSNKELTEVEKGLVKDKIIVVPLKENSALAKGSPSSQSIPEKNSKSLCRTGSCSELDACPSKISQPARGFCPREVTVEHTTNILEDHSFTEFMGVSEGKDFDGLTDSSAGELSSRRSLPNKTGGKTVSDGLHHPSQLHSKLENDQGGTTSR

SEQ ID NO: 33683 - protein, 17 aa, Artificial Sequence
  Synthetic polypeptide
DTRKHLPQYLAHSHEGP

SEQ ID NO: 33684 - protein, 1433 aa, Artificial Sequence
  Synthetic polypeptide
MILESTYHNTLHIAMKAPELKEKLEESEKLIKELTVTWEEKLRKTEEIAQERQRQLESMGISLEMSGIKVGDDKCYLVNLNADPALNELLVYYLKDHTRVGADTSQDIQLFGIGIQPQHCEIDIASDGDVTLTPKENARSCVNGTLVCSTTQLWHGDRILWGNNHFFRINLPKRKRRDWLKDFEKETGPPEHDLDAASEASSEPDYNYEFAQMEVIMKTLNSNDPVQNVVQVLEKQYLEEKRSALEEQRLMYERELEQLRQQLSPDRQPQSSGPDRLAYSSQTAQQKVTQWAEERDELFRQSLAKLREQLVKANTLVREANFLAEEMSKLTDYQVTLQIPAANLSANRKRGAIVSEPAIQVRRKGKSTQVWTIEKLENKLIDMRDLYQEWKEKVPEAKRLYGKRGDPFYEAQENHNLIGVANVFLECLFCDVKLQYAVPIISQQGEVAGRLHVEVMRVTGAVPERVVEDDSSENSSESGSLEVVDSSGEIIHRVKKLTCRVKIKEATGLPLNLSNFVFCQYTFWDQCESTVAAPVVDPEVPSPQSKDAQYTVTFSHCKDYVVNVTEEFLEFISDGALAIEVWGHRCAGNGSSIWEVDSLHAKTRTLHDRWNEVTRRIEMWISILELNELGEYAAVELHQAKDVNTGGIFQLRQGHSRRVQVTVKPVQHSGTLPLMVEAILSVSIGCVTARSTKLQRGLDSYQRDDEDGDDMDSYQEEDLNCVRERWSDALIKRREYLDEQIKKVSNKTEKTEDDVEREAQLVEQWVGLTEERNAVLVPAPGSGIPGAPADWIPPPGMETHIPVLFLDLNADDLSANEQLVGPHASGVNSILPKEHGSQFFYLPIIKHSDDEVSATASWDSSVHDSVHLNRVTPQNERIYLIVKTTVQLSHPAAMELVLRKRIAANIYNKQSFTQSLKRRISLKNIFYSCGVTYEIVSNIPKATEEIEDRETLALLAARSENEGTSDGETYIEKYTRGVLQVENILSLERLRQAVTVKEALSTKARHIRRSLSTPNVHNVSSSRPDLSGFDEDDKGWPENQLDMSDYSSSYQDVACYGTLPRDSPRRNKEGCTSETPHALTVSPFKAFSPQPPKFFKPLMPVKEEHKKRIALEARPLLSQESMPPPQAHNPGCIVPSGSNGSSMPVEHNSKREKKIDSEEEENELEAINRKLISSQPYVPVEFADFSVYNASLENREWFSSKVDLSNSRVLEKEVSRSPTTSSITSGYFSHSASNATLSDMVVPSSDSSDQLAIQTKDADSTEHSTPSLVHDFRPSSNKELTEVEKGLVKDKIIVVPLKENSALAKGSPSSQSIPEKNSKSLCRTGSCSELDACPSKISQPARGFCPREVTVEHTTNILEDHSFTEFMGVSEGKDFDGLTDSSAGELSSRRSLPNKTGGKTVSDGLHHPSQLHSKLENDQVIIPEAAFWVLCCQ

SEQ ID NO: 33685 - protein, 1385 aa, Artificial Sequence
  Synthetic polypeptide
MILESTYHNTLHIAMKAPELKEKLEESEKLIKELTVTWEEKLRKTEEIAQERQRQLESMGISLEMSGIKVGDDKCYLVNLNADPALNELLVYYLKDHTRVGADTSQDIQLFGIGIQPQHCEIDIASDGDVTLTPKENARSCVNGTLVCSTTQLWHGDRILWGNNHFFRINLPKRKRRDWLKDFEKETGPPEHDLDAASEASSEPDYNYEFAQMEVIMKTLNSNDPVQNVVQVLEKQYLEEKRSALEEQRLMYERELEQLRQQLSPDRQPQSSGPDRLAYSSQTAQQKVTQWAEERDELFRQSLAKLREQLVKANTLVREANFLAEEMSKLTDYQVTLQIPAANLSANRKRGAIVSEPAIQVRRKGKSTQVWTIEKLENKLIDMRDLYQEWKEKVPEAKRLYGKRGDPFYEAQENHNLIGVANVFLECLFCDVKLQYAVPIISQQGEVAGRLHVEVMRVTGAVPERVVEDDSSENSSESGSLEVVDSSGEIIHRVKKLTCRVKIKEATGLPLNLSNFVFCQYTFWDQCESTVAAPVVDPEVPSPQSKDAQYTVTFSHCKDYVVNVTEEFLEFISDGALAIEVWGHRCAGNGSSIWEVDSLHAKTRTLHDRWNEVTRRIEMWISILELNELGEYAAVELHQAKDVNTGGIFQLRQGHSRRVQVTVKPVQHSGTLPLMVEAILSVSIGCVTARSTKLQRGLDSYQEEDLNCVRERWSDALIKRREYLDEQIKKVSNKTEKTEDDVEREAQLVEQWVGLTEERNAVLVPAPGSGIPGAPADWIPPPGMETHIPVLFLDLNADDLSANEQLVGPHASGVNSILPKEHGSQFFYLPIIKHSDDEVSATASWDSSVHDSVHLNRVTPQNERIYLIVKTTVQLSHPAAMELVLRKRIAANIYNKQSFTQSLKRRISLKNIFYSCGVTYEIVSNIPKATEEIEDRETLALLAARSENEGTSDGETYIEKYTRGVLQVENILSLERLRQAVTVKEALSTKARHIRRSLSTPNVHNVSSSRPDLSGFDEDDKGWPENQLDMSDYSSSYQDVACYGTLPRDSPRRNKEGCTSETPHALTVSPFKAFSPQPPKFFKPLMPVKEEHKKRIALEARPLLSQEDSEEEENELEAINRKLISSQPYVPVEFADFSVYNASLENREWFSSKVDLSNSRVLEKEVSRSPTTSSITSGYFSHSASNATLSDMVVPSSDSSDQLAIQTKDADSTEHSTPSLVHDFRPSSNKELTEVEKGLVKDKIIVVPLKENSALAKGSPSSQSIPEKNSKSLCRTGSCSELDACPSKISQPARGFCPREVTVEHTTNILEDHSFTEFMGVSEGKDFDGLTDSSAGELSSRRSLPNKTGGKTVSDGLHHPSQLHSKLENDQVIIPEAAFWVLCCQ

SEQ ID NO: 33686 - protein, 1398 aa, Artificial Sequence
  Synthetic polypeptide
MILESTYHNTLHIAMKAPELKEKLEESEKLIKELTVTWEEKLRKTEEIAQERQRQLESMGISLEMSGIKVGDDKCYLVNLNADPALNELLVYYLKDHTRVGADTSQDIQLFGIGIQPQHCEIDIASDGDVTLTPKENARSCVNGTLVCSTTQLWHGDRILWGNNHFFRINLPKRKRRDWLKDFEKETGPPEHDLDAASEASSEPDYNYEFAQMEVIMKTLNSNDPVQNVVQVLEKQYLEEKRSALEEQRLMYERELEQLRQQLSPDRQPQSSGPDRLAYSSQTAQQKVTQWAEERDELFRQSLAKLREQLVKANTLVREANFLAEEMSKLTDYQVTLQIPAANLSANRKRGAIVSEPAIQVRRKGKSTQVWTIEKLENKLIDMRDLYQEWKEKVPEAKRLYGKRGDPFYEAQENHNLIGVANVFLECLFCDVKLQYAVPIISQQGEVAGRLHVEVMRVTGAVPERVVEDDSSENSSESGSLEVVDSSGEIIHRVKKLTCRVKIKEATGLPLNLSNFVFCQYTFWDQCESTVAAPVVDPEVPSPQSKDAQYTVTFSHCKDYVVNVTEEFLEFISDGALAIEVWGHRCAGNGSSIWEVDSLHAKTRTLHDRWNEVTRRIEMWISILELNELGEYAAVELHQAKDVNTGGIFQLRQGHSRRVQVTVKPVQHSGTLPLMVEAILSVSIGCVTARSTKLQRGLDSYQRDDEDGDDMDSYQEEDLNCVRERWSDALIKRREYLDEQIKKVSNKTEKTEDDVEREAQLVEQWVGLTEERNAVLVPAPGSGIPGAPADWIPPPGMETHIPVLFLDLNADDLSANEQLVGPHASGVNSILPKEHGSQFFYLPIIKHSDDEVSATASWDSSVHDSVHLNRVTPQNERIYLIVKTTVQLSHPAAMELVLRKRIAANIYNKQSFTQSLKRRISLKNIFYSCGVTYEIVSNIPKATEEIEDRETLALLAARSENEGTSDGETYIEKYTRGVLQVENILSLERLRQAVTVKEALSTKARHIRRSLSTPNVHNVSSSRPDLSGFDEDDKGWPENQLDMSDYSSSYQDVACYGTLPRDSPRRNKEGCTSETPHALTVSPFKAFSPQPPKFFKPLMPVKEEHKKRIALEARPLLSQEDSEEEENELEAINRKLISSQPYVPVEFADFSVYNASLENREWFSSKVDLSNSRVLEKEVSRSPTTSSITSGYFSHSASNATLSDMVVPSSDSSDQLAIQTKDADSTEHSTPSLVHDFRPSSNKELTEVEKGLVKDKIIVVPLKENSALAKGSPSSQSIPEKNSKSLCRTGSCSELDACPSKISQPARGFCPREVTVEHTTNILEDHSFTEFMGVSEGKDFDGLTDSSAGELSSRRSLPNKTGGKTVSDGLHHPSQLHSKLENDQVIIPEAAFWVLCCQ

SEQ ID NO: 33687 - protein, 136 aa, Artificial Sequence
  Synthetic polypeptide
GRVQWLTPVIPALWEAEKKHSVLMSVIAGEAVASVRTLDDKQVLQQCMATLRELFKEQEVPDPTKYFVTRWSTDPWIQMAYSFVKTGGSGEAYDIIAEDIQGTVFFAGEATNRHFPQTVTGAYLSGVREASKIAAF

SEQ ID NO: 33688 - protein, 13 aa, Artificial Sequence
  Synthetic polypeptide
SQHFGRPRRSTAC

SEQ ID NO: 33689 - protein, 38 aa, Artificial Sequence
  Synthetic polypeptide
PGTVAHACNPSTLGGREEAQRADVCDCRGGCRIREDPG

SEQ ID NO: 33690 - protein, 118 aa, Artificial Sequence
  Synthetic polypeptide
SGQPPCRKEQPTSGLRRAVLSLSEAPVHLAHPPVVCVPHSSWTQDQNSGPAKWFTACPPRPLLRRGREPPPSPRPRKNPKCPVPERRARRKRTRTTRRRRRRKKKRVSSWKARGKRKK

SEQ ID NO: 33691 - protein, 149 aa, Artificial Sequence
  Synthetic polypeptide
GQDASRDNPPAERSNPLQVSGELFCPSVKLLSTLLTLQLFACLTLPGHRTRTQDLPNGSQHVRLGPCCGGGGNPHPARVRERTRNARSQRGERGGRGRGRRGGGGGGKRKESHRGRQEGKEKSREVDNASLFLTERAIYNCTRKGAETL

SEQ ID NO: 33692 - protein, 178 aa, Artificial Sequence
  Synthetic polypeptide
SSCPPCSPSSCLRASLFLDTGPELRTCQMVHSMSASAPAAEGEGTPTQPASEKEPEMPGPREESEEEEDEDDEEEEEEEKEKSLIVEGKREKKKVERLTMQVSSLQREPFTIAQGKGQKLCEIERIHFFLSKKKTDELRNLHKLLYNRPGTVSSLKKNVGQFSGFPFEKGSVQYKKKE

SEQ ID NO: 33693 - protein, 34 aa, Artificial Sequence
  Synthetic polypeptide
GQRHCLSPLPSDMRFPLTSLSTLRTLTELALYDF

SEQ ID NO: 33694 - protein, 20 aa, Artificial Sequence
  Synthetic polypeptide
RSPEGRDTVFRHYRLTCDFL

SEQ ID NO: 33695 - protein, 259 aa, Artificial Sequence
  Synthetic polypeptide
HAISFDLAEYTADVDGVGTLRLLDAVKTCGLINSVKFYQASTSELYGKVQEIPQKETTPFYPRSPYGAAKLYAYWIVVNFREAYNLFAVNGILFNHESPRRGANFVTRKISRSVAKIYLGQLECFSLGNLDAKRDWGHAKDYVEAMWLMLQNDEPEDFVIATGEVHSVREFVEKSFLHIGKTIVWEGKNENEVGRCKETGKVHVTVDLKYYRPTEVDFLQGDCTKAKQKLNWKPRVAFDELVREMVHADVELMRTNPNA

SEQ ID NO: 33696 - protein, 18 aa, Artificial Sequence
  Synthetic polypeptide
QHYSRHTENLDTNMGLFS

SEQ ID NO: 33697 - protein, 565 aa, Artificial Sequence
  Synthetic polypeptide
WWLMPVIPALWETRWEDHLSPGVQDQPGQYSGPLSLQKIRKINSTIPGIQKIWIRTWGCSHNNSDGEYMAGQLAAYGYKITENASDADLWLLNSCTVKNPAEDHFRNSIKKAQEENKKIVLAGCVPQAQPRQDYLKGLSIIGVQQIDRVVEVVEETIKGHSVRLLGQKKDNGRRLGGARLDLPKIRKNPLIEIISINTGCLNACTYCKTKHARGNLASYPIDELVDRAKQSFQEGVCEIWLTSEDTGAYGRDIGTNLPTLLWKLVEVIPEGAMLRLGMTNPPYILEHLEEMAKILNHPRVYAFLHIPVQSASDSVLMEMKREYCVADFKRVVDFLKEKVPGITIATDIICGFPGETDQDFQETVKLVEEYKFPSLFINQFYPRPGTPAAKMEQVPAQVKKQRTKDLSRVFHSYSPYDHKIGERQQVLVTEESFDSKFYVAHNQFYEQVLVPKNPAFMGKMVEVDIYESGKHFMKGQPVSDAKVYTPSISKPLAKGEVSGLTKDFRNGLGNQLSSGSHTSAASQCDSASSRMVLPMPRLHQDCALRMSVGLALLGLLFAFFVKVYN

SEQ ID NO: 33698 - protein, 33 aa, Artificial Sequence
  Synthetic polypeptide
EKLTALFQAYRKFGYEHGVVLIIIQMENIWLDS

SEQ ID NO: 33699 - protein, 25 aa, Artificial Sequence
  Synthetic polypeptide
ADAVTILPVQPAEPSLCETAGSEKG

SEQ ID NO: 33700 - protein, 442 aa, Artificial Sequence
  Synthetic polypeptide
QVGTPFAFCRDWRLPEALLEAEQMLLPYFPYSLQNRHSVRLLGQKKDNGRRLGGARLDLPKIRKNPLIEIISINTGCLNACTYCKTKHARGNLASYPIDELVDRAKQSFQEGVCEIWLTSEDTGAYGRDIGTNLPTLLWKLVEVIPEGAMLRLGMTNPPYILEHLEEMAKILNHPRVYAFLHIPVQSASDSVLMEMKREYCVADFKRVVDFLKEKVPGITIATDIICGFPGETDQDFQETVKLVEEYKFPSLFINQFYPRPGTPAAKMEQVPAQVKKQRTKDLSRVFHSYSPYDHKIGERQQVLVTEESFDSKFYVAHNQFYEQVLVPKNPAFMGKMVEVDIYESGKHFMKGQPVSDAKVYTPSISKPLAKGEVSGLTKDFRNGLGNQLSSGSHTSAASQCDSASSRMVLPMPRLHQDCALRMSVGLALLGLLFAFFVKVYN

SEQ ID NO: 33701 - protein, 19 aa, Artificial Sequence
  Synthetic polypeptide
KLSRCCYHTSRTACRTVTL

SEQ ID NO: 33702 - protein, 421 aa, Artificial Sequence
  Synthetic polypeptide
QVGTPFAFCRDWRLPEALLEAEQMLLPYFPYSLQNRHSVRLLGQKKDNGRRLGGARLDLPKIRKNPLIEIISINTGCLNACTYCKTKHARGNLASYPIDELVDRAKQSFQEGVCEIWLTSEDTGAYGRDIGTNLPTLLWKLVEVIPEGAMLRLGMTNPPYILEHLEEMAKILNHPRVYAFLHIPVQSASDSVLMEMKREYCVADFKRVVDFLKEKVPGITIATDIICGFPGETDQDFQETVKLVEEYKFPSLFINQFYPRPGTPAAKMEQVPAQVIGERQQVLVTEESFDSKFYVAHNQFYEQVLVPKNPAFMGKMVEVDIYESGKHFMKGQPVSDAKVYTPSISKPLAKGEVSGLTKDFRNGLGNQLSSGSHTSAASQCDSASSRMVLPMPRLHQDCALRMSVGLALLGLLFAFFVKVYN

SEQ ID NO: 33703 - protein, 9 aa, Artificial Sequence
  Synthetic polypeptide
SILKSRGCL

SEQ ID NO: 33704 - protein, 334 aa, Artificial Sequence
  Synthetic polypeptide
NQEGVCEIWLTSEDTGAYGRDIGTNLPTLLWKLVEVIPEGAMLRLGMTNPPYILEHLEEMAKILNHPRVYAFLHIPVQSASDSVLMEMKREYCVADFKRVVDFLKEKVPGITIATDIICGFPGETDQDFQETVKLVEEYKFPSLFINQFYPRPGTPAAKMEQVPAQVKKQRTKDLSRVFHSYSPYDHKIGERQQVLVTEESFDSKFYVAHNQFYEQVLVPKNPAFMGKMVEVDIYESGKHFMKGQPVSDAKVYTPSISKPLAKGEVSGLTKDFRNGLGNQLSSGSHTSAASQCDSASSRMVLPMPRLHQDCALRMSVGLALLGLLFAFFVKVYN

SEQ ID NO: 33705 - protein, 18 aa, Artificial Sequence
  Synthetic polypeptide
HFVAIKYFKIKRVFVRYG

SEQ ID NO: 33706 - protein, 313 aa, Artificial Sequence
  Synthetic polypeptide
NQEGVCEIWLTSEDTGAYGRDIGTNLPTLLWKLVEVIPEGAMLRLGMTNPPYILEHLEEMAKILNHPRVYAFLHIPVQSASDSVLMEMKREYCVADFKRVVDFLKEKVPGITIATDIICGFPGETDQDFQETVKLVEEYKFPSLFINQFYPRPGTPAAKMEQVPAQVIGERQQVLVTEESFDSKFYVAHNQFYEQVLVPKNPAFMGKMVEVDIYESGKHFMKGQPVSDAKVYTPSISKPLAKGEVSGLTKDFRNGLGNQLSSGSHTSAASQCDSASSRMVLPMPRLHQDCALRMSVGLALLGLLFAFFVKVYN

SEQ ID NO: 33707 - protein, 168 aa, Artificial Sequence
  Synthetic polypeptide
EKKQRTKDLSRVFHSYSPYDHKIGERQQVLVTEESFDSKFYVAHNQFYEQVLVPKNPAFMGKMVEVDIYESGKHFMKGQPVSDAKVYTPSISKPLAKGEVSGLTKDFRNGLGNQLSSGSHTSAASQCDSASSRMVLPMPRLHQDCALRMSVGLALLGLLFAFFVKVYN

SEQ ID NO: 33708 - protein, 49 aa, Artificial Sequence
  Synthetic polypeptide
AKKEDTKMWDKGNSRLSTDERKSKGQKIFLGCFILTVHMITRLVKDNKC

SEQ ID NO: 33709 - protein, 43 aa, Artificial Sequence
  Synthetic polypeptide
KQESKLRKKIRRCGIKETADSAQMREKAKDKRSFSGVSFLQSI

SEQ ID NO: 33710 - protein, 375 aa, Artificial Sequence
  Synthetic polypeptide
VSLMRSDGFIKGNPFAWLSFFLLLSAMIVRPPQPCGTDGSYLAEFLLEKGYEVHGIVRRSSSFNTGRIEHLYKNPQAHIEGNMKLHYGDLTDSTCLVKIINEVKPTEIYNLGAQSHVKISFDLAEYTADVDGVGTLRLLDAVKTCGLINSVKFYQASTSELYGKVQEIPQKETTPFYPRSPYGAAKLYAYWIVVNFREAYNLFAVNGILFNHESPRRGANFVTRKISRSVAKIYLGQLECFSLGNLDAKRDWGHAKDYVEAMWLMLQNDEPEDFVIATGEVHSVREFVEKSFLHIGKTIVWEGKNENEVGRCKETGKVHVTVDLKYYRPTEVDFLQGDCTKAKQKLNWKPRVAFDELVREMVHADVELMRTNPNA

SEQ ID NO: 33711 - protein, 53 aa, Artificial Sequence
  Synthetic polypeptide
DLPSHVELMVPTWLSSCWRKAMRSMELYGGPVHLIRVELSICIRIPRLTLKET

SEQ ID NO: 33712 - protein, 11 aa, Artificial Sequence
  Synthetic polypeptide
NVRKLLHYLLL

SEQ ID NO: 33713 - protein, 48 aa, Artificial Sequence
  Synthetic polypeptide
GRARWLMPVIPALWEAEAGGSRGQEIETIPAKTSESFFTTSYCRIQKV

SEQ ID NO: 33714 - protein, 265 aa, Artificial Sequence
  Synthetic polypeptide
SQHFGRPRRADHEVRRSRPSRLKRQKASSLPPIVGSRKSKGSGNDRHSKSTVGSSDNSSPQPLKRKGKKEDVNSEKLTKLKQNVKLKNSQETIPNSDEGIFKAGAERSETRGAAEVQEDEDTQVEVPVDQRPAEIVDEEEDGEKANKDAEQKEDFSGMNGDLEEEGGREATDAPEQVEEILDHSEQQARPARVNGGTDEENGEELQQVNNELQLVLDKERKSQGAGSGQDEADVDPQRPPRPEVKITSPEENENNQQNKDYAAVA

SEQ ID NO: 33715 - protein, 268 aa, Artificial Sequence
  Synthetic polypeptide
GRAQWLTPVIPALWEAEADRSLEILLHHAANSVKRVSMELGGLAPFIVFDSANVDQAVAGAMASKFRNTGQTCVCSNQFLVQRGIHDAFVKAFAEAMKKNLRVGNGFEEGTTQGPLINEKAVEKVEKQVNDAVSKGATVVTGGKRHQLGKNFFEPTLLCNVTQDMLCTHEETFGPLAPVIKFDTEEEAIAIANAADVGLAGYFYSQDPAQIWRVAEQLEVGMVGVNEGLISSVECPFGGVKQSGLGREGSKYGIDEYLELKYVCYGGL

SEQ ID NO: 33716 - protein, 23 aa, Artificial Sequence
  Synthetic polypeptide
SQHFGRLRQTDHLRSCCTTQQTL

SEQ ID NO: 33717 - protein, 95 aa, Artificial Sequence
  Synthetic polypeptide
RRSQDGRIGTAPVYSSQRERRRRRVISAFPSEATESIKMLVTLCQSDTEEIRNVASETLLSLGEDGRLAYEQLDKFPRDCVKVGGRHGTEVATAF

SEQ ID NO: 33718 - protein, 15 aa, Artificial Sequence
  Synthetic polypeptide
FLHFHLRLLKALKCW

SEQ ID NO: 33719 - protein, 323 aa, Artificial Sequence
  Synthetic polypeptide
NLISTKDTKISQQIVFSSKTPFVARSLLEKLSRQIQVMEKLAAVSDENIGNISSVVEAIPEFHKKLSLLSFWTKCCSPVGVYHSPADRVMKQLEASFARTVNKEYPGLADPVFRTLVSQILDRAEPLLSSSLSSEVVTVFQYYSYFTSHGVSDLESYLSQLARQVSMVQTLQSLRDEKLLQTMSDLAPSNLLAQQEVLRTLALLLTREDNEVSEAVTLYLAAASKNQHFREKALLYYCEALTKTNLQLQKAACLALKILEATESIKMLVTLCQSDTEEIRNVASETLLSLGEDGRLAYEQLDKFPRDCVKVGGRHGTEVATAF

SEQ ID NO: 33720 - protein, 35 aa, Artificial Sequence
  Synthetic polypeptide
DQPGQQSETSSLQKIQKLVSKLFSQAKPHLWQEVS

SEQ ID NO: 33721 - protein, 21 aa, Artificial Sequence
  Synthetic polypeptide
SANCFLKQNPICGKKSLREAF

SEQ ID NO: 33722 - protein, 25 aa, Artificial Sequence
  Synthetic polypeptide
VYYTVSLGMPALKGVKSLHHAEPSL

SEQ ID NO: 33723 - protein, 57 aa, Artificial Sequence
  Synthetic polypeptide
FTTLYPLECQRLKVLSPYIMPSLPCNSANPHQARVNLQLLGDSWRRLQQVSSDDCGN

SEQ ID NO: 33724 - protein, 61 aa, Artificial Sequence
  Synthetic polypeptide
LCTERAKCRVTPSSGAPRGGSPPWQGPCLSCCCFLGEPVTSCGNSRRKKRLSSERKRESKS

SEQ ID NO: 33725 - protein, 176 aa, Artificial Sequence
  Synthetic polypeptide
KVIFYSTDYDCTRLETMQMFTAGELSCNGYHSTVKEKRDNSLYSEVEKPPRLTLHRKSKMQSDPFFRSAQRWIAALAGTLPVLLLLLGGAGYFLWQQQEEKKTQFRKKKREQELREMAWSTMKQEQSTRVKLLEELRWRSIQYASRGERHSAYNEWKKALFKPGEEMLQMRLHFVK

SEQ ID NO: 33726 - protein, 337 aa, Artificial Sequence
  Synthetic polypeptide
KVIFYSTDYDCTRLETMQMFTAGELSCNGYHSTVKEKRDNSLYSEVEKPPRLTLHRKSKMQSDPFFRSAQRWIAALAGTLPVLLLLLGGAGYFLWQQQEEKKTQFRKKKREQELREMAWSTMKQEQSTRVKLLEELRWRSIQYASRGERHSAYNEWKKALFKPADVILDPKTANPILLVSEDQRSVQRAKEPQDLPDNPERFNWHYCVLGCESFISGRHYWEVEVGDRKEWHIGVCSKNVQRKGWVKMTPENGFWTMGLTDGNKYRTLTEPRTNLKLPKPPKKVGVFLDYETGDISFYNAVDGSHIHTFLDVSFSEALYPVFRILTLEPTALTICPA

SEQ ID NO: 33727 - protein, 202 aa, Artificial Sequence
  Synthetic polypeptide
KVIFYSTDYDCTRLETMQMFTAGELSCNGYHSTVKEKRDNSLYSEVEKPPRLTLHRKSKMQSDPFFRSAQRWIAALAGTLPVLLLLLGGAGYFLWQQQEEKKTQFRKKKREQELREMAWSTMKQEQSTRVKLLEELRWRSIQYASRGERHSAYNEWKKALFKPGPPIGQTQQQTRGQGSPVALSQESAQRTDSWGPEEGGES

SEQ ID NO: 33728 - protein, 10 aa, Artificial Sequence
  Synthetic polypeptide
WLPDRSDGPV

SEQ ID NO: 33729 - protein, 31 aa, Artificial Sequence
  Synthetic polypeptide
PIKLFLCVTSLVEWSSLNLSDGCPIVLMGQF

SEQ ID NO: 33730 - protein, 5 aa, Artificial Sequence
  Synthetic polypeptide
TGSRW

SEQ ID NO: 33731 - protein, 405 aa, Artificial Sequence [sequence omitted]

SEQ ID NO: 33732 - protein, 35 aa, Artificial Sequence
  Synthetic polypeptide
FPKSHPLQEASLHPTGPCSHPPSLCSLFPWTRETS

SEQ ID NO: 33733 - protein, 53 aa, Artificial Sequence
  Synthetic polypeptide
FPNLTLSRKPACTPPAPAPIPLHSALFSRGHERLPKQVSTEEVLGWETHCSSG

SEQ ID NO: 33734 - protein, 313 aa, Artificial Sequence
  Synthetic polypeptide
SQISPSPGSQPAPHRPLLPSPFTLLSFPVDTRDFLNRYPRKKFWVGKPIARVVKKKTGEFSDKLLSLQRGLREFQGKLLRDLEYKTVSVTLDPQSASGYLQLSEDWKCVTYTSLYKSAYLHPQQFDCEPGVLGSKGFTWGKVYWEVEVEREGWSEDEEEGDEEEEGEEEEEEEEAGYGDGYDDWETDEDEESLGDEEEEEEEEEEEVLESCMVGVARDSVKRKGDLSLRPEDGVWALRLSSSGIWANTSPEAELFPALRPRRVGIALDYEGGTVTFTNAESQELIYTFTATFTRRLVPFLWLKWPGTRLLLRP

SEQ ID NO: 33735 - protein, 9 aa, Artificial Sequence
  Synthetic polypeptide
SQQFWRPRD

SEQ ID NO: 33736 - protein, 30 aa, Artificial Sequence
  Synthetic polypeptide
PDMVAHTCNPSNSGGQETSGKSPTADLEGV

SEQ ID NO: 33737 - protein, 351 aa, Artificial Sequence
  Synthetic polypeptide
RTWWLTPVIPAILEAKRLVESRRQQILREFEELHRRLDEEQQVLLSRLEEEEQDILQRLRENAAHLGDKRRDLAHLAAEVEGKCLQSGFEMLKDVKSTLEKNIPRKFGGSLSTICPRDHKALLGLVKEINRCEKVKTMEVTSVSIELEKNFSNFPRQYFALRKILKQLIADVTLDPETAHPNLVLSEDRKSVKFVETRLRDLPDTPRRFTFYPCVLATEGFTSGRHYWEVEVGDKTHWAVGVCRDSVSRKGELTPLPETGYWRVRLWNGDKYAATTTPFTPLHIKVKPKRVGIFLDYEAGTLSFYNVTDRSHIYTFTDTFTEKLWPLFYPGIRAGRKNAAPLTIRPPTDWE

SEQ ID NO: 33738 - protein, 321 aa, Artificial Sequence
  Synthetic polypeptide
RTWWLTPVIPAILEAKRLVESRRQQILREFEELHRRLDEEQQVLLSRLEEEEQDILQRLRENAAHLGDKRRDLAHLAAEVEGKCLQSGFEMLKPVLSAREECEKVKTMEVTSVSIELEKNFSNFPRQYFALRKILKQLIADVTLDPETAHPNLVLSEDRKSVKFVETRLRDLPDTPRRFTFYPCVLATEGFTSGRHYWEVEVGDKTHWAVGVCRDSVSRKGELTPLPETGYWRVRLWNGDKYAATTTPFTPLHIKVKPKRVGIFLDYEAGTLSFYNVTDRSHIYTFTDTFTEKLWPLFYPGIRAGRKNAAPLTIRPPTDWE

SEQ ID NO: 33739 - protein, 321 aa, Artificial Sequence
  Synthetic polypeptide
RTWWLTPVIPAILEAKRLVESRRQQILREFEELHRRLDEEQQVLLSRLEEEEQDILQRLRENAAHLGDKRRDLAHLAAEVEGKCLQSGFEMLKDVKSTLEKCEKVKTMEVTSVSIELEKNFSNFPRQYFALRKILKQLIADVTLDPETAHPNLVLSEDRKSVKFVETRLRDLPDTPRRFTFYPCVLATEGFTSGRHYWEVEVGDKTHWAVGVCRDSVSRKGELTPLPETGYWRVRLWNGDKYAATTTPFTPLHIKVKPKRVGIFLDYEAGTLSFYNVTDRSHIYTFTDTFTEKLWPLFYPGIRAGRKNAAPLTIRPPTDWE

SEQ ID NO: 33740 - protein, 93 aa, Artificial Sequence
  Synthetic polypeptide
RTWWLTPVIPAILEAKRLVESRRQQILREFEELHRRLDEEQQVLLSRLEEEEQDILQRLRENAAHLGDKRRDLAHLAAEVEGKCLQSGFEMLK

SEQ ID NO: 33741 - protein, 130 aa, Artificial Sequence
  Synthetic polypeptide
RTWWLTPVIPAILEAKRLVESRRQQILREFEELHRRLDEEQQVLLSRLEEEEQDILQRLRENAAHLGDKRRDLAHLAAEVEGKCLQSGFEMLKDVKSTLEKCEKVKTMEVTSTTPCTSLHSEINDNVRGR

SEQ ID NO: 33742 - protein, 336 aa, Artificial Sequence
  Synthetic polypeptide
RTWWLTPVIPAILEAKRLVESRRQQILREFEELHRRLDEEQQVLLSRLEEEEQDILQRLRENAAHLGDKRRDLAHLAAEVEGKCLQSGFEMLKDVKSTLEKCEKVKTMEVTSVSIELEKNFSNFPRQYFALRKILKQLIADVTLDPETAHPNLVLSEDRKSVKFVETRLRDLPDTPRRFTFYPCVLATEGFTSGRHYWEVEAAHCVLAQDPENQALARFYCYTERTIAKRLVLRRDPSVKRTLCRGCSSLLVPGLTCTQRQRRCRGQRWTVQTCLTCQRSQRFLNDPGHLLWGDRPEAQLGSQADSKPLQPLPNTAHSISDRLPEEKMQTQGSSNQ

SEQ ID NO: 33743 - protein, 13 aa, Artificial Sequence
  Synthetic polypeptide
KLFTEVLQDQGDH

SEQ ID NO: 33744 - protein, 62 aa, Artificial Sequence
  Synthetic polypeptide
MILDQLDIHVKKMEFHLALIIIYKDLFQMDCRSKYKSSSQRSSRIKGTTDSTTAESPTSSLG

SEQ ID NO: 33745 - protein, 148 aa, Artificial Sequence
  Synthetic polypeptide
SYTKIYFKWTVDLSIKALHRGPPGSRGPLIPPLLSLPPPPWGRGPIRRGLGPRSSPYGRGWWGVNAEPPFPGPGHGGPTRGSFHKEQRNPRRLKSWSLIKNTCPPKDDPQVMEDKSDRPVCRHFAKKGHCRYEDLCAFYHPGVNGPPL

SEQ ID NO: 33746 - protein, 18 aa, Artificial Sequence
  Synthetic polypeptide
SQHFGRQRQADHERGDGG

SEQ ID NO: 33747 - protein, 548 aa, Artificial Sequence
  Synthetic polypeptide
PGAVAHACNPSTLGGRGRRITSVVMVDEAHERTLHTDILFGLIKDVARFRPELKVLVASATMDTARFSTFFDDAPVFRIPGRRFPVDIFYTKAPEADYLEACVVSVLQIHVTQPPGDILVFLTGQEEIEAACEMLQDRCRRLGSKIRELLVLPIYANLPSDMQARIFQPTPPGARKVVVATNIAETSLTIEGIIYVLDPGFCKQKSYNPRTGMESLTVTPCSKASANQRAGRAGRVAAGKCFRLYTAWAYQHELEETTVPEIQRTSLGNVVLLLKSLGIHDLMHFDFLDPPPYETLLLALEQLYALGALNHLGELTTSGRKMAELPVDPMLSKMILASEKYSCSEEILTVAAMLSVNNSIFYRPKDKVVHADNARVNFFLPGGDHLVLLNVYTQWAESGYSSQWCYENFVQFRSMRRARDVREQLEGLLERVEVGLSSCQGDYIRVRKAITAGYFYHTARLTRSGYRTVKQQQTVFIHPNSSLFEQQPRWLLYHELVLTTKEFMRQVLEIESSWLLEVAPHYYKAKELEDPHAKKMPKKIGKTREELG

SEQ ID NO: 33748 - protein, 23 aa, Artificial Sequence
  Synthetic polypeptide
RERWLTPVIPALWEAEAGGSRAW

SEQ ID NO: 33749 - protein, 11 aa, Artificial Sequence
  Synthetic polypeptide
WSKSQDESCRR

SEQ ID NO: 33750 - protein, 11 aa, Artificial Sequence
  Synthetic polypeptide
GQNHRMSPAGG

SEQ ID NO: 33751 - protein, 5 aa, Artificial Sequence
  Synthetic polypeptide
VKITG

SEQ ID NO: 33752 - protein, 42 aa, Artificial Sequence
  Synthetic polypeptide
CGAEVGELGSLQVRGSRPSWATKRDPPPCHVSTKNKILGGDQ

SEQ ID NO: 33753 - protein, 461 aa, Artificial Sequence
  Synthetic polypeptide
VGPRWANWDPSRSGVRDHPGQQSETLPHATFLQKIKFWEVISDEHGIDPTGTYHGDSDLQLDRISVYYNEATGGKYVPRAILVDLEPGTMDSVRSGPFGQIFRPDNFVFGQSGAGNNWAKGHYTEGAELVDSVLDVVRKEAESCDCLQGFQLTHSLGGGTGSGMGTLLISKIREEYPDRIMNTFSVVPSPKVSDTVVEPYNATLSVHQLVENTDETYCIDNEALYDICFRTLKLTTPTYGDLNHLVSATMSGVTTCLRFPGQLNADLRKLAVNMVPFPRLHFFMPGFAPLTSRGSQQYRALTVPELTQQVFDAKNMMAACDPRHGRYLTVAAVFRGRMSMKEVDEQMLNVQNKNSSYFVEWIPNNVKTAVCDIPPRGLKMAVTFIGNSTAIQELFKRISEQFTAMFRRKAFLHWYTGEGMDEMEFTEAESNMNDLVSEYQQYQDATAEEEEDFGEEAEEEA

SEQ ID NO: 33754 - protein, 260 aa, Artificial Sequence
  Synthetic polypeptide
VGPRWANWDPSRSGVRDHPGQQSETLPHATFLQKIKFWEVISDEHGIDPTGTYHGDSDLQLDRISVYYNEATGGKYVPRAILVDLEPGTMDSVRSGPFGQIFRPDNFVFGQSGAGNNWAKGHYTEGAELVDSVLDVVRKEEVDEQMLNVQNKNSSYFVEWIPNNVKTAVCDIPPRGLKMAVTFIGNSTAIQELFKRISEQFTAMFRRKAFLHWYTGEGMDEMEFTEAESNMNDLVSEYQQYQDATAEEEEDFGEEAEEEA

SEQ ID NO: 33755 - protein, 35 aa, Artificial Sequence
  Synthetic polypeptide
PTWRSIRTGRNSQNRFSKWPPQTWSTWASVWLATL

SEQ ID NO: 33756 - protein, 27 aa, Artificial Sequence
  Synthetic polypeptide
SQHFGMPRWADHLRSGVRDQPSQPGDL

SEQ ID NO: 33757 - protein, 320 aa, Artificial Sequence
  Synthetic polypeptide
GQEFETSLANLEIYKDRQKFSEQVFKVASSDLVNMGISVVSYTLKDIHDDQDYLHSLGKARTAQVQKDARIGEAEAKRDAGIREAKAKQEKVSAQYLSEIEMAKAQRDYELKKAAYDIEVNTRRAQADLAYQLQVAKTKQQIEEQRVQVQVVERAQQVAVQEQEIARREKELEARVRKPAEAERYKLERLAEAEKSQLIMQAEAEAASVRMRGEAEAFAIGARARAEAEQMAKKAEAFQLYQEAAQLDMLLEKLPQVAEEISGPLTSANKITLVSSGSGTMGAAKVTGEVLDILTRLPESVERLTGVSISQVNHKPLRTA

SEQ ID NO: 33758 - protein, 194 aa, Artificial Sequence
  Synthetic polypeptide
GQEFETSLANLEIYKDRQKFSEQVFKVASSDLVNMGISVVSYTLKDIHDDQDYLHSLGKARTAQVQKDARIGEAEAKRDAGIREAKAKQEKVSAQYLSEIEMAKAQRDYELKKAAYDIEVNTRRAQADLAYQLQVAKTKQQIEEQRVQVQVVERAQQVAVQEQEIARREKELEARVRKPAEAERYKLERLAEAE

SEQ ID NO: 33759 - protein, 145 aa, Artificial Sequence
  Synthetic polypeptide
GQEFETSLANLEIYKDRQKFSEQVFKVASSDLVNMGISVVSYTLKDIHDDQDYLHSLGKARTAQVQKDARIGEAEAKRDAGIREAKAKQEKVSAQYLSEIEMAKAQRDYELKKAAYDIEVNTRRAQADLAYQLQVAKTKQQIEEQ

SEQ ID NO: 33760 - protein, 128 aa, Artificial Sequence
  Synthetic polypeptide
GQEFETSLANLEIYKDRQKFSEQVFKVASSDLVNMGISVVSYTLKDIHDDQDYLHSLGKARTAQVQKDARIGEAEAKRDAGIREAKAKQEKVSAQYLSEIEMAKAQRDYELKKAAYDIEVNTRRAQAD

SEQ ID NO: 33761 - protein, 101 aa, Artificial Sequence
  Synthetic polypeptide
GQEFETSLANLEIYKDRQKFSEQVFKVASSDLVNMGISVVSYTLKDIHDDQDYLHSLGKARTAQVQKDARIGEAEAKRDAGIREAKAKQEKVSAQYLSEIE

SEQ ID NO: 33762 - protein, 78 aa, Artificial Sequence
  Synthetic polypeptide
GQEFETSLANLEIYKDRQKFSEQVFKVASSDLVNMGISVVSYTLKDIHDDQDYLHSLGKARTAQVQKDARIGEAEAKR

SEQ ID NO: 33763 - protein, 286 aa, Artificial Sequence
  Synthetic polypeptide
GRAGWFMPVIPALWDAKDYLHSLGKARTAQVQKDARIGEAEAKRDAGIREAKAKQEKVSAQYLSEIEMAKAQRDYELKKAAYDIEVNTRRAQADLAYQLQVAKTKQQIEEQRVQVQVVERAQQVAVQEQEIARREKELEARVRKPAEAERYKLERLAEAEKSQLIMQAEAEAASVRMRGEAEAFAIGARARAEAEQMAKKAEAFQLYQEAAQLDMLLEKLPQVAEEISGPLTSANKITLVSSGSGTMGAAKVTGEVLDILTRLPESVERLTGVSISQVNHKPLRTA

SEQ ID NO: 33764 - protein, 53 aa, Artificial Sequence
  Synthetic polypeptide
SQHFGMPRTICTLWGRLEQLKSKKMHGLEKQRPREMLGSGKLKPSRKRCLLST

SEQ ID NO: 33765 - protein, 50 aa, Artificial Sequence
  Synthetic polypeptide
PGRVVHACNPSTLGCQGLFALFGEGSNSSSPKRCTDWRSRGQERCWDPGS

SEQ ID NO: 33766 - protein, 160 aa, Artificial Sequence
  Synthetic polypeptide
GRAGWFMPVIPALWDAKDYLHSLGKARTAQVQKDARIGEAEAKRDAGIREAKAKQEKVSAQYLSEIEMAKAQRDYELKKAAYDIEVNTRRAQADLAYQLQVAKTKQQIEEQRVQVQVVERAQQVAVQEQEIARREKELEARVRKPAEAERYKLERLAEAE

SEQ ID NO: 33767 - protein, 111 aa, Artificial Sequence
  Synthetic polypeptide
GRAGWFMPVIPALWDAKDYLHSLGKARTAQVQKDARIGEAEAKRDAGIREAKAKQEKVSAQYLSEIEMAKAQRDYELKKAAYDIEVNTRRAQADLAYQLQVAKTKQQIEEQ

SEQ ID NO: 33768 - protein, 99 aa, Artificial Sequence
  Synthetic polypeptide
GRAGWFMPVIPALWDAKDYLHSLGKARTAQVQKDARIGEAEAKRDAGIREAKAKQEKVSAQYLSEIEMAKAQRDYELKKAAYDIEVNTRRAQADLAYQL

SEQ ID NO: 33769 - protein, 94 aa, Artificial Sequence
  Synthetic polypeptide
GRAGWFMPVIPALWDAKDYLHSLGKARTAQVQKDARIGEAEAKRDAGIREAKAKQEKVSAQYLSEIEMAKAQRDYELKKAAYDIEVNTRRAQAD

SEQ ID NO: 33770 - protein, 67 aa, Artificial Sequence
  Synthetic polypeptide
GRAGWFMPVIPALWDAKDYLHSLGKARTAQVQKDARIGEAEAKRDAGIREAKAKQEKVSAQYLSEIE

SEQ ID NO: 33771 - protein, 44 aa, Artificial Sequence
  Synthetic polypeptide
GRAGWFMPVIPALWDAKDYLHSLGKARTAQVQKDARIGEAEAKR

SEQ ID NO: 33772 - protein, 35 aa, Artificial Sequence
  Synthetic polypeptide
SQHFGMPRTICTLWGRLEQLKSKKMHGLEKQRPRE

SEQ ID NO: 33773 - protein, 44 aa, Artificial Sequence
  Synthetic polypeptide
PGRVVHACNPSTLGCQGLFALFGEGSNSSSPKRCTDWRSRGQER

SEQ ID NO: 33774 - protein, 46 aa, Artificial Sequence
  Synthetic polypeptide
PNSFKFHFSQQDAAPTPLGPRDQELWDQRPCHLYCCCSWWQVEMLT

SEQ ID NO: 33775 - protein, 17 aa, Artificial Sequence
  Synthetic polypeptide
PTVLSSTSPNKMLPPPP

SEQ ID NO: 33776 - protein, 896 aa, Artificial Sequence
  Synthetic polypeptide
VPLLPTRCCPHPLRPEGSGAMGPEALSSLLLLLLVASGDADMKGHFDPAKCRYALGMQDRTIPDSDISASSSWSDSTAARHSRLESSDGDGAWCPAGSVFPKEEEYLQVDLQRLHLVALVGTQGRHAGGLGKEFSRSYRLRYSRDGRRWMGWKDRWGQEVISGNEDPEGVVLKDLGPPMVARLVRFYPRADRVMSVCLRVELYGCLWRDGLLSYTAPVGQTMYLSEAVYLNDSTYDGHTVGGLQYGGLGQLADGVVGLDDFRKSQELRVWPGYDYVGWSNHSFSSGYVEMEFEFDRLRAFQAMQVHCNNMHTLGARLPGGVECRFRRGPAMAWEGEPMRHNLGGNLGDPRARAVSVPLGGRVARFLQCRFLFAGPWLLFSEISFISDVVNNSSPALGGTFPPAPWWPPGPPPTNFSSLELEPRGQQPVAKAEGSPTAILIGCLVAIILLLLLIIALMLWRLHWRRLLSKAERRVLEEELTVHLSVPGDTILINNRPGPREPPPYQEPRPRGNPPHSAPCVPNGSAYSGDYMEPEKPGAPLLPPPPQNSVPHYAEADIVTLQGVTGGNTYAVPALPPGAVGDGPPRVDFPRSRLRFKEKLGEGQFGEVHLCEVDSPQDLVSLDFPLNVRKGHPLLVAVKILRPDATKNARNDFLKEVKIMSRLKDPNIIRLLGVCVQDDPLCMITDYMENGDLNQFLSAHQLEDKAAEGAPGDGQAAQGPTISYPMLLHVAAQIASGMRYLATLNFVHRDLATRNCLVGENFTIKIADFGMSRNLYAGDYYRVQGRAVLPIRWMAWECILMGKFTTASDVWAFGVTLWEVLMLCRAQPFGQLTDEQVIENAGEFFRDQGRQVYLSRPPACPQGLYELMLRCWSRESEQRPPFSQLHRFLAEDALNTV

SEQ ID NO: 33777 - protein, 190 aa, Artificial Sequence
  Synthetic polypeptide
VPLLPTRCCPHPLRPEGSGAMGPEALSSLLLLLLVASGDADMKGHFDPAKCRYALGMQDRTIPDSDISASSSWSDSTAARHSRLESSDGDGAWCPAGSVFPKEEEYLQVDLQRLHLVALVGTQGRHAGGLGKEFSRSYRLRYSRDGRRWMGWKDRWGQEVISGNEDPEGVVLKDLGPPMVARLVRFYPRA

SEQ ID NO: 33778 - protein, 19 aa, Artificial Sequence
  Synthetic polypeptide
KERVFKRKCSCEENAVSST

SEQ ID NO: 33779 - protein, 400 aa, Artificial Sequence
  Synthetic polypeptide
PCAGKSNKSQFKRIVIIKMSSEYISIMFKINFKKKEYSNENAVVKRMQSLQLDCVAVPSSRSNSATEQPGSLHSSQGLGMGPVEESWFAPSLEHPQEENEPSLQSKLQDEANYHLYGSRMDRQTKQQPRQNVAYNREEERRRRVSHDPFAQQRPYENFQNTEGKGTAYSSAASHGNAVHQPSGLTSQPQVLYQNNGLYSSHGFGTRPLDPGTAGPRVWYRPIPSHMPSLHNIPVPETNYLGNTPTMPFSSLPPTDESIKYTIYNSTGIQIGAYNYMEIGGTSSSLLDSTNTNFKEEPAAKYQAIFDNTTSLTDKHLDPIRENLGKHWKNCARKLGFTQSQIDEIDHDYERDGLKEKVYQMLQKWVMREGIKGATVGKLAQALHQCSRIDLLSSLIYVSQN

SEQ ID NO: 33780 - protein, 26 aa, Artificial Sequence
  Synthetic polypeptide
KCPLSIFQLCSKLILKRKSIQTKMQL

SEQ ID NO: 33781 - protein, 200 aa, Artificial Sequence
  Synthetic polypeptide
TLGRNWHLESGHLKLGKVFSQTTICRFEALQLSFKNMCKLRPLLQKWVEEADNNENLQEICKAETLVQARKRKRTSIENRVRGNLENLFLQCPKPTLQQISHIAQQLGLEKDVVRVWFCNRRQKGKRSSSDYAQREDFEAAGSPFSGGPVSFPLAPGPHFGTPGYGSPHFTALYSSVPFPEGEAFPPVSVTTLGSPMHSN

SEQ ID NO: 33782 - protein, 67 aa, Artificial Sequence
  Synthetic polypeptide
NLGRYSAKRPSAALRLCSLASRTCVSCGPCCRSGWRKLTTMKIFRRYAKQKPSCRPERESEPVSRTE

SEQ ID NO: 33783 - protein, 89 aa, Artificial Sequence
  Synthetic polypeptide
LTDGQGSPLGGLGLPCGASLRWTLASLSDAIQRALPGRKFPGWNASPEQHVAGPRGGLTHWLNTGKELALGVRTSETWEGIQPNDHLPL

SEQ ID NO: 33784 - protein, 31 aa, Artificial Sequence
  Synthetic polypeptide
RVVRSSNPAWPTCVEEGPNRSTVSRPRSHRL

SEQ ID NO: 33785 - protein, 58 aa, Artificial Sequence
  Synthetic polypeptide
SQHFGSPWQGDNVWSGVPIQPGQHVSRRAPTAAQSAAPAATGCDPGASSLELSNIRTS

SEQ ID NO: 33786 - protein, 975 aa, Artificial Sequence
  Synthetic polypeptide
PGVVAPACNPSTLGRHGRGITCGQEFQSSLANMCRGGPQPQHSQPPPQPPAVTPEPVALSSQTSEPVESEAPPREPMEAEEVEERAPAQNPELTPGPAPAGPTPAPETNAPNHPSPAEYVEVLQELQRLESRLQPFLQRYYEVLGAAATTDYNNNHEGREEDQRLINLVGESLRLLGNTFVALSDLRCNLACTPPRHLHVVRPMSHYTTPMVLQQAAIPIQINVGTTVTMTGNGTRPPPTPNAEAPPPGPGQASSVAPSSTNVESSAEGAPPPGPAPPPATSHPRVIRISHQSVEPVVMMHMNIQDSGTQPGGVPSAPTGPLGPPGHGQTLGQQVPGFPTAPTRVVIARPTPPQARPSHPGGPPVSGTLQGAGLGTNASLAQMVSGLVGQLLMQPVLVAQGTPGMAPPPAPATASASAGTTNTATTAGPAPGGPAQPPPTPQPSMADLQFSQLLGNLLGPAGPGAGGSGVASPTITVAMPGVPAFLQGMTDFLQATQTAPPPPPPPPPPPPAPEQQTMPPPGSPSGGAGSPGGLGLESLSPEFFTSVVQGVLSSLLGSLGARAGSSESIAAFIQRLSGSSNIFEPGADGALGFFGALLSLLCQNFSMVDVVMLLHGHFQPLQRLQPQLRSFFHQHYLGGQEPTPSNIRMATHTLITGLEEYVRESFSLVQVQPGVDIIRTNLEFLQEQFNSIAAHVLHCTDSGFGARLLELCNQGLFECLALNLHCLGGQQMELAAVINGRIRRMSRGVNPSLVSWLTTMMGLRLQVVLEHMPVGPDAILRYVRRVGDPPQPLPEEPMEVQGAERASPEPQRENASPAPGTTAEEAMSRGPPPAPEGGSRDEQDGASAETEPWAAAVPPEWVPIIQQDIQSQRKVKPQPPLSDAYLSGMPAKRRKTMQGEGPQLLLSEAVSRAAKAAGARPLTSPESLSRDLEAPEVQESYRQQLRSDIQKRLQEDPNYSPQRFPNAQRAFADDP

SEQ ID NO: 33787 - protein, 752 aa, Artificial Sequence
  Synthetic polypeptide
PGVVAPACNPSTLGRHGRGITCGQEFQSSLANMCRGGPQPQHSQPPPQPPAVTPEPVALSSQTSEPVESEAPPREPMEAEEVEERAPAQNPELTPGPAPAGPTPAPETNAPNHPSPAEYVEVLQELQRLESRLQPFLQRYYEVLGAAATTDYNNNHEGREEDQRLINLVGESLRLLGNTFVALSDLRCNLACTPPRHLHVVRPMSHYTTPMVLQQAAIPIQINVGTTVTMTGNGTRPPPTPNAEAPPPGPGQASSVAPSSTNVESSAEGAPPPGPAPPPATSHPRVIRISHQSVEPVVMMHMNIQDSGTQPGGVPSAPTGPLGPPGHGQTLGQQVPGFPTAPTRVVIARPTPPQARPSHPGGPPVSGTLGAGLGTNASLAQMVSGLVGQLLMQPVLVAQGTPGSPGGLGLESLSPEFFTSVVQGVLSSLLGSLGARAGSSESIAAFIQRLSGSSNIFEPGADGALGFFGALLSLLCQNFSMVDVVMLLHGHFQPLQRLQPQLRSFFHQHYLGGQEPTPSNIRMATHTLITGLEEYVRESFSLVQVQPGVDIIRTNLEFLQEQFNSIAAHVLHCTDSGFGARLLELCNQGLFECLALNLHCLGGQQMELAAVINGRIRRMSRGVNPSLVSWLTTMMGLRLQVVLEHMPVGPDAILRYVRRVGDPPQPLPEEPMEVQGAERASPEPQEWVPIIQQDIQSQRKVKPQPPLSDAYLSGMPAKRRKLRSDIQKRLQEDPNYSPQRFPNAQRAFADDP

SEQ ID NO: 33788 - protein, 1011 aa, Artificial Sequence
  Synthetic polypeptide
PGVVAPACNPSTLGRHGRGITCGQEFQSSLANMCRGGPQPQHSQPPPQPPAVTPEPVALSSQTSEPVESEAPPREPMEAEEVEERAPAQNPELTPGPAPAGPTPAPETNAPNHPSPAEYVEVLQELQRLESRLQPFLQRYYEVLGAAATTDYNNNHEGREEDQRLINLVGESLRLLGNTFVALSDLRCNLACTPPRHLHVVRPMSHYTTPMVLQQAAIPIQINVGTTVTMTGNGTRPPPTPNAEAPPPGPGQASSVAPSSTNVESSAEGAPPPGPAPPPATSHPRVIRISHQSVEPVVMMHMNIQDSGTQPGGVPSAPTGPLGPPGHGQTLGSTLIQLPSLPPEFMHAVAHQITHQAMVAAVASAAAGQQVPGFPTAPTRVVIARPTPPQARPSHPGGPPVSGTLQGAGLGTNASLAQMVSGLVGQLLMQPVLVAQGTPGMAPPPAPATASASAGTTNTATTAGPAPGGPAQPPPTPQPSMADLQFSQLLGNLLGPAGPGAGGSGVASPTITVAMPGVPAFLQGMTDFLQATQTAPPPPPPPPPPPPAPEQQTMPPPGSPSGGAGSPGGLGLESLSPEFFTSVVQGVLSSLLGSLGARAGSSESIAAFIQRLSGSSNIFEPGADGALGFFGALLSLLCQNFSMVDVVMLLHGHFQPLQRLQPQLRSFFHQHYLGGQEPTPSNIRMATHTLITGLEEYVRESFSLVQVQPGVDIIRTNLEFLQEQFNSIAAHVLHCTDSGFGARLLELCNQGLFECLALNLHCLGGQQMELAAVINGRIRRMSRGVNPSLVSWLTTMMGLRLQVVLEHMPVGPDAILRYVRRVGDPPQPLPEEPMEVQGAERASPEPQRENASPAPGTTAEEAMSRGPPPAPEGGSRDEQDGASAETEPWAAAVPPEWVPIIQQDIQSQRKVKPQPPLSDAYLSGMPAKRRKTMQGEGPQLLLSEAVSRAAKAAGARPLTSPESLSRDLEAPEVQESYRQQLRSDIQKRLQEDPNYSPQRFPNAQRAFADDP

SEQ ID NO: 33789 - protein, 926 aa, Artificial Sequence
  Synthetic polypeptide
PGVVAPACNPSTLGRHGRGITCGQEFQSSLANMCRGGPQPQHSQPPPQPPAVTPEPVALSSQTSEPVESEAPPREPMEAEEVEERAPAQNPELTPGPAPAGPTPAPETNAPNHPSPAEYVEVLQELQRLESRLQPFLQRYYEVLGAAATTDYNNNHEGREEDQRLINLVGESLRLLGNTFVALSDLRCNLACTPPRHLHVVRPMSHYTTPMVLQQAAIPIQINVGTTVTMTGNGTRPPPTPNAEAPPPGPGQASSVAPSSTNVESSAEGAPPPGPAPPPATSHPRVIRISHQSVEPVVMMHMNIQDSGTQPGGVPSAPTGPLGPPGHGQTLGQQVPGFPTAPTRVVIARPTPPQARPSHPGGPPVSGTLQGAGLGTNASLAQMVSGLVGQLLMQPVLVAQGTPGMAPPPAPATASASAGTTNTATTAGPAPGGPAQPPPTPQPSMADLQFSQLLGNLLGPAGPGAGGSGVASPTITVAMPGVPAFLQGMTDFLQATQTAPPPPPPPPPPPPAPEQQTMPPPGSPSGGAGSPGGLGLESLSPEFFTSVVQGVLSSLLGSLGARAGSSESIAAFIQRLSGSSNIFEPGADGALGFFGALLSLLCQNFSMVDVVMLLHGHFQPLQRLQPQLRSFFHQHYLGGQEPTPSNIRMATHTLITGLEEYVRESFSLVQVQPGVDIIRTNLEFLQEQFNSIAAHVLHCTDSGFGARLLELCNQGLFECLALNLHCLGGQQMELAAVINGRIRRMSRGVNPSLVSWLTTMMGLRLQVVLEHMPVGPDAILRYVRRVGDPPQPLPEEPMEVQGAERASPEPQRENASPAPGTTAEEAMSRGPPPAPEGGSRDEQDGASAETEPWAAAVPPEWVPIIQQDIQSQRKVKPQPPLSDAYLSGMPAKRRKLRSDIQKRLQEDPNYSPQRFPNAQRAFADDP

SEQ ID NO: 33790 - protein, 591 aa, Artificial Sequence
  Synthetic polypeptide
PGVVAPACNPSTLGRHGRGITCGQEFQSSLANMCRGGPQPQHSQPPPQPPAVTPEPVALSSQTSEPVESEAPPREPMEAEEVEERAPAQNPELTPGPAPAGPTPAPETNAPNHPSPAEYVEVLQELQRLESRLQPFLQRYYEVLGAAATTDYNNNHEGREEDQRLINLVGESLRLLGNTFVALSDLRCNLACTPPRHLHVVRPMSHYTTPMVLQQAAIPIQINVGTTVTMTGNGTRPPPTPNAEAPPPGPGQASSVAPSSTNVESSAEGAPPPGPAPPPATSHPRVIRISHQSVEPVVMMHMNIQDSGTQPGGVPSAPTGPLGPPGHGQTLGSTLIQLPSLPPEFMHAVAHQITHQAMVAAVASAAAGQQVPGFPTAPTRVVIARPTPPQARPSHPGGPPVSGTLQGAGLGTNASLAQMVSGLVGQLLMQPVLVAQGTPGMAPPPAPATASASAGTTNTATTAGPAPGGPAQPPPTPQPSMADLQFSQLLGNLLGPAGPGAGGSGVASPTITVAMPGVPAFLQGMTDFLQATQTAPPPPPPPPPPPPAPEQQTMPPPGSPSGGAGSPGGLGLESLSPEFFTSVVQGVLSSL

SEQ ID NO: 33791 - protein, 364 aa, Artificial Sequence
  Synthetic polypeptide
PGVVAPACNPSTLGRHGRGITCGQEFQSSLANMCRGGPQPQHSQPPPQPPAVTPEPVALSSQTSEPVESEAPPREPMEAEEVEERAPAQNPELTPGPAPAGPTPAPETNAPNHPSPAEYVEVLQELQRLESRLQPFLQRYYEVLGAAATTDYNNNHEGREEDQRLINLVGESLRLLGNTFVALSDLRCNLACTPPRHLHVVRPMSHYTTPMVLQQAAIPIQINVGTTVTMTGNGTRPPPTPNAEAPPPGPGQASSVAPSSTNVESSAEGAPPPGPAPPPATSHPRVIRISHQSVEPVVMMHMNIQDSGTQPGGVPSAPTGPLGPPGHGQTLGSTLIQLPSLPPEFMHAVAHQITHQAMVAAVAS

SEQ ID NO: 33792 - protein, 111 aa, Artificial Sequence
  Synthetic polypeptide
PGVVAPACNPSTLGRHGRGITCGQEFQSSLANMCRGGPQPQHSQPPPQPPAVTPEPVALSSQTSEPVESEAPPREPMEAEEVEERAPAQNPELTPGPAPAGPTPAPETNAP

SEQ ID NO: 33793 - protein, 110 aa, Artificial Sequence
  Synthetic polypeptide
PGVVAPACNPSTLGRHGRGITCGQEFQSSLANMCRGGPQPQHSQPPPQPPAVTPEPVALSSQTSEPVESEAPPREPMEAEEVEERAPAQNPELTPGPAPAGPTPAPETNA

SEQ ID NO: 33794 - protein, 108 aa, Artificial Sequence
  Synthetic polypeptide
PGVVAPACNPSTLGRHGRGITCGQEFQSSLANMCRGGPQPQHSQPPPQPPAVTPEPVALSSQTSEPVESEAPPREPMEAEEVEERAPAQNPELTPGPAPAGPTPAPET

SEQ ID NO: 33795 - protein, 107 aa, Artificial Sequence
  Synthetic polypeptide
PGVVAPACNPSTLGRHGRGITCGQEFQSSLANMCRGGPQPQHSQPPPQPPAVTPEPVALSSQTSEPVESEAPPREPMEAEEVEERAPAQNPELTPGPAPAGPTPAPE

SEQ ID NO: 33796 - protein, 82 aa, Artificial Sequence
  Synthetic polypeptide
PGVVAPACNPSTLGRHGRGITCGQEFQSSLANMCRGGPQPQHSQPPPQPPAVTPEPVALSSQTSEPVESEAPPREPMEAEEV

SEQ ID NO: 33797 - protein, 73 aa, Artificial Sequence
  Synthetic polypeptide
PGVVAPACNPSTLGRHGRGITCGQEFQSSLANMCRGGPQPQHSQPPPQPPAVTPEPVALSSQTSEPVESEAPP

SEQ ID NO: 33798 - protein, 25 aa, Artificial Sequence
  Synthetic polypeptide
RVVRSSNPAWPTCVEEGPNRSTVSR

SEQ ID NO: 33799 - protein, 37 aa, Artificial Sequence
  Synthetic polypeptide
SQHFGSPWQGDNVWSGVPIQPGQHVSRRAPTAAQSAA

SEQ ID NO: 33800 - protein, 46 aa, Artificial Sequence
  Synthetic polypeptide
PGVVAPACNPSTLGRHGRGITCGQEFQSSLANMCRGGPQPQHSQPP

SEQ ID NO: 33801 - protein, 45 aa, Artificial Sequence
  Synthetic polypeptide
TEIRSSYSSAEIPLVSLFLSIGNPLNHFHSPNTCAATDASWRPRS

SEQ ID NO: 33802 - protein, 37 aa, Artificial Sequence
  Synthetic polypeptide
RPTSRRPPLLTQMQCAAMAIFYKQKSDQVTPLPKSLW

SEQ ID NO: 33803 - protein, 136 aa, Artificial Sequence
  Synthetic polypeptide
PKCNVQPWQSFINRNPIKLLLCRNPSGKFVPVNWEPPQPLPFPKYLRCYRCLLETKELGCLLGSDICLTPAGSSCITLHKKNSSGSDVMVSDCRSKEQMSDCSNTRTSPVSGFWIFSQYCFLDFCNDPQNRGLYTP

SEQ ID NO: 33804 - protein, 15 aa, Artificial Sequence
  Synthetic polypeptide
TEIRSSYSSAEIPLV

SEQ ID NO: 33805 - protein, 27 aa, Artificial Sequence
  Synthetic polypeptide
PKCNVQPWQSFINRNPIKLLLCRNPSG

SEQ ID NO: 33806 - protein, 447 aa, Artificial Sequence
  Synthetic polypeptide
GEVVHAYNPSTFGSQGRRIASAQELETSLGNIRQLANYNFDFRSWPVDFHWEEPSSRKESRGGPSRRGVALLRPEPLHRGTADTLLNRVKKLPCQITSYLVAHTLGRRMLYPGSVYLLQKALMPVLLQGQARLVEECNGRRAKLLACDGNEIDTMFVDRRGTAEPQGQKLVICCEGNAGFYEVGCVSTPLEAGYSVLGWNHPGFAGSTGVPFPQNEANAMDVVVQFAIHRLGFQPQDIIIYAWSIGGFTATWAAMSYPDVSAMILDASFDDLVPLALKVMPDSWRGLVTRTVRQHLNLNNAEQLCRYQGPVLLIRRTKDEIITTTVPEDIMSNRGNDLLLKLLQHRYPRVMAEEGLRVVRQWLEASSQLEEASIYSRWEVEEDWCLSVLRSYQAEHGPDFPWSVGEDMSADGRRQLALFLARKHLHNFEATHCTPLPAQNFQMPWHL

SEQ ID NO: 33807 - protein, 32 aa, Artificial Sequence
  Synthetic polypeptide
SQHFRKPRQEDRFSPGVGDQPGQHKAACQLQL

SEQ ID NO: 33808 - protein, 124 aa, Artificial Sequence
  Synthetic polypeptide
GEVVHAYNPSTFGSQGRRIASAQELETSLGNIRQLANYNFDFRSWPVDFHWEEPSSRKESRGGPSRRGVALLRPEPLHRGTADTLLNRVKKLPCQITRWETAARRGPLGWRGHFRSALGVGAPL

SEQ ID NO: 33809 - protein, 17 aa, Artificial Sequence
  Synthetic polypeptide
PYNFEQSFHLSIWRRDS

SEQ ID NO: 33810 - protein, 59 aa, Artificial Sequence
  Synthetic polypeptide
RIGSCLRTVITLDPDYLSTNPTSRIILSNHFTSLSGEGTPESPEGFRQLLNIPPPRRSG

SEQ ID NO: 33811 - protein, 120 aa, Artificial Sequence
  Synthetic polypeptide
AIISPLYLEKGLLKALKVLDNYLTSPLPEEVDETSAEDEGVSQRKFLDGNELTLADCNLLPKLHIVQVVCKKYRGFTIPEAFRGVHRYLSNAYAREEFASTCPDDEEIELAYEQVAKALK

SEQ ID NO: 33812 - protein, 926 aa, Artificial Sequence
  Synthetic polypeptide
LDVVSEVEALTEQLSEEEEEEEEEEEEEEEEEEEEEEEEDEESGNQSDRSGSSGRRKAKKKWRKDSPWVKPSRKRRKREPPRAKEPRGVNGVGSSGPSEYMEVPLGSLELPSEGTLSPNHAGVSNDTSSLETERGFEELPLCSCRMEAPKIDRISERAGHKCMATESVDGELSGCNAAILKRETMRPSSRVALMVLCETHRARMVKHHCCPGCGYFCTAGTFLECHPDFRVAHRFHKACVSQLNGMVFCPHCGEDASEAQEVTIPRGDGVTPPAGTAAPAPPPLSQDVPGRADTSQPSARMRGHGEPRRPPCDPLADTIDSSGPSLTLPNGGCLSAVGLPLGPGREALEKALVIQESERRKKLRFHPRQLYLSVKQGELQKVILMLLDNLDPNFQSDQQSKRTPLHAAAQKGSVEICHVLLQAGANINAVDKQQRTPLMEAVVNNHLEVARYMVQRGGCVYSKEEDGSTCLHHAAKIGNLEMVSLLLSTGQVDVNAQDSGGWTPIIWAAEHKHIEVIRMLLTRGADVTLTDNEENICLHWASFTGSAAIAEVLLNARCDLHAVNYHGDTPLHIAARESYHDCVLLFLSRGANPELRNKEGDTAWDLTPERSDVWFALQLNRKLRLGVGNRAIRTEKIICRDVARGYENVPIPCVNGVDGEPCPEDYKYISENCETSTMNIDRNITHLQHCTCVDDCSSSNCLCGQLSIRCWYDKDGRLLQEFNKIEPPLIFECNQACSCWRNCKNRVVQSGIKVRLQLYRTAKMGWGVRALQTIPQGTFICEYVGELISDAEADVREDDSYLFDLDNKDGEVYCIDARYYGNISRFINHLCDPNIIPVRVFMLHQDLRFPRIAFFSSRDIRTGEELGFDYGDRFWDIKSKYFTCQCGSEKCKHSAEAIALEQSRLARLDPHPELLPELGSLPPVNT

SEQ ID NO: 33813 - protein, 20 aa, Artificial Sequence
  Synthetic polypeptide
STWRNPVSTEKNTKLAGRSV

SEQ ID NO: 33814 - protein, 892 aa, Artificial Sequence
  Synthetic polypeptide
LDVVSEVEALTEQLSEEEEEEEEEEEEEEEEEEEEEEEEDEESGNQSDRSGSSGRRKAKKKWRKDSPWVKPSRKRRKREPPRAKEPRGVSNDTSSLETERGFEELPLCSCRMEAPKIDRISERAGHKCMATESVDGELSGCNAAILKRETMRPSSRVALMVLCETHRARMVKHHCCPGCGYFCTAGTFLECHPDFRVAHRFHKACVSQLNGMVFCPHCGEDASEAQEVTIPRGDGVTPPAGTAAPAPPPLSQDVPGRADTSQPSARMRGHGEPRRPPCDPLADTIDSSGPSLTLPNGGCLSAVGLPLGPGREALEKALVIQESERRKKLRFHPRQLYLSVKQGELQKVILMLLDNLDPNFQSDQQSKRTPLHAAAQKGSVEICHVLLQAGANINAVDKQQRTPLMEAVVNNHLEVARYMVQRGGCVYSKEEDGSTCLHHAAKIGNLEMVSLLLSTGQVDVNAQDSGGWTPIIWAAEHKHIEVIRMLLTRGADVTLTDNEENICLHWASFTGSAAIAEVLLNARCDLHAVNYHGDTPLHIAARESYHDCVLLFLSRGANPELRNKEGDTAWDLTPERSDVWFALQLNRKLRLGVGNRAIRTEKIICRDVARGYENVPIPCVNGVDGEPCPEDYKYISENCETSTMNIDRNITHLQHCTCVDDCSSSNCLCGQLSIRCWYDKDGRLLQEFNKIEPPLIFECNQACSCWRNCKNRVVQSGIKVRLQLYRTAKMGWGVRALQTIPQGTFICEYVGELISDAEADVREDDSYLFDLDNKDGEVYCIDARYYGNISRFINHLCDPNIIPVRVFMLHQDLRFPRIAFFSSRDIRTGEELGFDYGDRFWDIKSKYFTCQCGSEKCKHSAEAIALEQSRLARLDPHPELLPELGSLPPVNT

SEQ ID NO: 33815 - protein, 15 aa, Artificial Sequence
  Synthetic polypeptide
WGRGPCVPGSAFCHG

SEQ ID NO: 33816 - protein, 70 aa, Artificial Sequence
  Synthetic polypeptide
GAGGLVCRALLSVMDDHNVDSFISLSSPQMGQYGDTDYLKWLFPTSMRSNLYRICYSPWGQEFSICNYWH

SEQ ID NO: 33817 - protein, 38 aa, Artificial Sequence
  Synthetic polypeptide
GQGALCAGLCFLSWMITTWILSSPSPLHRWDSMETRTT

SEQ ID NO: 33818 - protein, 192 aa, Artificial Sequence
  Synthetic polypeptide
GAGGLVCRALLSVMDDHNVDSFISLSSPQMGQYGDTDYLKWLFPTSMRSNLYRICYSPWGQEFSICNYWHDPHHDDLYLNASSFLALINGERDHPNATVWRKNFLRVGHLVLIGGPDDGVITPWQSSFFGFYDANETVLEMEEQLVYLRDSFGLKTLLARGAIVRCPMAGISHTAWHSNRTLYETCIEPWLS

SEQ ID NO: 33819 - protein, 191 aa, Artificial Sequence
  Synthetic polypeptide
GAGGLVCRALLSVMDDHNVDSFISLSSPQMGQYGDTDYLKWLFPTSMRSNLYRICYSPWGQEFSICNYWHDPHHDDLYLNASSFLALINGERDHPNATVWRKNFLRVGHLVLIGGPDDGVITPWQSSFFGFYDANETVLEMEEQLPARPTHQSELLLLRLVCLKPPRRKKPACRVQRQSESWGPGLSCALS

SEQ ID NO: 33820 - protein, 39 aa, Artificial Sequence
  Synthetic polypeptide
GAGGLVCRALLSVMDDHNVDSFISLSSPQMGQYGDTDYL

SEQ ID NO: 33821 - protein, 25 aa, Artificial Sequence
  Synthetic polypeptide
GASLPGRPSSEMWGAPLPRRPVWEK

SEQ ID NO: 33822 - protein, 65 aa, Artificial Sequence
  Synthetic polypeptide
EVRSASSRPPSHLGSEERLCPAAHRLRCGERLCPAAPSGRNNFGCHPDSTGTCHPGYFVNKMGTM

SEQ ID NO: 33823 - protein, 477 aa, Artificial Sequence
  Synthetic polypeptide
DVGSASAPPPRLGEITLAVILTLLGLAILAILLTRWARCKQSEMYISRYSSEQSARLLDYEDGRGSRHAYSTQSERSKRDYTPSTNSLALSRSSIALPQGSMSSIKCLQTTEEPPSRTAGAMMQFTAPIPGATGPIKLSQKTIVQTPGPIVQYPGSNAGPPSAPRGPPMAPIIISQRTASQLAAPIIISQRTARIPQVHTMDSSGKITLTPVVILTGYMDEELAKKSCSKIQILKCGGTARSQNSREENKEALKNDIIFTNSVESLKSAHIKEPEREGKGTDLEKDKIGMEVKVDSDAGIPKRQETQLKISEMSIPQGQGAQIKKSVSDVPRGQESQVKKSESGVPKGQEAQVTKSGLVVLKGQEAQVEKSEMGVPRRQESQVKKSQSGVSKGQEAQVKKRESVVLKGQEAQVEKSELKVPKGQEGQVEKTEADVPKEQEVQEKKSEAGVLKGPESQVKNTECFRNKDTLIYHHPEA

SEQ ID NO: 33824 - protein, 572 aa, Artificial Sequence
  Synthetic polypeptide
DVGSASAPPPRLGEITLAVILTLLGLAILAILLTRWARCKQSEMYISRYSSEQSARLLDYEDGRGSRHAYSTQSDTSYDNRERSKRDYTPSTNSLVSMASKFSLGQTELILLLMCFILALSRSSIGSIKCLQTTEEPPSRTAGAMMQFTAPIPGATGPIKLSQKTIVQTPGPIVQYPGSNAGPPSAPRGPPMAPIIISQRTARIPQVHTMDSSGKITLTPVVILTGYMDEELAKKSCSKIQILKCGGTARSQNSREENKEALKNDIIFTNSVESLKSAHIKEPEREGKGTDLEKDKIGMEVKVDSDAGIPKRQETQLKISEMSIPQGQGAQIKKSVSDVPRGQESQVKKSESGVPKGQEAQVTKSGLVVLKGQEAQVEKSEMGVPRRQESQVKKSQSGVSKGQEAQVKKRESVVLKGQEAQVEKSELKVPKGQEGQVEKTEADVPKEQEVQEKKSEAGVLKGPESQVKNTEVSVPETLESQVKKSESGVLKGQEAQEKKESFEDKGNNDKEKERDAEKDPNKKEKGDKNTKGDKGKDKVKGKRESEINGEKSKGSKRAKANTGRKYNKKVEE

SEQ ID NO: 33825 - protein, 571 aa, Artificial Sequence
  Synthetic polypeptide
DVGSASAPPPRLGEITLAVILTLLGLAILAILLTRWARCKQSEMYISRYSSEQSARLLDYEDGRGSRHAYSTQSDTSYDNRERSKRDYTPSTNSLALSRSSIALPQGSMSSIKCLQTTEEPPSRTAGAMMQFTAPIPGATGPIKLSQKTIVQTPGPIVQYPGSNVRSHPHTITGPPSAPRGPPMAPIIISQRTASQLAAPIRIPQVHTMDSSGKITLTPVVILTGYMDEELAKKSCSKIQILKCGGTARSQNSREENKEALKNDIIFTNSVESLKSAHIKEPEREGKGTDLEKDKIGMEVKVDSDAGIPKRQETQLKISEMSIPQGQGAQIKKSVSDVPRGQESQVKKSESGVPKGQEAQVTKSGLVVLKGQEAQVEKSEMGVPRRQESQVKKSQSGVSKGQEAQVKKRESVVLKGQEAQVEKSELKVPKGQEGQVEKTEADVPKEQEVQEKKSEAGVLKGPESQVKNTEVSVPETLESQVKKSESGVLKGQEAQEKKESFEDKGNNDKEKERDAEKDPNKKEKGDKNTKGDKGKDKVKGKRESEINGEKSKGSKRAKANTGRKYNKKVEE

SEQ ID NO: 33826 - protein, 570 aa, Artificial Sequence
  Synthetic polypeptide
DVGSASAPPPRLGEITLAVILTLLGLAILAILLTRWARCKQSEMYISRYSSEQSARLLDYEDGRGSRHAYSTQSDTSYDNRERSKRDYTPSTNSLALSRSSIALPQGSMSSIKCLQTTEEPPSRTAGAMMQFTAPIPGATGPIKLSQKTIVQTPGPIVQYPGSNAGPPSAPRGPPMAPIIISQRTASQLAAPIIISQRTARIPQVHTMDSSGKITLTPVVILTGYMDEELAKKSCSKIQILKCGGTARSQNSREENKEALKNDIIFTNSVESLKSAHIKEPEREGKGTDLEKDKIGMEVKVDSDAGIPKRQETQLKISEMSIPQGQGAQIKKSVSDVPRGQESQVKKSESGVPKGQEAQVTKSGLVVLKGQEAQVEKSEMGVPRRQESQVKKSQSGVSKGQEAQVKKRESVVLKGQEAQVEKSELKVPKGQEGQVEKTEADVPKEQEVQEKKSEAGVLKGPESQVKNTEVSVPETLESQVKKSESGVLKGQEAQEKKESFEDKGNNDKEKERDAEKDPNKKEKGDKNTKGDKGKDKVKGKRESEINGEKSKGSKRAKANTGRKYNKKVEE

SEQ ID NO: 33827 - protein, 556 aa, Artificial Sequence
  Synthetic polypeptide
DVGSASAPPPRLGEITLAVILTLLGLAILAILLTRWARCKQSEMYISRYSSEQSARLLDYEDGRGSRHAYSTQSERSKRDYTPSTNSLALSRSSIALPQGSMSSIKCLQTTEEPPSRTAGAMMQFTAPIPGATGPIKLSQKTIVQTPGPIVQYPGSNAGPPSAPRGPPMAPIIISQRTASQLAAPIRIPQVHTMDSSGKITLTPVVILTGYMDEELAKKSCSKIQILKCGGTARSQNSREENKEALKNDIIFTNSVESLKSAHIKEPEREGKGTDLEKDKIGMEVKVDSDAGIPKRQETQLKISEMSIPQGQGAQIKKSVSDVPRGQESQVKKSESGVPKGQEAQVTKSGLVVLKGQEAQVEKSEMGVPRRQESQVKKSQSGVSKGQEAQVKKRESVVLKGQEAQVEKSELKVPKGQEGQVEKTEADVPKEQEVQEKKSEAGVLKGPESQVKNTEVSVPETLESQVKKSESGVLKGQEAQEKKESFEDKGNNDKEKERDAEKDPNKKEKGDKNTKGDKGKDKVKGKRESEINGEKSKGSKRAKANTGRKYNKKVEE

SEQ ID NO: 33828 - protein, 570 aa, Artificial Sequence
  Synthetic polypeptide
DVGSASAPPPRLGEITLAVILTLLGLAILAILLTRWARCKQSEMYISRYSSEQSARLLDYEDGRGSRHAYSTQSGNLCFQRSKRDYTPSTNSLVSMASKFSLGQTELILLLMCFILALSRSSIGSIKCLQTTEEPPSRTAGAMMQFTAPIPGATGPIKLSQKTIVQTPGPIVQYPGSNAGPPSAPRGPPMAPIIISQRTARIPQVHTMDSSGKITLTPVVILTGYMDEELAKKSCSKIQILKCGGTARSQNSREENKEALKNDIIFTNSVESLKSAHIKEPEREGKGTDLEKDKIGMEVKVDSDAGIPKRQETQLKISEMSIPQGQGAQIKKSVSDVPRGQESQVKKSESGVPKGQEAQVTKSGLVVLKGQEAQVEKSEMGVPRRQESQVKKSQSGVSKGQEAQVKKRESVVLKGQEAQVEKSELKVPKGQEGQVEKTEADVPKEQEVQEKKSEAGVLKGPESQVKNTEVSVPETLESQVKKSESGVLKGQEAQEKKESFEDKGNNDKEKERDAEKDPNKKEKGDKNTKGDKGKDKVKGKRESEINGEKSKGSKRAKANTGRKYNKKVEE

SEQ ID NO: 33829 - protein, 141 aa, Artificial Sequence
  Synthetic polypeptide
DVGSASAPPPRLGEITLAVILTLLGLAILAILLTRWARCKQSEMYISRYSSEQSARLLDYEDGRDFSSQRSKRGRGSRHAYSTQSERSKRDYTPSTNSLALSRSSIALPQGSMSSIKCLQTTEEPPSRTAGAMMQFTAPIP

SEQ ID NO: 33830 - protein, 134 aa, Artificial Sequence
  Synthetic polypeptide
DVGSASAPPPRLGEITLAVILTLLGLAILAILLTRWARCKQSEMYISRYSSEQSARLLDYEDGRGSRHAYSTQSDTSYDNRERSKRDYTPSTNSLVSMASKFSLGQTELILLLMCFILALSRSSIALPQGSMMQ

SEQ ID NO: 33831 - protein, 237 aa, Artificial Sequence
  Synthetic polypeptide
TCPVHKNHSADHVASCGVNLYQFYGPSGQYTHEFDGDEQFYVDLERKETAWRWPEFSKFGGFDPQGALRNMAVAKHNLNIMIKRYNSTAATNEVPEVTVFSKSPVTLGQPNTLICLVDNIFPPVVNITWLSNGQSVTEGVSETSFLSKSDHSFFKISYLTFLPSADEIYDCKVEHWGLDQPLLKHWEPEIPAPMSELTETVVCALGLSVGLMGIVVGTVFIIQGLRSVGASRHQGPL

SEQ ID NO: 33832 - protein, 18 aa, Artificial Sequence
  Synthetic polypeptide
EPAQYIKTTQLTTLPLVV

SEQ ID NO: 33833 - protein, 4 aa, Artificial Sequence
  Synthetic polypeptide
KPLS

SEQ ID NO: 33834 - protein, 196 aa, Artificial Sequence
  Synthetic polypeptide
TCPVHKNHSADHVASCGVNLYQFYGPSGQYTHEFDGDEQFYVDLERKETAWRWPEFSKFGGFDPQGALRNMAVAKHNLNIMIKRYNSTAATNEVPEVTVFSKSPVTLGQPNTLICLVDNIFPPVVNITWLSNGQSVTEGVSETSFLSKSDHSFFKISYLTFLPSADEIYDCKVEHWGLDQPLLKHWGASPSTGAEE

SEQ ID NO: 33835 - protein, 19 aa, Artificial Sequence
  Synthetic polypeptide
KDAWHNGPCVNLCRVCTDA

SEQ ID NO: 33836 - protein, 247 aa, Artificial Sequence
  Synthetic polypeptide
GYCDNSASEICKVFRRMPGTTDHVSTYAAFVQTHRPTGEFMFEFDEDEMFYVDLDKKETVWHLEEFGQAFSFEAQGGLANIAILNNNLNTLIQRSNHTQATNDPPEVTVFPKEPVELGQPNTLICHIDKFFPPVLNVTWLCNGELVTEGVAESLFLPRTDYSFHKFHYLTFVPSAEDFYDCRVEHWGLDQPLLKHWEAQEPIQMPETTETVLCALGLVLGLVGIIVGTVLIIKSLRSGHDPRAQGTL

SEQ ID NO: 33837 - protein, 103 aa, Artificial Sequence
  Synthetic polypeptide
YVTSLHFLTCKMYDMYLLHRVIVTIQRVKYVKYLEGCLAQRTMCQLMPRLYRRIDQQGSLCLNLMKMRCSMWIWTRRRPSGIWRSLAKPFPLRLRAGWLTLLY

SEQ ID NO: 33838 - protein, 196 aa, Artificial Sequence
  Synthetic polypeptide
GYCDNSASEICKVFRRMPGTTDHVSTYAAFVQTHRPTGEFMFEFDEDEMFYVDLDKKETVWHLEEFGQAFSFEAQGGLANIAILNNNLNTLIQRSNHTQATNDPPEVTVFPKEPVELGQPNTLICHIDKFFPPVLNVTWLCNGELVTEGVAESLFLPRTDYSFHKFHYLTFVPSAEDFYDCRVEHWGLDQPLLKHW

SEQ ID NO: 33839 - protein, 48 aa, Artificial Sequence
  Synthetic polypeptide
ICVRLHLACRRVVLGSRNHCNLGSWISLLMNSSWMKWMFTFRQIWRMS

SEQ ID NO: 33840 - protein, 25 aa, Artificial Sequence
  Synthetic polypeptide
DCTWHAGGWSWAPGTTATWGVGYHF

SEQ ID NO: 33841 - protein, 704 aa, Artificial Sequence
  Synthetic polypeptide
MNMCKIAPGMQAGGPGLQEPLQLGELDITSDEFILDEVDVHIQANLEDELVKEALKTGVDLRHYSKQVELELQQIEQKSIRDYIQESENIASLHNQITACDAVLERMEQMLGAFQSDLSSISSEIRTLQEQSGAMNIRLRNRQAVRGKLGELVDGLVVPSALVTAILEAPVTEPRFLEQLQELDAKAAAVREQEARGTAACADVRGVLDRLRVKAVTKIREFILQKIYSFRKPMTNYQIPQTALLKYRFFYQFLLGNERATAKEIRDEYVETLSKIYLSYYRSYLGRLMKVQYEEVAEKDDLMGVEDTAKKGFFSKPSLRSRNTIFTLGTRGSVISPTELEAPILVPHTAQRGEQRYPFEALFRSQHYALLDNSCREYLFICEFFVVSGPAAHDLFHAVMGRTLSMTLKHLDSYLADCYDAIAVFLCIHIVLRFRNIAAKRDVPALDRYWEQVLALLWPRFELILEMNVQSVRSTDPQRLGGLDTRPHYITRRYAEFSSALVSINQTIPNERTMQLLGQLQVEVENFVLRVAAEFSSRKEQLVFLINNYDMMLGVLMERAADDSKEVESFQQLLNARTQEFIEELLSPPFGGLVAFVKEAEALIERGQAERLRGEEARVTQLIRGFGSSWKSSVESLSQDVMRSFTNFRNGTSIIQGALTQLIQLYHRFHRVLSQPQLRALPARAELINIHHLMVELKKHKPNF

SEQ ID NO: 33842 - protein, 733 aa, Artificial Sequence
  Synthetic polypeptide
RLRTWPLKPDCLSSISATYTLCALGQVNQLLCAIISHTFKAGGPGLQEPLQLGELDITSDEFILDEVDVHIQANLEDELVKEALKTGVDLRHYSKQVELELQQIEQKSIRDYIQESENIASLHNQITACDAVLERMEQMLGAFQSDLSSISSEIRTLQEQSGAMNIRLRNRQAVRGKLGELVDGLVVPSALVTAILEAPVTEPRFLEQLQELDAKAAAVREQEARGTAACADVRGVLDRLRVKAVTKIREFILQKIYSFRKPMTNYQIPQTALLKYRFFYQFLLGNERATAKEIRDEYVETLSKIYLSYYRSYLGRLMKVQYEEVAEKDDLMGVEDTAKKGFFSKPSLRSRNTIFTLGTRGSVISPTELEAPILVPHTAQRGEQRYPFEALFRSQHYALLDNSCREYLFICEFFVVSGPAAHDLFHAVMGRTLSMTLKHLDSYLADCYDAIAVFLCIHIVLRFRNIAAKRDVPALDRYWEQVLALLWPRFELILEMNVQSVRSTDPQRLGGLDTRPHYITRRYAEFSSALVSINQTIPNERTMQLLGQLQVEVENFVLRVAAEFSSRKEQLVFLINNYDMMLGVLMERAADDSKEVESFQQLLNARTQEFIEELLSPPFGGLVAFVKEAEALIERGQAERLRGEEARVTQLIRGFGSSWKSSVESLSQDVMRSFTNFRNGTSIIQGALTQLIQLYHRFHRVLSQPQLRALPARAELINIHHLMVELKKHKPNF

SEQ ID NO: 33843 - protein, 66 aa, Artificial Sequence
  Synthetic polypeptide
VLSLPLTRCVPLGKLTSFSVPSFLTPLRRVVLGSRNHCNLGSWISLLMNSSWMKWMFTFRQIWRMS

SEQ ID NO: 33844 - protein, 31 aa, Artificial Sequence
  Synthetic polypeptide
GRARWLMPVTPALWEAEVNQCVIGTAQANRK

SEQ ID NO: 33845 - protein, 8 aa, Artificial Sequence
  Synthetic polypeptide
PQHFGRLR

SEQ ID NO: 33846 - protein, 2451 aa, Artificial Sequence
  Synthetic polypeptide
GRAQWLMPVILALWEAEGDVVRLFHAEQEKFLTCDEYKGKLQVFLRTTLRQSATSATSSNALWEVEVVHHDPCRGGAGHWNGLYRFKHLATGNYLAAEENPSYKGDASDPKAAGMGAQGRTGRRNAGEKIKYCLVAVPHGNDIASLFELDPTTLQKTDSFVPRNSYVRLRHLCTNTWIQSTNVPIDIEEERPIRLMLGTCPTKEDKEAFAIVSVPVSEIRDLDFANDASSMLASAVEKLNEGFISQNDRRFVIQLLEDLVFFVSDVPNNGQNVLDIMVTKPNRERQKLMREQNILKQVFGILKAPFREKGGEGPLVRLEELSDQKNAPYQHMFRLCYRVLRHSQEDYRKNQEHIAKQFGMMQSQIGYDILAEDTITALLHNNRKLLEKHITKTEVETFVSLVRKNREPRFLDYLSDLCVSNHIAIPVTQELICKCVLDPKNSDILIRTELRPVKEMAQSHEYLSIEYSEEEVWLTWTDKNNEHHEKSVRQLAQEARAGNAHDENVLSYYRYQLKLFARMCLDRQYLAIDEISQQLGVDLIFLCMADEMLPFDLRASFCHLMLHVHVDRDPQELVTPVKFARLWTEIPTAITIKDYDSNLNASRDDKKNKFANTMEFVEDYLNNVVSEAVPFANEEKNKLTFEVVSLAHNLIYFGFYSFSELLRLTRTLLGIIDCVQGPPAMLQAYEDPGGKNVRRSIQGVGHMMSTMVLSRKQSVFSAPSLSAGASAAEPLDRSKFEENEDIVVMETKLKILEILQFILNVRLDYRISYLLSVFKKEFVEVFPMQDSGADGTAPAFDSTTANMNLDRIGEQAEAMFGVGKTSSMLEVDDEGGRMFLRVLIHLTMHDYAPLVSGALQLLFKHFSQRQEAMHTFKQVQLLISAQDVENYKVIKSELDRLRTMVEKSELWVDKKGSGKGEEVEAGAAKDKKERPTDEEGFLHPPGEKSSENYQIVKGILERLNKMCGVGEQMRKKQQRLLKNMDAHKVMLDLLQIPYDKGDAKMMEILRYTHQFLQKFCAGNPGNQALLHKHLHLFLTPGLLEAETMQHIFLNNYQLCSEISEPVLQHFVHLLATHGRHVQYLDFLHTVIKAEGKYVKKCQDMIMTELTNAGDDVVVFYNDKASLAHLLDMMKAARDGVEDHSPLMYHISLVDLLAACAEGKNVYTEIKCTSLLPLEDVVSVVTHEDCITEVKMAYVNFVNHCYVDTEVEMKEIYTSNHIWTLFENFTLDMARVCSKREKRVADPTLEKYVLSVVLDTINAFFSSPFSENSTSLQTHQTIVVQLLQSTTRLLECPWLQQQHKGSVEACIRTLAMVAKGRAILLPMDLDAHISSMLSSGASCAAAAQRNASSYKATTRAFPRVTPTANQWDYKNIIEKLQDIITALEERLKPLVQAELSVLVDVLHWPELLFLEGSEAYQRCESGGFLSKLIQHTKDLMESEEKLCIKVLRTLQQMLLKKTKYGDRGNQLRKMLLQNYLQNRKSTSRGDLPDPIGTGLDPDWSAIAATQCRLDKEGATKLVCDLITSTKNEKIFQESIGLAIHLLDGGNTEIQKSFHNLMMSDKKSERFFKVLHDRMKRAQQETKSTVAVNMNDLGSQPHEDREPVDPTTKGRVASFSIPGSSSRYSLGPSLRRGHEVSERVQSSEMGTSVLIMQPILRFLQLLCENHNRDLQNFLRCQNNKTNYNLVCETLQFLDIMCGSTTGGLGLLGLYINEDNVGLVIQTLETLTEYCQGPCHENQTCIVTHESNGIDIITALILNDISPLCKYRMDLVLQLKDNASKLLLALMESRHDSENAERILISLRPQELVDVIKKAYLQEEERENSEVSPREVGHNIYILALQLSRHNKQLQHLLKPVKRIQEEEAEGISSMLSLNNKQLSQMLKSSAPAQEEEEDPLAYYENHTSQIEIVRQDRSMEQIVFPVPGICQFLTEETKHRLFTTTEQDEQGSKVSDFFDQSSFLHNEMEWQRKLRSMPLIYWFSRRMTLWGSISFNLAVFINIIIAFFYPYMEGASTGVLDSPLISLLFWILICFSIAALFTKRYSIRPLIVALILRSIYYLGIGPTLNILGALNLTNKIVFVVSFVGNRGTFIRGYKAMVMDMEFLYHVGYILTSVLGLFAHELFYSILLFDLIYREETLFNVIKSVTRNGRSILLTALLALILVYLFSIVGFLFLKDDFILEVDRLPNNHSTASPLGMPHGAAAFVDTCSGDKMDCVSGLSVPEVLEEDRELDSTERACDTLLMCIVTVMNHGLRNGGGVGDILRKPSKDESLFPARVVYDLLFFFIVIIIVLNLIFGVIIDTFADLRSEKQKKEEILKTTCFICGLERDKFDNKTVSFEEHIKLEHNMWNYLYFIVLVRVKNKTDYTGPESYVAQMIKNKNLDWFPRMRAMSLVSNEGEGEQNEIRILQDKLNSTMKLVSHLTAQLNELKEQMTEQRKRRQRLGFVDVQNCISR

SEQ ID NO: 33847 - protein, 20 aa, Artificial Sequence
  Synthetic polypeptide
HFGKLRETWCGCSMRSRRSS

SEQ ID NO: 33848 - protein, 30 aa, Artificial Sequence
  Synthetic polypeptide
NKADCSSGNWNEDELQTAGKVPGHPGRAAE

SEQ ID NO: 33849 - protein, 41 aa, Artificial Sequence
  Synthetic polypeptide
LRIRLTAPLEIGMRMNSRQLEKYPATLEGLLSEMLPQHAAK

SEQ ID NO: 33850 - protein, 40 aa, Artificial Sequence
  Synthetic polypeptide
LRIRLTAPLEIGMRMNSRQLEKYPATLEGLLSEMLPQHAK

SEQ ID NO: 33851 - protein, 33 aa, Artificial Sequence
  Synthetic polypeptide
NKADCSSGNWNEDELQTAGKVPGHPGRAADSQV

SEQ ID NO: 33852 - protein, 34 aa, Artificial Sequence
  Synthetic polypeptide
LRIRLTAPLEIGMRMNSRQLEKYPATLEGLLTAK

SEQ ID NO: 33853 - protein, 10 aa, Artificial Sequence
  Synthetic polypeptide
SSSFIFRCYS

SEQ ID NO: 33854 - protein, 64 aa, Artificial Sequence
  Synthetic polypeptide
NMSHPLEWKITSVSEDVEKLDTSYIAGGNAEWLSCCGSLVGPQKLKCRIMFDPAVSFLGATREQ

SEQ ID NO: 33855 - protein, 58 aa, Artificial Sequence
  Synthetic polypeptide
GQAQWLMPVIPALWEAEAGGSLEVRSSRPAWPACWCRQESRGWGWVSNRIPVCATREQ

SEQ ID NO: 33856 - protein, 177 aa, Artificial Sequence
  Synthetic polypeptide
SQHFGRPRQVDHLRSGVQDQPGQHAGADKKAEAGAGSATEFQFVLLVSSSRHPDRWIVPGGGMEPEEEPSVAAVREVCEEAGVKGTLGRLVGIFENQERKHRTYVYVLIVTEVLEDWEDSVNIGRKREWFKIEDAIKVLQYHKPVQASYFETLRQGYSANNGTPVVATTYSVSAQSS

SEQ ID NO: 33857 - protein, 33 aa, Artificial Sequence
  Synthetic polypeptide
GQEFKTSLASMLVPTRKPRLGLGQQPNSSLCYS

SEQ ID NO: 33858 - protein, 73 aa, Artificial Sequence
  Synthetic polypeptide
GQAQWLMPVIPALWEAEAGGSLEVRSSRPAWPACWCRQESRGWGWVSNRIPVCPHSTRLLSDNVICKKEACTV

SEQ ID NO: 33859 - protein, 63 aa, Artificial Sequence
  Synthetic polypeptide
SQHFGRPRQVDHLRSGVQDQPGQHAGADKKAEAGAGSATEFQFVLIAHDCSQIMSFVKRKHVQ

SEQ ID NO: 33860 - protein, 32 aa, Artificial Sequence
  Synthetic polypeptide
GQEFKTSLASMLVPTRKPRLGLGQQPNSSLSS

SEQ ID NO: 33861 - protein, 52 aa, Artificial Sequence
  Synthetic polypeptide
GQAQWLMPVIPALWEAEAGGSLEVRSSRPAWPACWCRQESRGWGWVSNRIPV

SEQ ID NO: 33862 - protein, 56 aa, Artificial Sequence
  Synthetic polypeptide
SQHFGRPRQVDHLRSGVQDQPGQHAGADKKAEAGAGSATEFQFRGGFGRGRGQPPQ

SEQ ID NO: 33863 - protein, 43 aa, Artificial Sequence
  Synthetic polypeptide
GQEFKTSLASMLVPTRKPRLGLGQQPNSSLEADLVVDVVSHLS

SEQ ID NO: 33864 - protein, 158 aa, Artificial Sequence
  Synthetic polypeptide
VRHGGVPAVPDTQEDEPSVRKTHCSGRKHKENVKDYYQKWMEEQAQSLIDKTTAAFQQGKIPPTPFSAPPPAGAMIPPPPSLPGPPRPGMMPAPHMGGPPMMPMMGPPPPGMMPVGPAPGMRPPMGGHMPMMPGPPMMRPPARPMMVPTRPGMTRPDR

SEQ ID NO: 33865 - protein, 18 aa, Artificial Sequence
  Synthetic polypeptide
SGMVVCLQSQIRKRMSHL

SEQ ID NO: 33866 - protein, 1452 aa, Artificial Sequence
  Synthetic polypeptide
DVGSASALLPRLGCEERLGPAATLSGRFTKNLSPDKINLSTLKGEGQLTNLELDEEVLQNVLELPTWLAITRVYCNRASIRIQWTKLKTHPICLCLDKVEVEMKTCEDPRPPNGQSPIALASGQSEYGFAEKVVEGMFIIVNSITIKIHSKAFHASFELWQLQGYSVNPNWQQSDLRLTRITDPCRGEVLTFKEITWQTLRIEADATDNGDQDPVTTPLRLITNQGRIQIALKRRTKDCNVISSKLMFLLDDLLWVLTDSQLKAMMKYAESLSEAMEKSAHQRKSLAPEPVQITPPAPSAQQSWAQAFGGSQGNSNSSSSRLSQYFEKFDVKESSYHLLISRLDLHICDDSQSREPGVSANRLMGGAMQLTFRKMAFDYYPFHWAGDSCKHWVRHCEAMETRGQWAQKLVMEFQSKMEKWHEETGLKPPWHLGVDSLFRRKADSLSSPRKNPLERSPSQGRQPAFQPPAWNRLRSSCMVVRVDDLDIHQVSTAGQPSKKPSTLLSCSRKLHNLPTQVSAIHIEFTEYYFPDNQELPVPCPNLYIQLNGLTFTMDPVSLLWGNLFCLDLYRSLEQFKAIYKLEDSSQKDEHLDIRLDAFWLKVSFPLEKRERAELHRPQALVFSASGMIATNTRHAPHCSCSDLQSLFRGFAAAEFFHSNYDHFPKVPGGFSLLHMLFLHHAFQMDSCLPQPNTLPPQRPKASWDLWSVHFTQISLDFEGTENFKGHTLNFVAPFPLSIWACLPLRWQQAQARKLLLASEGRLKPSASFGSPVQSEALAPDSMSHPRSKTEHDLKSLSGLTEVMEILKEGSSGMDNKGPLTELEDVADVHMLVHSPAHVRVRLDHYQYLALLRLKEVLQRLQEQLTKDTESMTGSPLQNQTACIGVLFPSAEVALLMHPAPGAVDADSAGSDSTSLVDSELSPSEDRELKSDASSDQGPASPEKVLEESSIENQDVSQERPHSNGELQDSGPLAQQLAGKGHEAVESLQAKKLSRTQASSSPAALKPPAGRETAVNGQGELIPLKNIEGELSSAIHMTKDATKEALHATMDLTKEAVSLTKDAFSLGRDRMTSTMHKMLSLPPAKEPMAKTDEGVAAPVSGGAARLRFFSMKRTVSQQSFDGVSLDSSGPEDRISVDSDGSDSFVMLLESESGPESVPPGSLSNVSDNAGVQGSPLVNNYGQGSPAANSSVSPSGEDLIFHPVSVLVLKVNEVSFGIEVRGEDLTVALQAEELTLQQLGTVGLWQFLHGQCPGTCFQESSTLKTGHIRPAVGLRFEVGPGAAVHSPLASQNGFLHLLLHGCDLELLTSVLSGLGPFLEDEEIPVVVPMQIELLNSSITLKDDIPPIYPTSPGPIPITLAMEHVVLKRSDDGVFHIGAAAQDKPSAEVLKSEKRQPPKEQVFLVPTGEVFEQQVKELPILQKELIETKQALANANQDKEKLLQEIRKYNPFFEL

SEQ ID NO: 33867 - protein, 49 aa, Artificial Sequence
  Synthetic polypeptide
GASLPGRPSSEMWGAPLPCCPVWDVRSASARPRPCLGGSLRIFPQTKST

SEQ ID NO: 33868 - protein, 14 aa, Artificial Sequence
  Synthetic polypeptide
GAPRPGRDPVWEVH

SEQ ID NO: 33869 - protein, 1412 aa, Artificial Sequence
  Synthetic polypeptide
DVGSASALLPRLGCEERLGPAATLSGRFTKNLSPDKINLSTLKGEGQLTNLELDEEVLQNVLELPTWLAITRVYCNRASIRIQWTKLKTHPICLCLDKVEVEMKTCEDPRPPNGQSPIALASGQSEYGFAEKVVEGMFIIVNSITIKIHSKAFHASFELWQLQGYSVNPNWQQSDLRLTRITDPCRGEVLTFKEITWQTLRIEADATDNGDQDPVTTPLRLITNQGRIQIALKRRTKDCNVISSKLMFLLDDLLWVLTDSQLKAMMKYAESLSEAMEKSAHQRKSLAPEPVQITPPAPSAQQSWAQAFGGSQGNSNSSSSRLSQYFEKFDVKESSYHLLISRLDLHICDDSQSREPGVSANRLMGGAMQLTFRKMAFDYYPFHWAGDSCKHWVRHCEAMETRGQWAQKLVMEFQSKMEKWHEETGLKPPWHLGVDSLFRRKADSLSSPRKNPLERSPSQGRQPAFQPPAWNRLRSSCMVVRVDDLDIHQVSTAGQPSKKPSTLLSCSRKLHNLPTQVSAIHIEFTEYYFPDNQELPVPCPNLYIQLNGLTFTMDPVSLLWGNLFCLDLYRSLEQFKAIYKLEDSSQKDEHLDIRLDAFWLKVSFPLEKRERAELHRPQALVFSASGMIATNTRHAPHCSCSDLQSLFRGFAAAEFFHSNYDHFPKVPGGFSLLHMLFLHHAFQMDSCLPQPNTLPPQRPKASWDLWSVHFTQISLDFEGTENFKGHTLNFVAPFPLSIWACLPLRWQQAQARKLLLASEGRLKPSASFGSPVQSEALAPDSMSHPRSKTEHDLKSLSGLTEVMEILKEGSSGMDNKGPLTELEDVADVHMLVHSPAHVRVRLDHYQYLALLRLKEVLQRLQEQLTKDTESMTGSPLQNQTACIGVLFPSAEVALLMHPAPGAVDADSAGSDSTSLVDSELSPSEDRELKSDASSDQGPASPEKVLEESSIENQDVSQERPHSNGELQDSGPLAQQLAGKGHEAVESLQAKKLSRTQASSSPAALKPPAGRETAVNGQGELIPLKNIEGELSSAIHMTKDATKEALHATMDLTKEAVSLTKDAFSLGRDRMTSTMHKMLSLPPAKEPMAKTDEGVAAPVSGGAARLRFFSMKRTVSQQSFDGVSLDSSGPEDRISVDSDGSDSFVMLLESESGPESVPPGSLSNVSDNAGVQGSPLVNNYGQGSPAANSSVSPSGEDLIFHPVSVLVLKVNEVSFGIEVRGEDLTVALQAEELTLQQLGTVGLWQFLHGQCPGTCFQESSTLKTGHIRPAVGLRFEVGPGAAVHSPLASQNGFLHLLLHGCDLELLTSVLSGLGPFLEDEEIPVVVPMQIELLNSSITLKDDIPPIYPTSPGPIPITLAMEHVVLKRSDDGVFHIGAAAQDKPSAEVLKSEKRQPPKEQVFLVPTGEVFEQQT

SEQ ID NO: 33870 - protein, 126 aa, Artificial Sequence
  Synthetic polypeptide
GRAWWLMPVIPALWDPKTTGGAAAAGARTLRRGRTGRSQSSSQASSTAPPRCARWGRTLSSCSVPLARAIQTGPPSRAPATRPACSWRRRVCMLLEPPSPVPWTRAREWATSQACPPPTAARTLKL

SEQ ID NO: 33871 - protein, 114 aa, Artificial Sequence
  Synthetic polypeptide
SQHFGTPRPQAEQQQPEPGLCGGAGRAGPRAVLRPPPRLLPGVRGGAGPFPAALYRWPEPSRRVPPAGRLPQGQHAAGGDGCACSWSLPAQCPGPEQESGLPHRPAHHQQPLAP

SEQ ID NO: 33872 - protein, 676 aa, Artificial Sequence
  Synthetic polypeptide
PGMVAHACNPSTLGPQDHRRSSSSRSQDSAEGQDGQVPEQFSGLLHGSSPVCEVGQDPFQLLCTAGQSHPDGSPQQGACHKASMQLEETGVHAPGASQPSALDQSKRVGYLTGLPTTNSRSHPETLTHTASPHPGGAEEGDRSGARSRAPPTSKPKAELKLSRSLSKSDSDLLTCSPTEDATMGSRSESLSNCSIGKKRLEKSPSFASEWDEIEKIMSSIGEGIDFSQERQKISGLRTLEQSVGEWLESIGLQQYESKLLLNGFDDVHFLGSNVMEEQDLRDIGISDPQHRRKLLQAARSLPKVKALGYDGNSPPSVPSWLDSLGLQDYVHSFLSSGYSSIDTVKNLWELELVNVLKVQLLGHRKRIIASLADRPYEEPPQKPPRFSQLRCQDLLSQTSSPLSQNDSCTGRSADLLLPPGDTGRRRHDSLHDPAAPSRAERFRIQEEHREAKLTLRPPSLAAPYAPVQSWQHQPEKLIFESCGYEANYLGSMLIKDLRGTESTQDACAKMRKSTEHMKKIPTIILSITYKGVKFIDASNKNVIAEHEIRNISCAAQDPEDLCTFAYITKDLQTSHHYCHVFSTVDVNLTYEIILTLGQAFEVAYQLALQAQKSRATGASAAEMIETKSSKPVPKPRVGVRKSALEPPDMDQDAQSHASVSWVVDPKPDSKRSLSTN

SEQ ID NO: 33873 - protein, 20 aa, Artificial Sequence
  Synthetic polypeptide
RVWWFTPVIPALQEAEITLH

SEQ ID NO: 33874 - protein, 39 aa, Artificial Sequence
  Synthetic polypeptide
SQHFRRLRSHCIDHRTSGEGASQAHCGRKIFQGIFHQKR

SEQ ID NO: 33875 - protein, 129 aa, Artificial Sequence
  Synthetic polypeptide
GEGTRWTTRNSCNQRLPTRRTKTARNYIQSLTQMPKMNFANVFIGANPLAVDLLEKMLVLDSDKRITAAQALAHAYFAQYHDPDDEPVADPYDQSFESRDLLIDEWKSLTYDEVISFVPPPLDQEEMES

SEQ ID NO: 33876 - protein, 30 aa, Artificial Sequence
  Synthetic polypeptide
GRGQDGQLEIAAIRGFQQEERKRQETIFSL

SEQ ID NO: 33877 - protein, 52 aa, Artificial Sequence
  Synthetic polypeptide
LQSEASNKKNENGKKLYSVFDSDAEDELCECIYWCQSPGCRLAGEDACIGLR

SEQ ID NO: 33878 - protein, 7 aa, Artificial Sequence
  Synthetic polypeptide
FHFCSRY

SEQ ID NO: 33879 - protein, 138 aa, Artificial Sequence
  Synthetic polypeptide
FIFVLDIDQLKLILRLVGTPGAELLKKISSESARNYIQSLTQMPKMNFANVFIGANPLAVDLLEKMLVLDSDKRITAAQALAHAYFAQYHDPDDEPVADPYDQSFESRDLLIDEWKSLTYDEVISFVPPPLDQEEMES

SEQ ID NO: 33880 - protein, 9 aa, Artificial Sequence
  Synthetic polypeptide
SFLFSILIS

SEQ ID NO: 33881 - protein, 85 aa, Artificial Sequence
  Synthetic polypeptide
FIFVLDIDQLKLILRLVGTPGAELLKKISSESLSTCWRRCLYWTQIRELQRPKPLHMPTLLSTTILMMNQWPILMISPLKAGTSL

SEQ ID NO: 33882 - protein, 25 aa, Artificial Sequence
  Synthetic polypeptide
AEIVPCTPAWTKEVRKGDGRRRPKR

SEQ ID NO: 33883 - protein, 453 aa, Artificial Sequence
  Synthetic polypeptide
SQLLGRLRHKNHLNPGSRGCSEPRLCHALQPGQKKLEKVMEEEGLKDEEKRLRRSAHARKETEFLRLKRTRLGLEDFESLKVIGRGAFGEVRLVQKKDTGHVYAMKILRKADMLEKEQVGHIRAERDILVEADSLWVVKMFYSFQDKLNLYLIMEFLPGGDMMTLLMKKDTLTEEETQFYIAETVLAIDSIHQLGFIHRDIKPDNLLLDSKGHVKLSDFGLCTGLKKAHRTEFYRNLNHSLPSDFTFQNMNSKRKAETWKRNRRQLAFSTVGTPDYIAPEVFMQTGYNKLCDWWSLGVIMYEMLIGYPPFCSETPQETYKKVMNWKETLTFPPEVPISEKAKDLILRFCCEWEHRIGAPGVEEIKSNSFFEGVDWEHIRERPAAISIEIKSIDDTSNFDEFPESDILKPTVATSNHPETDYKNKDWVFINYTYKRFEGLTARGAIPSYMKAAK

SEQ ID NO: 33884 - protein, 22 aa, Artificial Sequence
  Synthetic polypeptide
TREAEVAVSRDCAMHSSLDKRS

SEQ ID NO: 33885 - protein, 151 aa, Artificial Sequence
  Synthetic polypeptide
DREISPRHPVNWKKTKCRTLNINEYHSMTRQLLRKADGVVLMYDITSQESFAHVRYWLDCLQDAGSDGVVILLLGNKMDCEEERQVSVEAGQQLAQELGVYFGECSAALGHNILEPVVNLARSLRMQEEGLKDSLVKVAPKRPPKRFGCCS

SEQ ID NO: 33886 - protein, 7 aa, Artificial Sequence
  Synthetic polypeptide
ILMSTTV

SEQ ID NO: 33887 - protein, 46 aa, Artificial Sequence
  Synthetic polypeptide
VIFPLRVSVSSSVHKENGIGPRSTSLWPLISLPPMGTPHSPHPCTT

SEQ ID NO: 33888 - protein, 296 aa, Artificial Sequence
  Synthetic polypeptide
FAGFLWVSHFSSQGISFLLCTQRERNRTQINFTVAIDFTASNGNPSQSTSLHYMSPYQLNAYALALTAVGEIIQHYDSDKMFPALGFGAKLPPDGRVSHEFPLNGNQENPSCCGIDGILEAYHRSLRTVQLYGPTNFAPVVTHVARNAAAVQDGSQYSVLLIITDGVISDMAQTKEAIVNAAKLPMSIIIVGVGQAEFDAMVELDGDDVRISSRGKLAERDIVQFVPFRDYVDRTGNHVLSMARLARDVLAEIPDQLVSYMKAQGIRPRPPPAAPTHSPSQSPARTPPASPLHTHI

SEQ ID NO: 33889 - protein, 28 aa, Artificial Sequence
  Synthetic polypeptide
TWILYWKTWILLPTRSAFMTNFQRLLIW

SEQ ID NO: 33890 - protein, 28 aa, Artificial Sequence
  Synthetic polypeptide
ASYETFLSLEHGFYIGRHGSCCQRDQHL

SEQ ID NO: 33891 - protein, 357 aa, Artificial Sequence
  Synthetic polypeptide
ALNMDFILEDMDLAANEISIYDKLSETVDLVRQTGHQCGMSEKAIEKFIRQLLEKNEPQRPPPQYPLLIVVYKVLATLGLILLTAYFVIQPFSPLAPEPVLSGAHTWRSLIHHIRLMSLPIAKKYMSENKGVPLHGGDEDRPFPDFDPWWTNDCEQNESEPIPANCTGCAQKHLKVMLLEDAPRKFERLHPLVIKTGKPLLEEEIQHFLCQYPEATEGFSEGFFAKWWRCFPERWFPFPYPWRRPLNRSQMLRELFPVFTHLPFPKDASLNKCSFLHPEPVVGSKMHKMPDLFIIGSGEAMLQLIPPFQCRRHCQSVAMPIEPGDIGYVDTTHWKVYVIARGVQPLVICDGTAFSEL

SEQ ID NO: 33892 - protein, 19 aa, Artificial Sequence
  Synthetic polypeptide
PTWRNPVSTKNTKNLPGGS

SEQ ID NO: 33893 - protein, 303 aa, Artificial Sequence
  Synthetic polypeptide
SQHFGRPRRVDHLRSGVRDQPDQHGETPSLLKIQKICRVGHEPMPPTLGTNVLGRKVLYLPSFFTYAKYIVQVDGKIGLFRGLSPRLMSNALSTVTRGSMKKVFPPDEIEQVSNKDDMKTSLKKVVKETSYEMMMQCVSRMLAHPLHVISMRCMVQFVGREAKYSGVLSSIGKIFKEEGLLGFFVGLIPHLLGDVVFLWGCNLLAHFINAYLVDDSFSQALAIRSYTKFVMGIAVSMLTYPFLLVGDLMAVNNCGLQAGLPPYSPVFKSWIHCWKYLSVQGQLFRGSSLLFRRVSSGSCFALE

SEQ ID NO: 33894 - protein, 45 aa, Artificial Sequence
  Synthetic polypeptide
KYKKFAGWVMSRCPPPLGPMCWGGRSSICRASSPTPSTSCKWMVR

SEQ ID NO: 33895 - protein, 320 aa, Artificial Sequence
  Synthetic polypeptide
SQHFGRPRRVDHLRSGVRDQPDQHGETPSLLKIQKICRVGHEPMPPTLGTNVLGRKVLYLPSFFTYAKYIVQVDGKIGLFRGLSPRLMSNALSTVTRGSMKKVFPPDEIEQVSNKDDMKTSLKKVVKETSYEMMMQCVSRMLAHPLHVISMRCMVQFVGREAKYSGVLSSIGKIFKEEGLLGFFVGLIPHLLGDVVFLWGCNLLAHFINAYLVDDSVSDTPGGLGNDQNPGSQFSQALAIRSYTKFVMGIAVSMLTYPFLLVGDLMAVNNCGLQAGLPPYSPVFKSWIHCWKYLSVQGQLFRGSSLLFRRVSSGSCFALE

SEQ ID NO: 33896 - protein, 341 aa, Artificial Sequence
  Synthetic polypeptide
SQHFGRPRRVDHLRSGVRDQPDQHGETPSLLKIQKICRVGHEPMPPTLGTNVLGRKVLYLPSFFTYAKYIVQVDGKIGLFRGLSPRLMSNALSTVTRGSMKKVFPPDEIEQVSNKDDMKTSLKKVVKETSYEMMMQCVSRMLAHPLHVISMRCMVQFVGREAKYSGVLSSIGKIFKEEGLLGFFVGLIPHLLGDVVFLWGCNLLAHFINAYLVDDSFSQALAIRSYTKFVMGIAVSMLTYPFLLVGDLMAVNNCGLQAGLPPYSPVFKSWIHCWKYLSVQVSKHWTAEAFPVLCYILQLKWFCGCFIACKDKWFHGIQYCEEILGIYKAFKFSSYIISERI

SEQ ID NO: 33897 - protein, 489 aa, Artificial Sequence
  Synthetic polypeptide
DMHHVLGSAWTANPRIGDVIQKLAPFLKMYSEYVKNFERAAELLATWTDKSPLFQEVLTRIQSSEASGSLTLQHHMLEPVQRIPRYELLLKEYIQKLPAQAPDQADAQKALDMIFSAAQHSNAAITEMERLQDLWEVYQRLGLEDDIVDPSNTLLREGPVLKISFRRNDPMERYLFLFNNMLLYCVPRVIQVGAQFQVRTRIDVAGMKVRELMDAEFPHSFLVSGKQRTLELQARSQEEMISWMQAFQAAIDQIEKRNETFKAAAQGPEGDIQEQELQSEELGLRAPQWVRDKMVTMCMRCQEPFNALTRRRHHCRACGYVVCARCSDYRAELKYDDNRPNRVCLHCYAFLTGNVLPEAKEDKRRGILEKGSSATPDQSLMCSFLQLIGDKWGKSGPRGWCVIPRDDPLVLYVYAAPQDMRAHTSIPLLGYQVTVGPQGDPRVFQLQQSGQLYTFKAETEELKGRWVKAMERAASGWSPSWPNDGDLSD

SEQ ID NO: 33898 - protein, 52 aa, Artificial Sequence
  Synthetic polypeptide
SWRSSYPSEPPLPHLYDGLVAAPTYRVVRITWNETCIMSWVVLGQLTPASVT

SEQ ID NO: 33899 - protein, 4 aa, Artificial Sequence
  Synthetic polypeptide
CLDS

SEQ ID NO: 33900 - protein, 12 aa, Artificial Sequence
  Synthetic polypeptide
DMHHVLGSAWTA

SEQ ID NO: 33901 - protein, 46 aa, Artificial Sequence
  Synthetic polypeptide
SWRSSYPSEPPLPHLYDGLVAAPTYRVVRITWNETCIMSWVVLGQL

SEQ ID NO: 33902 - protein, 32 aa, Artificial Sequence
  Synthetic polypeptide
PQALDGTSLSLKDQGPLHSVLLKGPQPRLTRA

SEQ ID NO: 33903 - protein, 137 aa, Artificial Sequence
  Synthetic polypeptide
WDLSEPQGPRTPPFSTAKGSSATPDQSLMCSFLQLIGDKWGKSGPRGWCVIPRDDPLVLYVYAAPQDMRAHTSIPLLGYQVTVGPQGDPRVFQLQQSGQLYTFKAETEELKGRWVKAMERAASGWSPSWPNDGDLSD

SEQ ID NO: 33904 - protein, 19 aa, Artificial Sequence
  Synthetic polypeptide
KETSSIGLHYTPQVHPREE

SEQ ID NO: 33905 - protein, 363 aa, Artificial Sequence
  Synthetic polypeptide
KKHHQLDFITLLKFIPEKSDIDLLEEHKHEIERMARADRFLYEMSRIDHYQQRLQALFFKKKFQERLAEAKPKVEAILLASRELVRSKRLRQMLEVILAIGNFMNKGQRGGAYGFRVASLNKIADTKSSIDRNISLLHYLIMILEKHFPDILNMPSELQHLPEAAKVNLAELEKEVGNLRRGLRAVEVELEYQRRQVREPSDKFVPVMSDFITVSSFSFSELEDQLNEARDKFAKALMHFGEHDSKMQPDEFFGIFDTFLQAFSEARQDLEAMRRRKEEEERRARMEAMLKEQRERERWQRQRKVLAAGSSLEEGGEFDDLVSALRSGEVFDKDLCKLKRSRKRSGSQALEVTRERAINRLNY

SEQ ID NO: 33906 - protein, 43 aa, Artificial Sequence
  Synthetic polypeptide
RNIINWTSLHSSSSSQRRVTLTSWRSTSMKLSGWPVLTASSMK

SEQ ID NO: 33907 - protein, 362 aa, Artificial Sequence
  Synthetic polypeptide
KKHHQLDFITLLKFIPEKSDIDLLEEHKHEIERMARADRFLYEMSRIDHYQQRLQALFFKKKFQERLAEAKPKVEAILLASRELVRSKRLRQMLEVILAIGNFMNKGQRGGAYGFRVASLNKIADTKSSIDRNISLLHYLIMILEKHFPDILNMPSELQHLPEAAKVNLAELEKEVGNLRRGLRAVEVLEYQRRQVREPSDKFVPVMSDFITVSSFSFSELEDQLNEARDKFAKALMHFGEHDSKMQPDEFFGIFDTFLQAFSEARQDLEAMRRRKEEEERRARMEAMLKEQRERERWQRQRKVLAAGSSLEEGGEFDDLVSALRSGEVFDKDLCKLKRSRKRSGSQALEVTRERAINRLNY

SEQ ID NO: 33908 - protein, 52 aa, Artificial Sequence
  Synthetic polypeptide
KEVSLKIKQGNQNPLPLEGDLKRKLVRPDLLLMIRLKLKIKVNQKIGKNPQL

SEQ ID NO: 33909 - protein, 779 aa, Artificial Sequence
  Synthetic polypeptide
RSKSQDQARKSKSPTLRRRSQEKIGKARSPTDDKVKIEDKSKSKDRKKSPIINESRSRDRGKKSRSPVDLRGKSKDRRSRSKERKSKRSETDKEKKPIKSPSKDASSGKENRSPSRRPGRSPKRRSLSPKPRDKSRRSRSPLLNDRRSKQSKSPSRTLSPGRRAKSRSLERKRREPERRRLSSPRTRPRDDILSRRERSKDASPINRWSPTRRRSRSPIRRRSRSPLRRSRSPRRRSRSPRRRDRGRRSRSRLRRRSRSRGGRRRRSRSKVKEDKFKGSLSEGMKVEQESSSDDNLEDFDVEEEDEEALIEQRRIQRQAIVQKYKYLAEDSNMSVPSEPSSPQSSTRTRSPSPDDILERVAADVKEYERENVDTFEASVKAKHNLMTVEQNNGSSQKKLLAPDMFTESDDMFAAYFDSARLRAAGIGKDFKENPNLRDNWTDAEGYYRVNIGEVLDKRYNVYGYTGQGVFSNVVRARDNARANQEVAVKIIRNNELMQKTGLKELEFLKKLNDADPDDKFHCLRLFRHFYHKQHLCLVFEPLSMNLREVLKKYGKDVGLHIKAVRSYSQQLFLALKLLKRCNILHADIKPDNILVNESKTILKLCDFGSASHVADNDITPYLVSRFYRAPEIIIGKSYDYGIDMWSVGCTLYELYTGKILFPGKTNNHMLKLAMDLKGKMPNKMIRKGVFKDQHFDQNLNFMYIEVDKVTEREKVTVMSTINPTKDLLADLIGCQRLPEDQRKKVHQLKDLLDQILMLDPAKRISINQALQHAFIQEKI

SEQ ID NO: 33910 - protein, 34 aa, Artificial Sequence
  Synthetic polypeptide
SQRFGRTRREDGLSPGVPGLDVVLIVCNGKMYLR

SEQ ID NO: 33911 - protein, 10 aa, Artificial Sequence
  Synthetic polypeptide
AQEFQDWMWS

SEQ ID NO: 33912 - protein, 59 aa, Artificial Sequence
  Synthetic polypeptide
TQWLMPVIPTFWENKKGGWLEPRSSRIGCGLDRLQWENVSAMIEEVFEATDIKITVYTL

SEQ ID NO: 33913 - protein, 24 aa, Artificial Sequence
  Synthetic polypeptide
SQRFGRTRREDGLSPGVPGLDVVL

SEQ ID NO: 33914 - protein, 31 aa, Artificial Sequence
  Synthetic polypeptide
TQWLMPVIPTFWENKKGGWLEPRSSRIGCGL

SEQ ID NO: 33915 - protein, 42 aa, Artificial Sequence
  Synthetic polypeptide
TQWLMPVIPTFWENKKGGWLEPRSSRIGCGLDRLQWENVSAM

SEQ ID NO: 33916 - protein, 30 aa, Artificial Sequence
  Synthetic polypeptide
SQRFGRTRREDGLSPGVPGLDVVLIVCNGK

SEQ ID NO: 33917 - protein, 38 aa, Artificial Sequence
  Synthetic polypeptide
TQWLMPVIPTFWENKKGGWLEPRSSRIGCGLDRLQWEN

SEQ ID NO: 33918 - protein, 40 aa, Artificial Sequence
  Synthetic polypeptide
SQRFGRTRREDGLSPGVPDHLCERRPFCMPENRLFSPLYQ

SEQ ID NO: 33919 - protein, 144 aa, Artificial Sequence
  Synthetic polypeptide
AQEFQITYVKGDLFACPKTDSLAHCISEDCRMGAGIAVLFKKKFGGVQELLNQQKKSGEVAVLKRDGRYIYYLITKKRASHKPTYENLQKSLEAMKSHCLKNGVTDLSMPRIGCGLDRLQWENVSAMIEEVFEATDIKITVYTL

SEQ ID NO: 33920 - protein, 29 aa, Artificial Sequence
  Synthetic polypeptide
TQWLMPVIPTFWENKKGGWLEPRSSRSLM

SEQ ID NO: 33921 - protein, 78 aa, Artificial Sequence
  Synthetic polypeptide
AQEFQITYVKGDLFACPKTDSLAHCISEDCRMGAGIAVLFKKKFGGVQELLNQQKKSGEVAVLKRDGRYIYYLDWMWS

SEQ ID NO: 33922 - protein, 69 aa, Artificial Sequence
  Synthetic polypeptide
AQEFQITYVKGDLFACPKTDSLAHCISEDCRMGAGIAVLFKKKFGGVQELLNQRLDVVLIVCNGKMYLR

SEQ ID NO: 33923 - protein, 123 aa, Artificial Sequence
  Synthetic polypeptide
AQEFQITYVKGDLFACPKTDSLAHCISEDCRMGAGIAVLFKKKFGGVQELLNQQKKSGEVAVLKRDGRYIYYLITKKRASHKPTYENLQKSLEAMKSHCLKNGVTDLSMPRIGCGLDRLQWEN

SEQ ID NO: 33924 - protein, 80 aa, Artificial Sequence
  Synthetic polypeptide
AQEFQITYVKGDLFACPKTDSLAHCISEDCRMGAGIAVLFKKKFGGVQELLNQREFWKPLTWFALARAPFNLLHFNKICV

SEQ ID NO: 33925 - protein, 259 aa, Artificial Sequence
  Synthetic polypeptide
TTEGTILSRPSNAKEIDCSTDWRTLELRAATKLTEEKYELKEGQTLDVKCDYTLEKFASSQKAWQIIRDGEMPKTLACTERPSKNSHPVQVGRIILEDYHDHGLLRVRMVNLQVEDSGLYQCVIYQPPKEPHMLFDRIRLVVTKGFSGTPGSNENSTQNVYKIPPTTTKALCPLYTSPRTVTQAPPKSTADVSTPDSEINLTNVTDIIREKSMTFGIRRLDVESHPLPPLHTGHFRISQFFSQAGTQSLHSCYKGKPTP

SEQ ID NO: 33926 - protein, 16 aa, Artificial Sequence
  Synthetic polypeptide
TAALTGGLWNSELQLN

SEQ ID NO: 33927 - protein, 10 aa, Artificial Sequence
  Synthetic polypeptide
LADFGTPSCN

SEQ ID NO: 33928 - protein, 243 aa, Artificial Sequence
  Synthetic polypeptide
TTEGTILSRPSNAKEIDCSTDWRTLELRAATKLTEEKYELKEGQTLDVKCDYTLEKFASSQKAWQIIRDGEMPKTLACTERPSKNSHPVQVGRIILEDYHDHGLLRVRMVNLQVEDSGLYQCVIYQPPKEPHMLFDRIRLVVTKGFSGTPGSNENSTQNVYKIPPTTTKALCPLYTSPRTVTQAPPKSTADVSTPDSEINLTNVTDIIRVPVFNIVILLAGGFLSKSLVFSVLFAVTLRSFVP

SEQ ID NO: 33929 - protein, 159 aa, Artificial Sequence
  Synthetic polypeptide
TTEGTILSRPSNAKEIDCSTDWRTLELRAATKLTEEKYELKEGQTLDVKCDYTLEKFASSQKAWQIIRDGEMPKTLACTERPSKNSHPVQVGRIILEDYHDHGLLRVRMVNLQVEDSGLYQCVIYQPPKEPHMLFDRIRLVVTKGFRCSTLSFSWLVDS

SEQ ID NO: 33930 - protein, 234 aa, Artificial Sequence
  Synthetic polypeptide
TTEGTILSRPSNAKEIDCSTDWRTLELRAATKLTEEKYELKEGQTLDVKCDYTLEKFASSQKAWQIIRDGEMPKTLACTERPSKNSHPVQVGRIILEDYHDHGLLRVRMVNLQVEDSGLYQCVIYQPPKEPHMLFDRIRLVVTKGFSGTPGSNENSTQNVYKIPPTTTKALCPLYTSPRTVTQAPPKSTADVSTPDSEINLTNVTDIIRYSFQVPGPLVWTLSPLFPSLCAERM

SEQ ID NO: 33931 - protein, 22 aa, Artificial Sequence
  Synthetic polypeptide
MIRLGGAGPREAQVGPGCCDCT

SEQ ID NO: 33932 - protein, 155 aa, Artificial Sequence
  Synthetic polypeptide
SDWEVLVLGKLKWDLAAVIAHDFLAFILHRLSLPRDRQALVKKHAQTFLALCATDYTFAMYPPSMIATGSIGAAVQGLGACSMSGDELTELLAGITGTEVDCLRACQEQIEAALRESLREASQTSSSPAPKAPRGSSSQGPSQTSTPTDVTAIHL

SEQ ID NO: 33933 - protein, 17 aa, Artificial Sequence
  Synthetic polypeptide
SMLSWHLVNDQTGRCWS

SEQ ID NO: 33934 - protein, 139 aa, Artificial Sequence
  Synthetic polypeptide
SDWEVLVLGKLKWDLAAVIAHDFLAFILHRLSLPRDRQALVKKHAQTFLALCATGLPAGLSGADRSCTQGEPQGSLSDQLQPSAQSPPGLQQPRAQPDQHSYRCHSHTPVALERPSGVATKQRRGRCHPPPCLQEPHHI

SEQ ID NO: 33935 - protein, 104 aa, Artificial Sequence
  Synthetic polypeptide
SDWEVLVLGKLKWDLAAVIAHDFLAFILHRLSLPRDRQALVKKHAQTFLALCATDYTFAMYPPSMIATGSIGAAVQGLGACSMSGDELTELLAGITGTEVVSAG

SEQ ID NO: 33936 - protein, 62 aa, Artificial Sequence
  Synthetic polypeptide
SDWEVLVLGKLKWDLAAVIAHDFLAFILHRLSLPRDRQALVKKHAQTFLALCATDYTFAMYP

SEQ ID NO: 33937 - protein, 119 aa, Artificial Sequence
  Synthetic polypeptide
NGITVSTSWICEYISEIGRSAKSYCEHTARTQPTLSDIVVTLVEMGFNVDTLPAYAKRSQRMVITAPPVTNQPVTPKALTAGQNRPHPPHIPSHFPEFPDPHTYIKTPVSDEALGLRVV

SEQ ID NO: 33938 - protein, 65 aa, Artificial Sequence
  Synthetic polypeptide
QFLPHGFVSTFQKLGEVPSLTVSTQPGPSPHCPISWSHLLRWVSMWTLSLLMQNGLRGWSSLLLR

SEQ ID NO: 33939 - protein, 283 aa, Artificial Sequence
  Synthetic polypeptide
NGITVSTSWICEYISEIGRSAKSYCEHTARTQPTLSDIVVTLVEMGFNVDTLPAYAKRSQRMVITAPPVTNQPVTPKALTAGQNRPHPPHIPSHFPEFPDPHTYIKTPTYREPVSDYQVLREKAASQRRDVERALTRFMAKTGETQSLFKDDVSTFPLIAARPFTIPYLTALLPSELEMQQMEETDSSEQDEQTDTENLALHISMIESRSVTQAGVQWQDLGSLQPPPPGFKRFSSLSLLSSWNYRRILEPRRRTPLSCSRTPPCRVAGMGRRTSSITLICGR

SEQ ID NO: 33940 - protein, 256 aa, Artificial Sequence
  Synthetic polypeptide
NGITVSTSWICEYISEIGRSAKSYCEHTARTQPTLSDIVVTLVEMGFNVDTLPAYAKRSQRMVITAPPVTNQPVTPKALTAGQNRPHPPHIPSHFPEFPDPHTYIKTPTYREPVSDYQVLREKAASQRRDVERALTRFMAKTGETQSLFKDDVSTFPLIAARPFTIPYLTALLPSELEMQQMEETDSSEQDEQTDTENLALHISMEDSGAEKENTSVLQQNPSLSGSRNGEENIIDNPYLRPVKKPKIRRKKPDTF

SEQ ID NO: 33941 - protein, 68 aa, Artificial Sequence
  Synthetic polypeptide
NGITVSTSWICEYISEIGRSAKSYCEHTARTQPTLSDIVVTLVEMGFNVDTLPAYAKRSQRMVITARK

SEQ ID NO: 33942 - protein, 65 aa, Artificial Sequence
  Synthetic polypeptide
QFLPHGFVSTFQKLGEVPSLTVSTQPGPSPHCPISWSHLLRWVSMWTLSLLMQNGLRGWSSLLVS

SEQ ID NO: 33943 - protein, 255 aa, Artificial Sequence
  Synthetic polypeptide
NGITVSTSWICEYISEIGRSAKSYCEHTARTQPTLSDIVVTLVEMGFNVDTLPAYAKRSQRMVITAPPVTNQPVTPKALTAGQNRPHPPHIPSHFPEFPDPHTYIKTPTYREPVSDYQVLREKAASQRRDVERALTRFMAKTGETQSLFKDDVSTFPLIAARPFTIPYLTALLPSELEMQQMEETDSSEQDEQTDTENLALHISMEDSGAEKENTSVLQQNPSLSGSRNGEENIIDNPYLRPVKKPKIRRKKSLS

SEQ ID NO: 33944 - protein, 242 aa, Artificial Sequence
  Synthetic polypeptide
NGITVSTSWICEYISEIGRSAKSYCEHTARTQPTLSDIVVTLVEMGFNVDTLPAYAKRSQRMVITAPPVTNQPVTPKALTAGQNRPHPPHIPSHFPEFPDPHTYIKTPTYREPVSDYQVLREKAASQRRDVERALTRFMAKTGETQSLFKDDVSTFPSLLPSELEMQQMEETDSSEQDEQTDTENLALHISMEDSGAEKENTSVLQQNPSLSGSRNGEENIIDNPYLRPVKKPKIRRKKSLS

SEQ ID NO: 33945 - protein, 33 aa, Artificial Sequence
  Synthetic polypeptide
GSNRLYTIRTVTRTHQGANLGNTIRRKRRKQVI

SEQ ID NO: 33946 - protein, 33 aa, Artificial Sequence
  Synthetic polypeptide
EDQIDYTQLEQLPEHIKEPIWETLSEEKEESKS

SEQ ID NO: 33947 - protein, 8 aa, Artificial Sequence
  Synthetic polypeptide
RIKSIIHN

SEQ ID NO: 33948 - protein, 480 aa, Artificial Sequence
  Synthetic polypeptide
SQRFRRSRRVDHLRPGVGHQPGQHDSIDGSNVTVTPGPGEQTVDVEPRINIGLRFQAEIPELQDISALAQDTHKATLVWKPWPELENHDLQQRVENLLNLCCSSALPGGGTNSEFALHSLFEAKGDVMVALEMLLLRKPVRLKCHPLANYHYAGSDKWTSLERKLFNKALATYSKDFIFVQKMVKSKTVAQCVEYYYTWKKIMRLGRKHRTRLAEIIDDCVTSEEEEELEEEEEEDPEEDRKSTKEEESEVPKSPEPPPVPVLAPTEGPPLQALGQPSGSFICEMPNCGADCRCHVTPFLPQVFSSRQALNGHARIHGGTNQVTKARGAIPSGKQKPGGTQSGYCSVKSSPSHSTTSGETDPTTIFPCKECGKVFFKIKSRNAHMKTHRQQEEQQRQKAQKAAFAAEMAATIERTTGPVGAPGLLPLDQLSLIKPIKDVDILDDDVVQQLGGVMEEAEVVDTDLLLDDQDSVLLQGDAEL

SEQ ID NO: 33949 - protein, 18 aa, Artificial Sequence
  Synthetic polypeptide
GRELDTSLANMTASMAAT

SEQ ID NO: 33950 - protein, 468 aa, Artificial Sequence
  Synthetic polypeptide
SQRFRRSRRVDHLRPGVGHQPGQHDSIDGSNVTVTPGPGEQTVDVEPRINIGLRFQAEIPELQDISALAQDTHKATLVWKPWPELENHDLQQRVENLLNLCCSSALPGGGTNSEFALHSLFEAKGDVMVALEMLLLRKPVRLKCHPLANYHYAGSDKWTSLERKLFNKALATYSKDFIFVQKMVKSKTVAQCVEYYYTWKKIMRLGRKHRTRLAEIIDDCVTSEEEEELEEEEEEDPEEDRKSTKEEESEVPKSPEPPPVPVLAPTEGPPLQALGQPSGSFICEMPNCGAVFSSRQALNGHARIHGGTNQVTKARGAIPSGKQKPGGTQSGYCSVKSSPSHSTTSGETDPTTIFPCKECGKVFFKIKSRNAHMKTHRQQEEQQRQKAQKAAFAAEMAATIERTTGPVGAPGLLPLDQLSLIKPIKDVDILDDDVVQQLGGVMEEAEVVDTDLLLDDQDSVLLQGDAEL

SEQ ID NO: 33951 - protein, 32 aa, Artificial Sequence
  Synthetic polypeptide
GRAQWLMPVIPALWEAKAGGSRDDNIRRWRFL

SEQ ID NO: 33952 - protein, 313 aa, Artificial Sequence
  Synthetic polypeptide
FQHFGRPRQADHEMTTSGGGGFCDCGDTEAWKEGPYCQKHELNTSEIEEEEDPLVHLSEDVIARTYNIFAITFRYAVEILTWEKESELPADLEMVEKSDTYYCMLFNDEVHTYEQVIYTLQKAVNCTQKEAIGFATTVDRDGRRSVRYGDFQYCEQAKSVIVRNTSRQTKPLKVQVMHSSIVAHQNFGLKLLSWLGSIIGYSDGLRRILCQVGLQEGPDGENSSLVDRLMLSDSKLWKGARSVYHQLFMSSLLMDLKYKKLFAVRFAKNYERLQSDYVTDDHDREFSVADLSVQIFTVPSLFSISAGRSGSPL

SEQ ID NO: 33953 - protein, 22 aa, Artificial Sequence
  Synthetic polypeptide
PGAVANACNSSTLGGQGRRITR

SEQ ID NO: 33954 - protein, 1629 aa, Artificial Sequence
  Synthetic polypeptide
FQHFGRPRQADHEMTTSGGGGFCDCGDTEAWKEGPYCQKHELNTSEIEEEEDPLVHLSEDVIARTYNIFAITFRYAVEILTWEKESELPADLEMVEKSDTYYCMLFNDEVHTYEQVIYTLQKAVNCTQKEAIGFATTVDRDGRRSVRYGDFQYCEQAKSVIVRNTSRQTKPLKVQVMHSSIVAHQNFGLKLLSWLGSIIGYSDGLRRILCQVGLQEGPDGENSSLVDRLMLSDSKLWKGARSVYHQLFMSSLLMDLKYKKLFAVRFAKNYQQLQRDFMEDDHERAVSVTALSVQFFTAPTLARMLITEENLMSIIIKTFMDHLRHRDAQGRFQFERYTALQAFKFRRVQSLILDLKYVLISKPTEWSDELRQKFLEGFDAFLELLKCMQGMDPITRQVGQHIEMEPEWEAAFTLQMKLTHVISMMQDWCASDEKVLIEAYKKCLAVLMQCHGGYTDGEQPITLSICGHSVETIRYCVSQEKVSIHLPVSRLLAGLHVLLSKSEVAYKFPELLPLSELSPPMLIEHPLRCLVLCAQVHAGMWRRNGFSLVNQIYYYHNVKCRREMFDKDVVMLQTGVSMMDPNHFLMIMLSRFELYQIFSTPDYGKRFSSEITHKDVVQQNNTLIEEMLYLIIMLVGERFSPGVGQVNATDEIKREIIHQLSIKPMAHSELVKSLPEDENKETGMESVIEAVAHFKKPGLTGRGMYELKPECAKEFNLYFYHFSRAEQSKAEEAQRKLKRQNREDTALPPPVLPPFCPLFASLVNILQSDVMLCIMGTILQWAVEHNGYAWSESMLQRVLHLIGMALQEEKQHLENVTEEHVVTFTFTQKISKPGEAPKNSPSILAMLETLQNAPYLEVHKDMIRWILKTFNAVKKMRESSPTSPVAETEGTIMEESSRDKDKAERKRKAEIARLRREKIMAQMSEMQRHFIDENKELFQQTLELDASTSAVLDHSPVASDMTLTALGPAQTQVPEQRQFVTCILCQEEQEVKVESRAMVLAAFVQRSTVLSKNRSKFIQDPEKYDPLFMHPDLSCGTHTSSCGHIMHAHCWQRYFDSVQAKEQRRQQRLRLHTSYDVENGEFLCPLCECLSNTVIPLLLPPRNIFNNRLNFSDQPNLTQWIRTISQQIKALQFLRKEESTPNNASTKNSENVDELQLPEGFRPDFRPKIPYSESIKEMLTTFGTATYKVGLKVHPNEEDPRVPIMCWGSCAYTIQSIERILSDEDKPLFGPLPCRLDDCLRSLTRFAAAHWTVASVSVVQGHFCKLFASLVPNDSHEELPCILDIDMFHLLVGLVLAFPALQCQDFSGISLGTGDLHIFHLVTMAHIIQILLTSCTEENGMDQENPPCEEESAVLALYKTLHQYTGSALKEIPSGWHLWRSVRAGIMPFLKCSALFFHYLNGVPSPPDIQVPGTSHFEHLCSYLSLPNNLICLFQENSEIMNSLIESWCRNSEVKRYLEGERDAIRYPRESNKLINLPEDYSSLINQASNFSCPKSGGDKSRAPTLCLVCGSLLCSQSYCCQTELEGEDVGACTAHTYSCGSGVGIFLRVRECQVLFLAGKTKGCFYSPPYLDDYGETDQGLRRGNPLHLCKERFKKIQKLWHQHSVTEEIGHAQEANQTLVGIDWQHL

SEQ ID NO: 33955 - protein, 1629 aa, Artificial Sequence
  Synthetic polypeptide
FQHFGRPRQADHEMTTSGGGGFCDCGDTEAWKEGPYCQKHELNTSEIEEEEDPLVHLSEDVIARTYNIFAITFRYAVEILTWEKESELPADLEMVEKSDTYYCMLFNDEVHTYEQVIYTLQKAVNCTQKEAIGFATTVDRDGRRSVRYGDFQYCEQAKSVIVRNTSRQTKPLKVQVMHSSIVAHQNFGLKLLSWLGSIIGYSDGLRRILCQVGLQEGPDGENSSLVDRLMLSDSKLWKGARSVYHQLFMSSLLMDLKYKKLFAVRFAKNYERLQSDYVTDDHDREFSVADLSVQIFTVPSLARMLITEENLMSIIIKTFMDHLRHRDAQGRFQFERYTALQAFKFRRVQSLILDLKYVLISKPTEWSDELRQKFLEGFDAFLELLKCMQGMDPITRQVGQHIEMEPEWEAAFTLQMKLTHVISMMQDWCASDEKVLIEAYKKCLAVLMQCHGGYTDGEQPITLSICGHSVETIRYCVSQEKVSIHLPVSRLLAGLHVLLSKSEVAYKFPELLPLSELSPPMLIEHPLRCLVLCAQVHAGMWRRNGFSLVNQIYYYHNVKCRREMFDKDVVMLQTGVSMMDPNHFLMIMLSRFELYQIFSTPDYGKRFSSEITHKDVVQQNNTLIEEMLYLIIMLVGERFSPGVGQVNATDEIKREIIHQLSIKPMAHSELVKSLPEDENKETGMESVIEAVAHFKKPGLTGRGMYELKPECAKEFNLYFYHFSRAEQSKAEEAQRKLKRQNREDTALPPPVLPPFCPLFASLVNILQSDVMLCIMGTILQWAVEHNGYAWSESMLQRVLHLIGMALQEEKQHLENVTEEHVVTFTFTQKISKPGEAPKNSPSILAMLETLQNAPYLEVHKDMIRWILKTFNAVKKMRESSPTSPVAETEGTIMEESSRDKDKAERKRKAEIARLRREKIMAQMSEMQRHFIDENKELFQQTLELDASTSAVLDHSPVASDMTLTALGPAQTQVPEQRQFVTCILCQEEQEVKVESRAMVLAAFVQRSTVLSKNRSKFIQDPEKYDPLFMHPDLSCGTHTSSCGHIMHAHCWQRYFDSVQAKEQRRQQRLRLHTSYDVENGEFLCPLCECLSNTVIPLLLPPRNIFNNRLNFSDQPNLTQWIRTISQQIKALQFLRKEESTPNNASTKNSENVDELQLPEGFRPDFRPKIPYSESIKEMLTTFGTATYKVGLKVHPNEEDPRVPIMCWGSCAYTIQSIERILSDEDKPLFGPLPCRLDDCLRSLTRFAAAHWTVASVSVVQGHFCKLFASLVPNDSHEELPCILDIDMFHLLVGLVLAFPALQCQDFSGISLGTGDLHIFHLVTMAHIIQILLTSCTEENGMDQENPPCEEESAVLALYKTLHQYTGSALKEIPSGWHLWRSVRAGIMPFLKCSALFFHYLNGVPSPPDIQVPGTSHFEHLCSYLSLPNNLICLFQENSEIMNSLIESWCRNSEVKRYLEGERDAIRYPRESNKLINLPEDYSSLINQASNFSCPKSGGDKSRAPTLCLVCGSLLCSQSYCCQTELEGEDVGACTAHTYSCGSGVGIFLRVRECQVLFLAGKTKGCFYSPPYLDDYGETDQGLRRGNPLHLCKERFKKIQKLWHQHSVTEEIGHAQEANQTLVGIDWQHL

SEQ ID NO: 33956 - protein, 692 aa, Artificial Sequence
  Synthetic polypeptide
KKKKKKRYLEGSIAPEDKGSCSLLPGPPFARELHIEIVSSPHYSTNGNYDGVLYRHFQIPRVVQEGDVLCVPTIGQVEILEGSPEKLPRWREMFFKVKKTVGEAPDGPASAYLADTTHTSLYMVGSTLSPVPWLPSEESTLWSSLSPPGLEALVSELCAVLKPRLQPGGALLTGTSSVLLRGPPGCGKTTVVAAACSHLGLHLLKVPCSSLCAESSGAVETKLQAIFSRARRCRPAVLLLTAVDLLGRDRDGLGEDARVMAVLRHLLLNEDPLNSCPPLMVVATTSRAQDLPADVQTAFPHELEVPALSEGQRLSILRALTAHLPLGQEVNLAQLARRCAGFVVGDLYALLTHSSRAACTRIKNSGLAGGLTEEDEGELCAAGFPLLAEDFGQALEQLQTAHSQAVGAPKIPSVSWHDVGGLQEVKKEILETIQLPLEHPELLSLGLRRSGLLLHGPPGTGKTLLAKAVATECSLTFLSVKGPELINMYVGQSEENVREVFARARAAAPCIIFFDELDSLAPSRGRSGDSGGVMDRVVSQLLAELDGLHSTQDVFVIGATNRPDLLDPALLRPGRFDKLVFVGANEDRASQLRVLSAITRKFKLEPSVSLVNVLDCCPPQLTGADLYSLCSDAMTAALKRRVHDLEEGLEPGSSALMLTMEDLLQAAARLQPSVSEQELLRYKRIQRKFAAC

SEQ ID NO: 33957 - protein, 88 aa, Artificial Sequence
  Synthetic polypeptide
TWEVEVAVSPDHTTALQPGRQSEILCKKKKKKKGTWKAPSPLKTKEAAHCCLGLHLPESYTSKLCLLPTTALMEIMTVFFTGTFRYPG

SEQ ID NO: 33958 - protein, 33 aa, Artificial Sequence
  Synthetic polypeptide
AQITPLHSSLDDRAKFCVKKKKKKKVLGRLHRP

SEQ ID NO: 33959 - protein, 450 aa, Artificial Sequence
  Synthetic polypeptide
KKKKKKRYLEGSIAPEDKGSCSLLPGPPFARELHIEIVSSPHYSTNGNYDGVLYRHFQIPRVVQEGDVLCVPTIGQVEILEGSPEKLPRWREMFFKVKKTVGEAPDGPASAYLADTTHTSLYMVGSTLSPVPWLPSEESTLWSSLSPPGLEALVSELCAVLKPRLQPGGALLTGTSSVLLRGPPGCGKTTVVAAACSHLGLHLLKVPCSSLCAESSGAVETKLQAIFSRARRCRPAVLLLTAVDLLGRDRDGLGEDARVMAVLRHLLLNEDPLNSCPPLMVVATTSRAQDLPADVQTAFPHELEVPALSEGQRLSILRALTAHLPLGQEVNLAQLARRCAGFVVGDLYALLTHSSRAACTRIKNSGLAGGLTEEDEGELCAAGFPLLAEDFGQALEQLQTAHSQAVGAPKVETKSLECLPGPGLQLHALSSLMNWTLWPQAGGEVEILEE

SEQ ID NO: 33960 - protein, 121 aa, Artificial Sequence
  Synthetic polypeptide
SQHFGRPRRADHLGSGVRDQPDQHGETPSLLKKCKISRAWWCMPLIPATWEAEAGESLEPGRRRLRGTWKAPSPLKTKEAAHCCLGLHLPESYTSKLCLLPTTALMEIMTVFFTGTFRYPG

SEQ ID NO: 33961 - protein, 29 aa, Artificial Sequence
  Synthetic polypeptide
SQLLGRLKQENRLNLGGGGCEVLGRLHRP

SEQ ID NO: 33962 - protein, 693 aa, Artificial Sequence
  Synthetic polypeptide
TWEAEVARYLEGSIAPEDKGSCSLLPGPPFARELHIEIVSSPHYSTNGNYDGVLYRHFQIPRVVQEGDVLCVPTIGQVEILEGSPEKLPRWREMFFKVKKTVGEAPDGPASAYLADTTHTSLYMVGSTLSPVPWLPSEESTLWSSLSPPGLEALVSELCAVLKPRLQPGGALLTGTSSVLLRGPPGCGKTTVVAAACSHLGLHLLKVPCSSLCAESSGAVETKLQAIFSRARRCRPAVLLLTAVDLLGRDRDGLGEDARVMAVLRHLLLNEDPLNSCPPLMVVATTSRAQDLPADVQTAFPHELEVPALSEGQRLSILRALTAHLPLGQEVNLAQLARRCAGFVVGDLYALLTHSSRAACTRIKNSGLAGGLTEEDEGELCAAGFPLLAEDFGQALEQLQTAHSQAVGAPKIPSVSWHDVGGLQEVKKEILETIQLPLEHPELLSLGLRRSGLLLHGPPGTGKTLLAKAVATECSLTFLSVKGPELINMYVGQSEENVREVFARARAAAPCIIFFDELDSLAPSRGRSGDSGGVMDRVVSQLLAELDGLHSTQDVFVIGATNRPDLLDPALLRPGRFDKLVFVGANEDRASQLRVLSAITRKFKLEPSVSLVNVLDCCPPQLTGADLYSLCSDAMTAALKRRVHDLEEGLEPGSSALMLTMEDLLQAAARLQPSVSEQELLRYKRIQRKFAAC

SEQ ID NO: 33963 - protein, 451 aa, Artificial Sequence
  Synthetic polypeptide
TWEAEVARYLEGSIAPEDKGSCSLLPGPPFARELHIEIVSSPHYSTNGNYDGVLYRHFQIPRVVQEGDVLCVPTIGQVEILEGSPEKLPRWREMFFKVKKTVGEAPDGPASAYLADTTHTSLYMVGSTLSPVPWLPSEESTLWSSLSPPGLEALVSELCAVLKPRLQPGGALLTGTSSVLLRGPPGCGKTTVVAAACSHLGLHLLKVPCSSLCAESSGAVETKLQAIFSRARRCRPAVLLLTAVDLLGRDRDGLGEDARVMAVLRHLLLNEDPLNSCPPLMVVATTSRAQDLPADVQTAFPHELEVPALSEGQRLSILRALTAHLPLGQEVNLAQLARRCAGFVVGDLYALLTHSSRAACTRIKNSGLAGGLTEEDEGELCAAGFPLLAEDFGQALEQLQTAHSQAVGAPKVETKSLECLPGPGLQLHALSSLMNWTLWPQAGGEVEILEE

SEQ ID NO: 33964 - protein, 49 aa, Artificial Sequence
  Synthetic polypeptide
SQLLRRLRQENRLNPGGGGCSEPRSHHCIPAQAESGCMVLAGATSNVIE

SEQ ID NO: 33965 - protein, 37 aa, Artificial Sequence
  Synthetic polypeptide
TQEVEVAVSRDRTIVFQPRPNPGAWYWRGPQATLSND

SEQ ID NO: 33966 - protein, 227 aa, Artificial Sequence
  Synthetic polypeptide
AEIAPLYSSPGRIRVHGIGGGHKQRYRMIDFLRFRPEETKSGPFEEKVIQVRYDPCRSADIALVAGGSRKRWIIATENMQAGDTILNSNHIGRMAVAAREGDAHPLGALPVGTLINNVESEPGRGAQYIRAAGTCGVLLRKVNGTAIIQLPSKRQMQVLETCVATVGRVSNVDHNKRVIGKAGRNRWLGKRPNSGRWHRKGGWAGRKIRPLPPMKSYVKLPSASAQS

SEQ ID NO: 33967 - protein, 147 aa, Artificial Sequence
  Synthetic polypeptide
AEIAPLYSSPGRIRVHGIGGGHKQRYRMIDFLRFRPEETKSGPFEEKVIQVRYDPCRSADIALVAGGSRKRWIIATENMQAGDTILNSNHIGRMAVAAREGDAHPLGALPVGTLINNVESEPGRGAQYIRAAGAGNVRSNSRPSIQR

SEQ ID NO: 33968 - protein, 301 aa, Artificial Sequence
  Synthetic polypeptide
AGRSLTLSPRLEHNGMTSAHHNFRLPGSRDSPASASQVAEIIDLEWYEKSEETHASQIELLETSSTQEPLNASEAFCPRDCMVPVVFPGPVSQEGCCQFTCELLKHIMYQRQQLPLPYEQLKHFYRKPSPQAEEMLKKKPRATTEVSSRKCQQALAELESVLSHLEDFFARTLVPRVLILLGGNALSPKEFYELDLSLLAPYSVDQSLSTAACLRRLFRAIFMADAFSELQAPPLMGTVVMAQGHRNCGEDWFRPKLNYRVPSRGHKLTVTLSCGRPSIRTTAWEDYIWFQAPVTFKGFRE

SEQ ID NO: 33969 - protein, 15 aa, Artificial Sequence
  Synthetic polypeptide
PGGVSLCHPGWSTMA

SEQ ID NO: 33970 - protein, 38 aa, Artificial Sequence
  Synthetic polypeptide
RAESHSVTQAGAQWHDLSSPQLPPPRFKGFSCLSLPSS

SEQ ID NO: 33971 - protein, 26 aa, Artificial Sequence
  Synthetic polypeptide
ARGPRLACSPLSPAPRTGPGTKFGVV

SEQ ID NO: 33972 - protein, 342 aa, Artificial Sequence
  Synthetic polypeptide
PPLYLVDLSYRSQLHTFLLGPLLPSPYPLWVSHPCFSLPHPVYTFLYNSSHCIVSTGSEPLEHGARAWLVLRCLQHLGQGLARNLEWYEKSEETHASQIELLETSSTQEPLNASEAFCPRDCMVPVVFPGPVSQEGCCQFTCELLKHIMYQRQQLPLPYEQLKHFYRKPSPQAEEMLKKKPRATTEVSSRKCQQALAELESVLSHLEDFFARTLVPRVLILLGGNALSPKEFYELDLSLLAPYSVDQSLSTAACLRRLFRAIFMADAFSELQAPPLMGTVVMAQGHRNCGEDWFRPKLNYRVPSRGHKLTVTLSCGRPSIRTTAWEDYIWFQAPVTFKGFRE

SEQ ID NO: 33973 - protein, 21 aa, Artificial Sequence
  Synthetic polypeptide
DRAWHEIWSGMRSPKKLTPPR

SEQ ID NO: 33974 - protein, 53 aa, Artificial Sequence
  Synthetic polypeptide
LTSRLVLIAVIFWNLRDVLPTQHPLAKVSVPHLLWKQAQVSVSLLASPECLLT

SEQ ID NO: 33975 - protein, 5 aa, Artificial Sequence
  Synthetic polypeptide
PPDSC

SEQ ID NO: 33976 - protein, 82 aa, Artificial Sequence
  Synthetic polypeptide
SRLMLADLQTRANCSDFLESKGCFANTTPSGKSVSSSSSVETGPSVSEPPGLPRVSAYVDTTADLDRKLSFSHSDHSSEMSL

SEQ ID NO: 33977 - protein, 264 aa, Artificial Sequence
  Synthetic polypeptide
SRLMLADLQTRANCSDFLESKGCFANTTPSGKSVSSSSSVETGPSVSEPPGLPRVSAYVDTTADLDRKLSFSHSDHSSEMSLPEVQKDKYPEEFSLLKLQTKDGHRPEWTFYPRFSSNIHTYHVGKQCFFNGVFLGNKRSLSERTVDKCFGRKKYDIDPRNGIPKLTPGDNPYMYPEQSKGFHKAGSMLPPVNFSIVPYEKKFDTFIPLEPLPQIPNLPFWVKEKANSLKNEIQEVEELDNWQPAVPLMHMLHLSGALDFPRQS

SEQ ID NO: 33978 - protein, 65 aa, Artificial Sequence
  Synthetic polypeptide
GFPVMLPVKPAELWFALLEVQMCIILILYKYDCSLLDPLPKQSYLHLVGVPQPEGQCRIEYKQRI

SEQ ID NO: 33979 - protein, 52 aa, Artificial Sequence
  Synthetic polypeptide
KCVALPPLLAFSLRPPCEEGACFPFTFCHDCKFPEASQSCFLLSLQNCGLLC

SEQ ID NO: 33980 - protein, 20 aa, Artificial Sequence
  Synthetic polypeptide
ACRTVVCSVRGSDVYYFNTL

SEQ ID NO: 33981 - protein, 54 aa, Artificial Sequence
  Synthetic polypeptide
GLPTHAELLHFGHLHTSFLILISTRPLWKAYLLCLAKQAKIRLKCLRMTWRISF

SEQ ID NO: 33982 - protein, 37 aa, Artificial Sequence
  Synthetic polypeptide
DVPCFPFAFCHDCKFPEASPPMQNCCILDTCIRPFSS

SEQ ID NO: 33983 - protein, 237 aa, Artificial Sequence
  Synthetic polypeptide
VLIISDALKVFGHFPHPLLLPPCKMCLASHLPSAMIVSFLRPPHPCRTVAFWTLAYVLSHPDIHKAIMEGISSVFGKAGKDKIKVSEDDLENLLLIKWCVLETIRLKAPGVITRKVVKPVEILNYIIPSGDLLMLSPFWLHRNPKYFPEPELFKPERWKKANLEKHSFLDCFMAFGSGKFQCPARWFALLEVQMCIILILYKYDCSLLDPLPKQSYLHLVGVPQPEGQCRIEYKQRI

SEQ ID NO: 33984 - protein, 25 aa, Artificial Sequence
  Synthetic polypeptide
DVPCFPFAFCHDCCILDTCIRPFSS

SEQ ID NO: 33985 - protein, 225 aa, Artificial Sequence
  Synthetic polypeptide
VLIISDALKVFGHFPHPLLLPPCKMCLASHLPSAMIVAFWTLAYVLSHPDIHKAIMEGISSVFGKAGKDKIKVSEDDLENLLLIKWCVLETIRLKAPGVITRKVVKPVEILNYIIPSGDLLMLSPFWLHRNPKYFPEPELFKPERWKKANLEKHSFLDCFMAFGSGKFQCPARWFALLEVQMCIILILYKYDCSLLDPLPKQSYLHLVGVPQPEGQCRIEYKQRI

SEQ ID NO: 33986 - protein, 102 aa, Artificial Sequence
  Synthetic polypeptide
YGLGLCPCPNLMLNCNSQCWRWGLVGGDWIMWADFLLWHCSCNRVLTRSDCVKACGTSPYHHCSDHVRHACFPFAFCHDYKFPEASPVMLPIQLAEPWKLTN

SEQ ID NO: 33987 - protein, 32 aa, Artificial Sequence
  Synthetic polypeptide
DMPASPLPSAMIISFLKPPQSCFLYSLQNPGN

SEQ ID NO: 33988 - protein, 165 aa, Artificial Sequence
  Synthetic polypeptide
SLPSHASYTACRTLETDKLALPMSPSPLSPSPIPSPNAKLENSALLTVEPSPQDKNKGFFVDESEPLLRCDSTSSGSSALSRNGSFITKEKKDTVLRQVRLDPCDLQPIFDDMLHFLNPEELRVIEEIPQAEDKLDRLFEIIGVKSQEASQTLLDSVYSHLPDLL

SEQ ID NO: 33989 - protein, 25 aa, Artificial Sequence
  Synthetic polypeptide
WIEFLSSKKLTILWSMTMMLYMMMN

SEQ ID NO: 33990 - protein, 9 aa, Artificial Sequence
  Synthetic polypeptide
GLNFYPQKS

SEQ ID NO: 33991 - protein, 644 aa, Artificial Sequence
  Synthetic polypeptide
IFILKKVDYIVEYDYDAVHDDELTIRVGEIIRNVKKLQEEGWLEGELNGRRGMFPDNFVKEIKRETEFKDDSLPIKRERHGNVASLVQRISTYGLPAGGIQPHPQTKNIKKKTKKRQCKVLFEYIPQNEDELELKVGDIIDINEEVEEGWWSGTLNNKLGLFPSNFVKELEVTDDGETHEAQDDSETVLAGPTSPIPSLGNVSETASGSVTQPKKIRGIGFGDIFKEGSVKLRTRTSSSETEEKKPEKPLILQSLGPKTQSVEITKTDTEGKIKAKEYCRTLFAYEGTNEDELTFKEGEIIHLISKETGEAGWWRGELNGKEGVFPDNFAVQINELDKDFPKPKKPPPPAKAPAPKPELIAAEKKYFSLKPEEKDEKSTLEQKPSKPAAPQVPPKKPTPPTKASNLLRSSGTVYPKRPEKPVPPPPPIAKINGEVSSISSKFETEPVSKLKLDSEQLPLRPKSVDFDSLTVRTSKETDVVNFDDIASSENLLHLTANRPKMPGRRLPGRFNGGHSPTHSPEKILKLPKEEDSANLKPSELKKDTCYSPKPSVYLSTPSSASKANTTAFLTPLEIKAKVETDDVKKNSLDELRAQIIELLCIVEALKKDHGKELEKLRKDLEEEKTMRSNLEMEIEKLKKAVLSS

SEQ ID NO: 33992 - protein, 70 aa, Artificial Sequence
  Synthetic polypeptide
FLHFGRPNQEDHLSPEVYDCIPVVPATWEAELGGSLEPRRLRLQRLEKLAGGGANLMVKKEYFQTILLSR

SEQ ID NO: 33993 - protein, 14 aa, Artificial Sequence
  Synthetic polypeptide
GCRDWRSWLVEGRT

SEQ ID NO: 33994 - protein, 345 aa, Artificial Sequence
  Synthetic polypeptide
AQEVEAAETGEAGWWRGELNGKEGVFPDNFAVQINELDKDFPKPKKPPPPAKAPAPKPELIAAEKKYFSLKPEEKDEKSTLEQKPSKPAAPQVPPKKPTPPTKASNLLRSSGTVYPKRPEKPVPPPPPIAKINGEVSSISSKFETEPVSKLKLDSEQLPLRPKSVDFDSLTVRTSKETDVVNFDDIASSENLLHLTANRPKMPGRRLPGRFNGGHSPTHSPEKILKLPKEEDSANLKPSELKKDTCYSPKPSVYLSTPSSASKANTTAFLTPLEIKAKVETDDVKKNSLDELRAQIIELLCIVEALKKDHGKELEKLRKDLEEEKTMRSNLEMEIEKLKKAVLSS

SEQ ID NO: 33995 - protein, 734 aa, Artificial Sequence
  Synthetic polypeptide
RITTTVSLLQGRRVRSLLHPSSTSLEMGFEDGRNSFIGHQLGGVVEVPNSKDQRVKSARAIQITYYLQTYGSATQDLIGEKWENEFCKLIRKLQEEHQELQLYSLASFSLWRDFHKTSILARSKVLVSLVLILTTATLSSSMKDCLRSKPFLGLLGVLTVCISIITAAGIFFITDGKYNSTLLGIPFFAMGHGTKGVFELLSGWRRTKENLPFKDRIADAYSDVMVTYTMTSSLYFITFGMGASPFTNIEAVKVFCQNMCVSILLNYFYIFSFFGSCLVFAGQLEQNRYHSIFCCKIPSAEYLDRKPVWFQTVMSDGHQQTSHHETNPYQHHFIQHFLREHYNEWITNIYVKPFVVILYLIYASFSFMGCLQISDGANIINLLASDSPSVSYAMVQQKYFSNYSPVIGFYVYEPLEYWNSSVQDDLRRLCSGFTAVSWVEQYYQFLKVSNVSANNKSDFISVLQSSFLKKPEFQHFRNDIIFSKAGDESNIIASRLYLVARTSRDKQKEITEVLEKLRPLSLSKSIRFIVFNPSFVFMDHYSLSVTVPVLIAGFGVLLVLILTFFLVIHPLGNFWLILSVTSIELGVLGLMTLWNVDMDCISILCLIYTLNFAIDHCAPLLFTFVLATEHTRTQCIKSSLQDHGTAILQNVTSFLIGLVPLLFVPSNLTFTLFKCLLLTGGCTLLHCFVILPVFLTFFPPSKKHHKKKKRAKRKEREEIECIEIQENPDHVTTV

SEQ ID NO: 33996 - protein, 29 aa, Artificial Sequence
  Synthetic polypeptide
GVCYIPAPHHWKWDLRMGGTVLLDTNWAG

SEQ ID NO: 33997 - protein, 199 aa, Artificial Sequence
  Synthetic polypeptide
RITTTVSLLQGRRVRSLLHPSSTSLEMGFEDGRNSFIGHQLGGVVEVPNSKDQRVKSARAIQITYYLQTYGSATQDLIGEKWENEFCKLIRKLQEEHQELQLYSLASFSLWRDFHKTSILARSKVLVSLVLILTTATLSSSMKDCLRSKPFLGLLGVLTVCISIITAAGIFFITDGKYNSTLLGIPFFAMGISTEFTSS

SEQ ID NO: 33998 - protein, 24 aa, Artificial Sequence
  Synthetic polypeptide
ITRLHPGPQKFCGRDLAFHGLNKG

SEQ ID NO: 33999 - protein, 538 aa, Artificial Sequence
  Synthetic polypeptide
IKVERIVDKRKNKKGKTEYLVRWKGYDSEDDTWEPEQHLVNCEEYIHDFNRRHTEKQKESTLTRTNRTSPNNARKQISRSTNSNFSKTSPKALVIGKDHESKNSQLFAASQKFRKNTAPSLSSRKNMDLAKSGIKILVPKSPVKSRTAVDGFQSESPEKLDPVEQGQEDTVAPEVAAEKPVGALLGPGAERARMGSRPRIHPLVPQVPGPVTAAMATGLAVNGKGTSPFMDALTANGTTNIQTSVTGVTASKRKFIDDRRDQPFDKRLRFSVRQTESAYRYRDIVVRKQDGFTHILLSTKSSENNSLNPEVMREVQSALSTAAADDSKLVLLSAVGSVFCCGLDFIYFIRRLTDDRKRESTKMAEAIRNFVNTFIQFKKPIIVAVNGPAIGLGASILPLCDVVWANEKAWFQTPYTTFGQSPDGCSTVMFPKIMGGASANEMLLSGRKLTAQEACGKGLVSQVFWPGTFTQEVMVRIKELASCNPVVLEESKALVRCNMKMELEQANERECEVLKKIWGSAQGMDSMLKYLQRKIDEF

SEQ ID NO: 34000 - protein, 40 aa, Artificial Sequence
  Synthetic polypeptide
GQAWWLTAIIPALWEAEAGRSPEVRSSRPAWTTCHFLLLN

SEQ ID NO: 34001 - protein, 29 aa, Artificial Sequence
  Synthetic polypeptide
SQHFGRLRQADHLRSGVQDQPGQHATFYY

SEQ ID NO: 34002 - protein, 105 aa, Artificial Sequence
  Synthetic polypeptide
GQEFKTSLDNMPLFTTKLRIHDTCGVHNLHGLPGVVGGLAGIVAVAMGASNTSMAMQAAALGSSIGTAVVGGLMTGLILKLPLWGQPSDQNCYDDSVYWKVPKTR

SEQ ID NO: 34003 - protein, 18 aa, Artificial Sequence
  Synthetic polypeptide
INKQINKDSLSVDVLAQL

SEQ ID NO: 34004 - protein, 197 aa, Artificial Sequence
  Synthetic polypeptide
IRTLFLWMFWPSFNSAIAEPGDKQCRAIVNTYFSLAACVLTAFAFSSLVEHRGKLNMVHIQNATLAGGVAVGTCADMAIHPFGSMIIGSIAGMVSVLGYKFLTPLFTTKLRIHDTCGVHNLHGLPGVVGGLAGIVAVAMGASNTSMAMQAAALGSSIGTAVVGGLMTGLILKLPLWGQPSDQNCYDDSVYWKVPKTR

SEQ ID NO: 34005 - protein, 139 aa, Artificial Sequence
  Synthetic polypeptide
IRTLFLWMFWPSFNSAIAEPGDKQCRAIVNTYFSLAACVLTAFAFSSLVEHRGKLNMVHIQNATLAGGVAVGTCADMAIHPFGSMIIGSIAGMVSVLGYKFLTVYGHAGSCTGFLYRNSSCWRSDDRFNSKVASLGTAI

SEQ ID NO: 34006 - protein, 37 aa, Artificial Sequence
  Synthetic polypeptide
QRSSHCTPAWGLSFCGCFGPALTRPLLNLETNSAGPL

SEQ ID NO: 34007 - protein, 28 aa, Artificial Sequence
  Synthetic polypeptide
EVEVAVSRDQATALQPGDSLSVDVLAQL

SEQ ID NO: 34008 - protein, 232 aa, Artificial Sequence
  Synthetic polypeptide
PAPVIPATQEAEAEELLEPERWKLQLAEIKPLHSSLGTLFLWMFWPSFNSAIAEPGDKQCRAIVNTYFSLAACVLTAFAFSSLVEHRGKLNMVHIQNATLAGGVAVGTCADMAIHPFGSMIIGSIAGMVSVLGYKFLTPLFTTKLRIHDTCGVHNLHGLPGVVGGLAGIVAVAMGASNTSMAMQAAALGSSIGTAVVGGLMTGLILKLPLWGQPSDQNCYDDSVYWKVPKTR

SEQ ID NO: 34009 - protein, 174 aa, Artificial Sequence
  Synthetic polypeptide
PAPVIPATQEAEAEELLEPERWKLQLAEIKPLHSSLGTLFLWMFWPSFNSAIAEPGDKQCRAIVNTYFSLAACVLTAFAFSSLVEHRGKLNMVHIQNATLAGGVAVGTCADMAIHPFGSMIIGSIAGMVSVLGYKFLTVYGHAGSCTGFLYRNSSCWRSDDRFNSKVASLGTAI

SEQ ID NO: 34010 - protein, 16 aa, Artificial Sequence
  Synthetic polypeptide
KYKKKDSLSVDVLAQL

SEQ ID NO: 34011 - protein, 206 aa, Artificial Sequence
  Synthetic polypeptide
NPVSTKNTKKRTLFLWMFWPSFNSAIAEPGDKQCRAIVNTYFSLAACVLTAFAFSSLVEHRGKLNMVHIQNATLAGGVAVGTCADMAIHPFGSMIIGSIAGMVSVLGYKFLTPLFTTKLRIHDTCGVHNLHGLPGVVGGLAGIVAVAMGASNTSMAMQAAALGSSIGTAVVGGLMTGLILKLPLWGQPSDQNCYDDSVYWKVPKTR

SEQ ID NO: 34012 - protein, 71 aa, Artificial Sequence
  Synthetic polypeptide
MGVVAHACNPSTLGGRGGWITRSGVRDQPDQHAETPSLLKIQKKGLSFCGCFGPALTRPLLNLETNSAGPL

SEQ ID NO: 34013 - protein, 148 aa, Artificial Sequence
  Synthetic polypeptide
NPVSTKNTKKRTLFLWMFWPSFNSAIAEPGDKQCRAIVNTYFSLAACVLTAFAFSSLVEHRGKLNMVHIQNATLAGGVAVGTCADMAIHPFGSMIIGSIAGMVSVLGYKFLTVYGHAGSCTGFLYRNSSCWRSDDRFNSKVASLGTAI

SEQ ID NO: 34014 - protein, 47 aa, Artificial Sequence
  Synthetic polypeptide
WFYKGEFSCTSSLTCHYVRHEFAPHSPSTTIVRPPQPCGTCSKMYML

SEQ ID NO: 34015 - protein, 63 aa, Artificial Sequence
  Synthetic polypeptide
GLPSHVELVPRCTCYDICWVWLPHDLPEEIWLQQCGYQPTRCCFGPPVGHYCTGNPAKPGTEI

SEQ ID NO: 34016 - protein, 376 aa, Artificial Sequence
  Synthetic polypeptide
VCSSFAFHHDCEASPAMWNLFQDVHVMIFVGFGFLMTFLKKYGFSSVGINLLVAALGLQWGTIVQGILQSQGQKFNIGIKNMINADFSAATVLISFGAVLGKTSPTQMLIMTILEIVFFAHNEYLVSEIFKASDIGASMTIHAFGAYFGLAVAGILYRSGLRKGHENEESAYYSDLFAMIGTLFLWMFWPSFNSAIAEPGDKQCRAIVNTYFSLAACVLTAFAFSSLVEHRGKLNMVHIQNATLAGGVAVGTCADMAIHPFGSMIIGSIAGMVSVLGYKFLTPLFTTKLRIHDTCGVHNLHGLPGVVGGLAGIVAVAMGASNTSMAMQAAALGSSIGTAVVGGLMTGLILKLPLWGQPSDQNCYDDSVYWKVPKTR

SEQ ID NO: 34017 - protein, 318 aa, Artificial Sequence
  Synthetic polypeptide
VCSSFAFHHDCEASPAMWNLFQDVHVMIFVGFGFLMTFLKKYGFSSVGINLLVAALGLQWGTIVQGILQSQGQKFNIGIKNMINADFSAATVLISFGAVLGKTSPTQMLIMTILEIVFFAHNEYLVSEIFKASDIGASMTIHAFGAYFGLAVAGILYRSGLRKGHENEESAYYSDLFAMIGTLFLWMFWPSFNSAIAEPGDKQCRAIVNTYFSLAACVLTAFAFSSLVEHRGKLNMVHIQNATLAGGVAVGTCADMAIHPFGSMIIGSIAGMVSVLGYKFLTVYGHAGSCTGFLYRNSSCWRSDDRFNSKVASLGTAI

SEQ ID NO: 34018 - protein, 191 aa, Artificial Sequence
  Synthetic polypeptide
ADEAAEAGEMLVHTYSSMDRHDGVPSHSSRLSQLGSVSQGPYSSAPPLSHTPSSDFQPPYFPPPYQPLPYHQSQDPYSHVNDPYSLNPLHQPQQHPWGQRQRQEVGSEAGSLLPQPRAALPQLSGLDPRRDYHSVRRPDVLLHSAHHGLDAGMGDSLSLHGLGHPGMEDVQSVEDANNSGMNLLDQSVIKK

SEQ ID NO: 34019 - protein, 15 aa, Artificial Sequence
  Synthetic polypeptide
ARRTRRTRRPRRARC

SEQ ID NO: 34020 - protein, 130 aa, Artificial Sequence
  Synthetic polypeptide
RGGLGGRGGRGGRDVSPHLFIHGPARWCPEPQLAALPAGLGVPRTLLERPAAVPHPVVGLPAALLPTPLPAAPLPPEPGPLLPRQRPLLPEPTAPAPATSLGATAAARSGFGSRLSPAPASGRLAPALGP

SEQ ID NO: 34021 - protein, 451 aa, Artificial Sequence
  Synthetic polypeptide
ADEAAEAGEMLVHTYSSMDRHDGVPSHSSRLSQLGSVSQGPYSSAPPLSHTPSSDFQPPYFPPPYQPLPYHQSQDPYSHVNDPYSLNPLHQPQQHPWGQRQRQEVGSEAGSLLPQPRAALPQLSGLDPRRDYHSVRRPDVLLHSAHHGLDAGMGDSLSLHGLGHPGMEDVQSVEDANNSGMNLLDQSVIKKVPVPPKSVTSLMMNKDGFLGGMSVNTGEVFCSVPGRLSLLSSTSKYKVTVGEVQRRLSPPECLNASLLGGVLRRAKSKNGGRSLRERLEKIGLNLPAGRRKAANVTLLTSLVEGEAVHLARDFGYICETEFPAKAVSEYLNRQHTDPSDLHSRKNMLLATKQLCKEFTDLLAQDRTPIGNSRPSPILEPGIQSCLTHFSLITHGFGAPAICAALTALQNYLTEALKGMDKMFLNNTTTNRHTSGEGPGSKTGDKEEKHRK

SEQ ID NO: 34022 - protein, 182 aa, Artificial Sequence
  Synthetic polypeptide
ADEAAEAGEDRHDGVPSHSSRLSQLGSVSQGPYSSAPPLSHTPSSDFQPPYFPPPYQPLPYHQSQDPYSHVNDPYSLNPLHQPQQHPWGQRQRQEVGSEAGSLLPQPRAALPQLSGLDPRRDYHSVRRPDVLLHSAHHGLDAGMGDSLSLHGLGHPGMEDVQSVEDANNSGMNLLDQSVIKK

SEQ ID NO: 34023 - protein, 81 aa, Artificial Sequence
  Synthetic polypeptide
ARRTRRTRRPRRARTGTMVSRATARGSPSWARCPKDPTRAPRRCPTPRRRTSSRPTSHPPTSRSPTTRARTPTPTSTTPTP

SEQ ID NO: 34024 - protein, 121 aa, Artificial Sequence
  Synthetic polypeptide
RGGLGGRGGRGGRGPARWCPEPQLAALPAGLGVPRTLLERPAAVPHPVVGLPAALLPTPLPAAPLPPEPGPLLPRQRPLLPEPTAPAPATSLGATAAARSGFGSRLSPAPASGRLAPALGP

SEQ ID NO: 34025 - protein, 442 aa, Artificial Sequence
  Synthetic polypeptide
ADEAAEAGEDRHDGVPSHSSRLSQLGSVSQGPYSSAPPLSHTPSSDFQPPYFPPPYQPLPYHQSQDPYSHVNDPYSLNPLHQPQQHPWGQRQRQEVGSEAGSLLPQPRAALPQLSGLDPRRDYHSVRRPDVLLHSAHHGLDAGMGDSLSLHGLGHPGMEDVQSVEDANNSGMNLLDQSVIKKVPVPPKSVTSLMMNKDGFLGGMSVNTGEVFCSVPGRLSLLSSTSKYKVTVGEVQRRLSPPECLNASLLGGVLRRAKSKNGGRSLRERLEKIGLNLPAGRRKAANVTLLTSLVEGEAVHLARDFGYICETEFPAKAVSEYLNRQHTDPSDLHSRKNMLLATKQLCKEFTDLLAQDRTPIGNSRPSPILEPGIQSCLTHFSLITHGFGAPAICAALTALQNYLTEALKGMDKMFLNNTTTNRHTSGEGPGSKTGDKEEKHRK

SEQ ID NO: 34026 - protein, 64 aa, Artificial Sequence
  Synthetic polypeptide
SDPSSAASFWTVDKSFHLSDISSYSPNTGNSDSTGHSPCEGPHEQDCGPAGCRGSCGVGPVCLL

SEQ ID NO: 34027 - protein, 218 aa, Artificial Sequence
  Synthetic polypeptide
MIPALQLAFGLWTNPFTCQTSPVTARTLETLIRLATAHAKARMSKTVDLQDAEEAVELVQYAYFKKVLEKEKKRKKRSEDESETEDEEEKSQEDQEQKRKRRKTRQPDAKDGDSYDPYDFSDTEEEMPQVHTPKTADSQETKESQKVELSESRLKAFKVALLDVFREAHAQSIGMNRLTESINRDSEEPFSSVEIQAALSKMQDDNQVMVSEGIIFLI

SEQ ID NO: 34028 - protein, 23 aa, Artificial Sequence
  Synthetic polypeptide
LLDCGQILSPVRHLQLQPEHWKL

SEQ ID NO: 34029 - protein, 243 aa, Artificial Sequence
  Synthetic polypeptide
MIPALQLAFGLWTNPFTCQTSPVTARTLETLIRLATAHAKARMSKTVDLQDAEEAVELVQYAYFKKVLEKEKKRKKRSEDESETEDEEEKSQEDQEQKRKRRKTRQPDAKDGDSYDPYDFSDTEEEMPQVHTPKTADSQETKESQKVELSESRDGISPCCPGWSWTPGLKQSFYLSLPKGWDYRHKPLCLFDLILFNDCRVSMVEGIQGGPLGCVPGSSCAVNRHESPHRIHQPGQRRALLFS

SEQ ID NO: 34030 - protein, 29 aa, Artificial Sequence
  Synthetic polypeptide
VKPIAKGKILHDSNNMRKTREFIRAKFGS

SEQ ID NO: 34031 - protein, 784 aa, Artificial Sequence
  Synthetic polypeptide
YEEDQGIYQSKVRELISDNQYRLIVNVNDLRRKNEKRANRLLNNAFEELVAFQRALKDFVASIDATYAKQYEEFYVGLEGSFGSKHVSPRTLTSCFLSCVVCVEGIVTKCSLVRPKVVRSVHYCPATKKTIERRYSDLTTLVAFPSSSVYPTKDEENNPLETEYGLSVYKDHQTITIQEMPEKAPAGQLPRSVDVILDDDLVDKAKPGDRVQVVGTYRCLPGKKGGYTSGTFRTVLIACNVKQMSKDAQPSFSAEDIAKIKKFSKTRSKDIFDQLAKSLAPSIHGHDYVKKAILCLLLGGVERDLENGSHIRGDINILLIGDPSVAKSQLLRYVLCTAPRAIPTTGRGSSGVGLTAAVTTDQETGERRLEAGAMVLADRGVVCIDEFDKMSDMDRTAIHEVMEQGRVTIAKAGIHARLNARCSVLAAANPVYGRYDQYKTPMENIGLQDSLLSRFDLLFIMLDQMDPEQDREISDHVLRMHRYRAPGEQDGDAMPLGSAVDILATDDPNFSQEDQQDTQIYEKHDNLLHGTKKKKEKMVSAAFMKKYIHVAKIIKPVLTQESATYIAEEYSRLRSQDSMSSDTARTSPVTARTLETLIRLATAHAKARMSKTVDLQDAEEAVELVQYAYFKKVLEKEKKRKKRSEDESETEDEEEKSQEDQEQKRKRRKTRQPDAKDGDSYDPYDFSDTEEEMPQVHTPKTADSQETKESQKVELSESRLKAFKVALLDVFREAHAQSIGMNRLTESINRDSEEPFSSVEIQAALSKMQDDNQVMVSEGIIFLI

SEQ ID NO: 34032 - protein, 299 aa, Artificial Sequence
  Synthetic polypeptide
GWQDGRSRTALVGSSQRDQRRRWMISALPTEASLPATTDLPEFFVASYKWPGWTHGPLDQKNCAASWAFSTASVAADRIAIQSKGRYTANLSPQNLISCCAKNRHGCNSGSIDRAWWYLRKRGLVSHACYPLFKDQNATNNGCAMASRSDGRGKRHATKPCPNNVEKSNRIYQCSPPYRVSSNETEIMKEIMQNGPVQAIMQVREDFFHYKTGIYRHVTSTNKESEKYRKLQTHAVKLTGWGTLRGAQGQKEKFWIAANSWGKSWGENGYFRILRGVNESDIEKLIIAAWGQLTSSDEP

SEQ ID NO: 34033 - protein, 54 aa, Artificial Sequence
  Synthetic polypeptide
FLHYQLRLLYLQQLIFQSFLLLLINGLDGLMAHWIKKIVLHPGHFPLQVWLLTE

SEQ ID NO: 34034 - protein, 16 aa, Artificial Sequence
  Synthetic polypeptide
ASETLVLKTESAGLLA

SEQ ID NO: 34035 - protein, 70 aa, Artificial Sequence
  Synthetic polypeptide
AWKQISNQLYLQMPAASGDLLIATSRETWKATQVNCSWIPEHQKLWCSRPNRLGFWPRIRKASHDPLRHP

SEQ ID NO: 34036 - protein, 160 aa, Artificial Sequence
  Synthetic polypeptide
TALGFLSIRNSGAQDRIGWAFGLGLERLAMILYDIPDIRLFWCEDERFLKQFCVSNINQKVKFQPLSKYPAVINDISFWLPSENYAENDFYDLVRTIGGDLVEKVDLIDKFVHPKTHKTSHCYRITYRHMERTLSQREVRHIHQALQEAAVQLLGVEGRF

SEQ ID NO: 34037 - protein, 4064 aa, Artificial Sequence
  Synthetic polypeptide
PLISDIHVTGESEDMSAKERLLLWTQQATEGYAGIRCENFTTCWRDGKLFNAIIHKYRPDLIDMNTVAVQSNLANLEHAFYVAEKIGVIRLLDPEDVDVSSPDEKSVITYVSSLYDAFPKVPEGGEGIGANDVEVKWIEYQNMVNYLIQWIRHHVTTMSERTFPNNPVELKALYNQYLQFKETEIPPKETEKSKIKRLYKLLEIWIEFGRIKLLQGYHPNDIEKEWGKLIIAMLEREKALRPEVERLEMLQQIANRVQRDSVICEDKLILAGNALQSDSKRLESGVQFQNEAEIAGYILECENLLRQHVIDVQILIDGKYYQADQLVQRVAKLRDEIMALRNECSSVYSKGRILTTEQTKLMISGITQSLNSGFAQTLHPSLTSGLTQSLTPSLTSSSMTSGLSSGMTSRLTPSVTPAYTPGFPSGLVPNFSSGVEPNSLQTLKLMQIRKPLLKSSLLDQNLTEEEINMKFVQDLLNWVDEMQVQLDRTEWGSDLPSVESHLENHKNVHRAIEEFESSLKEAKISEIQMTAPLKLTYAEKLHRLESQYAKLLNTSRNQERHLDTLHNFVSRATNELIWLNEKEEEEVAYDWSERNTNIARKKDYHAELMRELDQKEENIKSVQEIAEQLLLENHPARLTIEAYRAAMQTQWSWILQLCQCVEQHIKENTAYFEFFNDAKEATDYLRNLKDAIQRKYSCDRSSSIHKLEDLVQESMEEKEELLQYKSTIANLMGKAKTIIQLKPRNSDCPLKTSIPIKAICDYRQIEITIYKDDECVLANNSHRAKWKVISPTGNEAMVPSVCFTVPPPNKEAVDLANRIEQQYQNVLTLWHESHINMKSVVSWHYLINEIDRIRASNVASIKTMLPGEHQQVLSNLQSRFEDFLEDSQESQVFSGSDITQLEKEVNVCKQYYQELLKSAEREEQEESVYNLYISEVRNIRLRLENCEDRLIRQIRTPLERDDLHESVFRITEQEKLKKELERLKDDLGTITNKCEEFFSQAAASSSVPTLRSELNVVLQNMNQVYSMSSTYIDKLKTVNLVLKNTQAAEALVKLYETKLCEEEAVIADKNNIENLISTLKQWRSEVDEKRQVFHALEDELQKAKAISDEMFKTYKERDLDFDWHKEKADQLVERWQNVHVQIDNRLRDLEGIGKSLKYYRDTYHPLDDWIQQVETTQRKIQENQPENSKTLATQLNQQKMLVSEIEMKQSKMDECQKYAEQYSATVKDYELQTMTYRAMVDSQQKSPVKRRRMQSSADLIIQEFMDLRTRYTALVTLMTQYIKFAGDSLKRLEEEEKSLEEEKKEHVEKAKELQKWVSNISKTLKDAEKAGKPPFSKQKISSEEISTKKEQLSEALQTIQLFLAKHGDKMTDEERNELEKQVKTLQESYNLLFSESLKQLQESQTSGDVKVEEKLDKVIAGTIDQTTGEVLSVFQAVLRGLIDYDTGIRLLETQLMISGLISPELRKCFDLKDAKSHGLIDEQILCQLKELSKAKEIISAASPTTIPVLDALAQSMITESMAIKVLEILLSTGSLVIPATGEQLTLQKAFQQNLVSSALFSKVLERQNMCKDLIDPCTSEKVSLIDMVQRSTLQENTGMWLLPVRPQEGGRITLKCGRNISILRAAHEGLIDRETMFRLLSAQLLSGGLINSNSGQRMTVEEAVREGVIDRDTASSILTYQVQTGGIIQSNPAKRLTVDEAVQCDLITSSSALLVLEAQRGYVGLIWPHSGEIFPTSSSLQQELITNELAYKILNGRQKIAALYIPESSQVIGLDAAKQLGIIDNNTASILKNITLPDKMPDLGDLEACKNARRWLSFCKFQPSTVHDYRQEEDVFDGEEPVTTQTSEETKKLFLSYLMINSYMDANTGQRLLLYDGDLDEAVGMLLEGCHAEFDGNTAIKECLDVLSSSGVFLNNASGREKDECTATPSSFNKCHCGEPEHEETPENRKCAIDEEFNEMRNTVINSEFSQSGKLASTISIDPKVNSSPSVCVPSLISYLTQTELADISMLRSDSENILTNYENQSRVETNERANECSHSKNIQNFPSDLIENPIMKSKMSKFCGVNETENEDNTNRDSPIFDYSPRLSALLSHDKLMHSQGSFNDTHTPESNGNKCEAPALSFSDKTMLSGQRIGEKFQDQFLGIAAINISLPGEQYGQKSLNMISSNPQVQYHNDKYISNTSGEDEKTHPGFQQMPEDKEDESEIEEYSCAVTPGGDTDNAIVSLTCATPLLDETISASDYETSLLNDQQNNTGTDTDSDDDFYDTPLFEDDDHDSLLLDGDDRDCLHPEDYDTLQEENDETASPADVFYDVSKENENSMVPQGAPVGSLSVKNKAHCLQDFLMDVEKDELDSGEKIHLNPVGSDKVNGQSLETGSERECTNILEGDESDSLTDYDIVGGKESFTASLKFDDSGSWRGRKEEYVTGQEFHSDTDHLDSMQSEESYGDYIYDSNDQDDDDDDGIDEEGGGIRDENGKPRCQNVAEDMDIQLCASILNENSDENENINTMILLDKMHSCSSLEKQQRVNVVQLASPSENNLVTEKSNLPEYTTEIAGKSKENLLNHEMVLKDVLPPIIKDTESEKTFGPASISHDNNNISSTSELGTDLANTKVKLIQGSELPELTDSVKGKDEYFKNMTPKVDSSLDHIICTEPDLIGKPAEESHLSLIASVTDKDPQGNGSDLIKGRDGKSDILIEDETSIQKMYLGEGEVLVEGLVEEENRHLKLLPGKNTRDSFKLINSQFPFPQITNNEELNQKGSLKKATVTLKDEPNNLQIIVSKSPVQFENLEEIFDTSVSKEISDDITSDITSWEGNTHFEESFTDGPEKELDLFTYLKHCAKNIKAKDVAKPNEDVPSHVLITAPPMKEHLQLGVNNTKEKSTSTQKDSPLNDMIQSNDLCSKESISGGGTEISQFTPESIEATLSILSRKHVEDVGKNDFLQSERCANGLGNDNSSNTLNTDYSFLEINNKKERIEQQLPKEQALSPRSQEKEVQIPELSQVFVEDVKDILKSRLKEGHMNPQEVEEPSACADTKILIQNLIKRITTSQLVNEASTVPSDSQMSDSSGVSPMTNSSELKPESRDDPFCIGNLKSELLLNILKQDQHSQKITGVFELMRELTHMEYDLEKRGITSKVLPLQLENIFYKLLADGYSEKIEHVGDFNQKACSTSEMMEEKPHILGDIKSKEGNYYSPNLETVKEIGLESSTVWASTLPRDEKLKDLCNDFPSHLECTSGSKEMASGDSSTEQFSSELQQCLQHTEKMHEYLTLLQDMKPPLDNQESLDNNLEALKNQLRQLETFELGLAPIAVILRKDMKLAEEFLKSLPSDFPRGHVEELSISHQSLKTAFSSLSNVSSERTKQIMLAIDSEMSKLAVSHEEFLHKLKSFSDWVSEKSKSVKDIEIVNVQDSEYVKKRLEFLKNVLKDLGHTKMQLETTAFDVQFFISEYAQDLSPNQSKQLLRLLNTTQKCFLDVQESVTTQVERLETQLHLEQDLDDQKIVAERQQEYKEKLQGICDLLTQTENRLIGHQEAFMIGDGTVELKKYQSKQEELQKDMQGSAQALAEVVKNTENFLKENGEKLSQEDKALIEQKLNEAKIKCEQLNLKAEQSKKELDKVVTTAIKEETEKVAAVKQLEESKTKIENLLDWLSNVDKDSERAGTKHKQVIEQNGTHFQEGDGKSAIGEEDEVNGNLLETDVDGQVGTTQENLNQQYQKVKAQHEKIISQHQAVIIATQSAQVLLEKQGQYLSPEEKEKLQKNMKELKVHYETALAESEKKMKLTHSLQEELEKFDADYTEFEHWLQQSEQELENLEAGADDINGLMTKLKRQKSFSEDVISHKGDLRYITISGNRVLEAAKSCSKRDGGKVDTSATHREVQRKLDHATDRFRSLYSKCNVLGNNLKDLVDKYQHYEDASCGLLAGLQACEATASKHLSEPIAVDPKNLQRQLEETKALQGQISSQQVAVEKLKKTAEVLLDARGSLLPAKNDIQKTLDDIVGRYEDLSKSVNERNEKLQITLTRSLSVQDGLDEMLDWMGNVESSLKEQDVGTGYCRSSEQYKCHE

SEQ ID NO: 34038 - protein, 12 aa, Artificial Sequence
  Synthetic polypeptide
SQLWNYCVTPDI

SEQ ID NO: 34039 - protein, 7436 aa, Artificial Sequence
  Synthetic polypeptide
PLISDIHVTGESEDMSAKERLLLWTQQATEGYAGIRCENFTTCWRDGKLFNAIIHKYRPDLIDMNTVAVQSNLANLEHAFYVAEKIGVIRLLDPEDVDVSSPDEKSVITYVSSLYDAFPKVPEGGEGIGANDVEVKWIEYQNMVNYLIQWIRHHVTTMSERTFPNNPVELKALYNQYLQFKETEIPPKETEKSKIKRLYKLLEIWIEFGRIKLLQGYHPNDIEKEWGKLIIAMLEREKALRPEVERLEMLQQIANRVQRDSVICEDKLILAGNALQSDSKRLESGVQFQNEAEIAGYILECENLLRQHVIDVQILIDGKYYQADQLVQRVAKLRDEIMALRNECSSVYSKGRILTTEQTKLMISGITQSLNSGFAQTLHPSLTSGLTQSLTPSLTSSSMTSGLSSGMTSRLTPSVTPAYTPGFPSGLVPNFSSGVEPNSLQTLKLMQIRKPLLKSSLLDQNLTEEEINMKFVQDLLNWVDEMQVQLDRTEWGSDLPSVESHLENHKNVHRAIEEFESSLKEAKISEIQMTAPLKLTYAEKLHRLESQYAKLLNTSRNQERHLDTLHNFVSRATNELIWLNEKEEEEVAYDWSERNTNIARKKDYHAELMRELDQKEENIKSVQEIAEQLLLENHPARLTIEAYRAAMQTQWSWILQLCQCVEQHIKENTAYFEFFNDAKEATDYLRNLKDAIQRKYSCDRSSSIHKLEDLVQESMEEKEELLQYKSTIANLMGKAKTIIQLKPRNSDCPLKTSIPIKAICDYRQIEITIYKDDECVLANNSHRAKWKVISPTGNEAMVPSVCFTVPPPNKEAVDLANRIEQQYQNVLTLWHESHINMKSVVSWHYLINEIDRIRASNVASIKTMLPGEHQQVLSNLQSRFEDFLEDSQESQVFSGSDITQLEKEVNVCKQYYQELLKSAEREEQEESVYNLYISEVRNIRLRLENCEDRLIRQIRTPLERDDLHESVFRITEQEKLKKELERLKDDLGTITNKCEEFFSQAAASSSVPTLRSELNVVLQNMNQVYSMSSTYIDKLKTVNLVLKNTQAAEALVKLYETKLCEEEAVIADKNNIENLISTLKQWRSEVDEKRQVFHALEDELQKAKAISDEMFKTYKERDLDFDWHKEKADQLVERWQNVHVQIDNRLRDLEGIGKSLKYYRDTYHPLDDWIQQVETTQRKIQENQPENSKTLATQLNQQKMLVSEIEMKQSKMDECQKYAEQYSATVKDYELQTMTYRAMVDSQQKSPVKRRRMQSSADLIIQEFMDLRTRYTALVTLMTQYIKFAGDSLKRLEEEEKSLEEEKKEHVEKAKELQKWVSNISKTLKDAEKAGKPPFSKQKISSEEISTKKEQLSEALQTIQLFLAKHGDKMTDEERNELEKQVKTLQESYNLLFSESLKQLQESQTSGDVKVEEKLDKVIAGTIDQTTGEVLSVFQAVLRGLIDYDTGIRLLETQLMISGLISPELRKCFDLKDAKSHGLIDEQILCQLKELSKAKEIISAASPTTIPVLDALAQSMITESMAIKVLEILLSTGSLVIPATGEQLTLQKAFQQNLVSSALFSKVLERQNMCKDLIDPCTSEKVSLIDMVQRSTLQENTGMWLLPVRPQEGGRITLKCGRNISILRAAHEGLIDRETMFRLLSAQLLSGGLINSNSGQRMTVEEAVREGVIDRDTASSILTYQVQTGGIIQSNPAKRLTVDEAVQCDLITSSSALLVLEAQRGYVGLIWPHSGEIFPTSSSLQQELITNELAYKILNGRQKIAALYIPESSQVIGLDAAKQLGIIDNNTASILKNITLPDKMPDLGDLEACKNARRWLSFCKFQPSTVHDYRQEEDVFDGEEPVTTQTSEETKKLFLSYLMINSYMDANTGQRLLLYDGDLDEAVGMLLEGCHAEFDGNTAIKECLDVLSSSGVFLNNASGREKDECTATPSSFNKCHCGEPEHEETPENRKCAIDEEFNEMRNTVINSEFSQSGKLASTISIDPKVNSSPSVCVPSLISYLTQTELADISMLRSDSENILTNYENQSRVETNERANECSHSKNIQNFPSDLIENPIMKSKMSKFCGVNETENEDNTNRDSPIFDYSPRLSALLSHDKLMHSQGSFNDTHTPESNGNKCEAPALSFSDKTMLSGQRIGEKFQDQFLGIAAINISLPGEQYGQKSLNMISSNPQVQYHNDKYISNTSGEDEKTHPGFQQMPEDKEDESEIEEYSCAVTPGGDTDNAIVSLTCATPLLDETISASDYETSLLNDQQNNTGTDTDSDDDFYDTPLFEDDDHDSLLLDGDDRDCLHPEDYDTLQEENDETASPADVFYDVSKENENSMVPQGAPVGSLSVKNKAHCLQDFLMDVEKDELDSGEKIHLNPVGSDKVNGQSLETGSERECTNILEGDESDSLTDYDIVGGKESFTASLKFDDSGSWRGRKEEYVTGQEFHSDTDHLDSMQSEESYGDYIYDSNDQDDDDDDGIDEEGGGIRDENGKPRCQNVAEDMDIQLCASILNENSDENENINTMILLDKMHSCSSLEKQQRVNVVQLASPSENNLVTEKSNLPEYTTEIAGKSKENLLNHEMVLKDVLPPIIKDTESEKTFGPASISHDNNNISSTSELGTDLANTKVKLIQGSELPELTDSVKGKDEYFKNMTPKVDSSLDHIICTEPDLIGKPAEESHLSLIASVTDKDPQGNGSDLIKGRDGKSDILIEDETSIQKMYLGEGEVLVEGLVEEENRHLKLLPGKNTRDSFKLINSQFPFPQITNNEELNQKGSLKKATVTLKDEPNNLQIIVSKSPVQFENLEEIFDTSVSKEISDDITSDITSWEGNTHFEESFTDGPEKELDLFTYLKHCAKNIKAKDVAKPNEDVPSHVLITAPPMKEHLQLGVNNTKEKSTSTQKDSPLNDMIQSNDLCSKESISGGGTEISQFTPESIEATLSILSRKHVEDVGKNDFLQSERCANGLGNDNSSNTLNTDYSFLEINNKKERIEQQLPKEQALSPRSQEKEVQIPELSQVFVEDVKDILKSRLKEGHMNPQEVEEPSACADTKILIQNLIKRITTSQLVNEASTVPSDSQMSDSSGVSPMTNSSELKPESRDDPFCIGNLKSELLLNILKQDQHSQKITGVFELMRELTHMEYDLEKRGITSKVLPLQLENIFYKLLADGYSEKIEHVGDFNQKACSTSEMMEEKPHILGDIKSKEGNYYSPNLETVKEIGLESSTVWASTLPRDEKLKDLCNDFPSHLECTSGSKEMASGDSSTEQFSSELQQCLQHTEKMHEYLTLLQDMKPPLDNQESLDNNLEALKNQLRQLETFELGLAPIAVILRKDMKLAEEFLKSLPSDFPRGHVEELSISHQSLKTAFSSLSNVSSERTKQIMLAIDSEMSKLAVSHEEFLHKLKSFSDWVSEKSKSVKDIEIVNVQDSEYVKKRLEFLKANNVLKDLGHTKMQLETTAFDVQFFISEYAQDLSPNQSKQLLRLLNTTQKCFLDVQESVTTQVERLETQLHLEQDLDDQKIVAERQQEYKEKLQGICDLLTQTENRLIGHQEAFMIGDGTVELKKYQSKQEELQKDMQGSAQALAEVVKNTENFLKENGEKLSQEDKALIEQKLNEAKIKCEQLNLKAEQSKKELDKVVTTAIKEETEKVAAVKQLEESKTKIENLLDWLSNVDKDSERAGTKHKQVIEQNGTHFQEGDGKSAIGEEDEVNGNLLETDVDGQVGTTQENLNQQYQKVKAQHEKIISQHQAVIIATQSAQVLLEKQGQYLSPEEKEKLQKNMKELKVHYETALAESEKKMKLTHSLQEELEKFDADYTEFEHWLQQSEQELENLEAGADDINGLMTKLKRQKSFSEDVISHKGDLRYITISGNRVLEAAKSCSKRDGGKVDTSATHREVQRKLDHATDRFRSLYSKCNVLGNNLKDLVDKYQHYEDASCGLLAGLQACEATASKHLSEPIAVDPKNLQRQLEETKALQGQISSQQVAVEKLKKTAEVLLDARGSLLPAKNDIQKTLDDIVGRYEDLSKSVNERNEKLQITLTRSLSVQDGLDEMLDWMGNVESSLKEQGQVPLNSTALQDIISKNIMLEQDIAGRQSSINAMNEKVKKFMETTDPSTASSLQAKMKDLSARFSEASHKHKETLAKMEELKTKVELFENLSEKLQTFLETKTQALTEVDVPGKDVTELSQYMQESTSEFLEHKKHLEVLHSLLKEISSHGLPSDKALVLEKTNNLSKKFKEMEDTIKEKKEAVTSCQEQLDAFQVLVKSLKSWIKETTKKVPIVQPSFGAEDLGKSLEDTKKLQEKWSLKTPEIQKVNNSGISLCNLISAVTTPAKAIAAVKSGGAVLNGEGTATNTEEFWANKGLTSIKKDMTDISHGYEDLGLLLKDKIAELNTKLSKLQKAQEESSAMMQWLQKMNKTATKWQQTPAPTDTEAVKTQVEQNKSFEAELKQNVNKVQELKDKLTELLEENPDTPEAPRWKQMLTEIDSKWQELNQLTIDRQQKLEESSNNLTQFQTVEAQLKQWLVEKELMVSVLGPLSIDPNMLNTQRQQVQILLQEFATRKPQYEQLTAAGQGILSRPGEDPSLRGIVKEQLAAVTQKWDSLTGQLSDRCDWIDQAIVKSTQYQSLLRSLSDKLSDLDNKLSSSLAVSTHPDAMNQQLETAQKMKQEIQQEKKQIKVAQALCEDLSALVKEEYLKAELSRQLEGILKSFKDVEQKAENHVQHLQSACASSHQFQQMSRDFQAWLDTKKEEQNKSHPISAKLDVLESLIKDHKDFSKTLTAQSHMYEKTIAEGENLLLKTQGSEKAALQLQLNTIKTNWDTFNKQVKERENKLKESLEKALKYKEQVETLWPWIDKCQNNLEEIKFCLDPAEGENSIAKLKSLQKEMDQHFGMVELLNNTANSLLSVCEIDKEVVTDENKSLIQKVDMVTEQLHSKKFCLENMTQKFKEFQEVSKESKRQLQCAKEQLDIHDSLGSQAYSNKYLTMLQTQQKSLQALKHQVDLAKRLAQDLVVEASDSKGTSDVLLQVETIAQEHSTLSQQVDEKCSFLETKLQGIGHFQNTIREMFSQFAEFDDELDSMAPVGRDAETLQKQKETIKAFLKKLEALMASNDNANKTCKMMLATEETSPDLVGIKRDLEALSKQCNKLLDRAQAREEQVEGTIKRLEEFYSKLKEFSILLQKAEEHEESQGPVGMETETINQQLNMFKVFQKEEIEPLQGKQQDVNWLGQGLIQSAAKSTSTQGLEHDLDDVNARWKTLNKKVAQRAAQLQEALLHCGRFQDALESLLSWMVDTEELVANQKPPSAEFKVVKAQIQEQKLLQRLLDDRKSTVEVIKREGEKIATTAEPADKVKILKQLSLLDSRWEALLNKAETRNRQLEGISVVAQQFHETLEPLNEWLTTIEKRLVNCEPIGTQASKLEEQIAQHKALEDDIINHNKHLHQAVSIGQSLKVLSSREDKDMVQSKLDFSQVWYIEIQEKSHSRSELLQQALCNAKIFGEDEVELMNWLNEVHDKLSKLSVQDYSTEGLWKQQSELRVLQEDILLRKQNVDQALLNGLELLKQTTGDEVLIIQDKLEAIKARYKDITKLSTDVAKTLEQALQLARRLHSTHEELCTWLDKVEVELLSYETQVLKGEEASQAQMRPKELKKEAKNNKALLDSLNEVSSALLELVPWRAREGLEKMVAEDNERYRLVSDTITQKVEEIDAAILRSQQFDQAADAELSWITETEKKLMSLGDIRLEQDQTSAQLQVQKTFTMEILRHKDIIDDLVKSGHKIMTACSEEEKQSMKKKLDKVLKNYDTICQINSERYLQLERAQSLVNQFWETYEELWPWLTETQSIISQLPAPALEYETLRQQQEEHRQLRELIAEHKPHIDKMNKTGPQLLELSPGEGFSIQEKYVAADTLYSQIKEDVKKRAVALDEAISQSTQFHDKIDQILESLERIVERLRQPPSISAEVEKIKEQISENKNVSVDMEKLQPLYETLKQRGEEMIARSGGTDKDISAKAVQDKLDQMVFIWENIHTLVEEREAKLLDVMELAEKFWCDHMSLIVTIKDTQDFIRDLEDPGIDPSVVKQQQEAAETIREEIDGLQEELDIVINLGSELIAACGEPDKPIVKKSIDELNSAWDSLNKAWKDRIDKLEEAMQAAVQYQDGLQAVFDWVDIAGGKLASMSPIGTDLETVKQQIEELKQFKSEAYQQQIEMERLNHQAELLLKKVTEESDKHTVQDPLMELKLIWDSLEERIINRQHKLEGALLALGQFQHALDELLAWLTHTEGLLSEQKPVGGDPKAIEIELAKHHVLQNDVLAHQSTVEAVNKAGNDLIESSAGEEASNLQNKLEVLNQRWQNVLEKTEQRKQQLDGALRQAKGFHGEIEDLQQWLTDTERHLLASKPLGGLPETAKEQLNVHMEVCAAFEAKEETYKSLMQKGQQMLARCPKSAETNIDQDINNLKEKWESVETKLNERKTKLEEALNLAMEFHNSLQDFINWLTQAEQTLNVASRPSLILDTVLFQIDEHKVFANEVNSHREQIIELDKTGTHLKYFSQKQDVVLIKNLLISVQSRWEKVVQRLVERGRSLDDARKRAKQFHEAWSKLMEWLEESEKSLDSELEIANDPDKIKTQLAQHKEFQKSLGAKHSVYDTTNRTGRSLKEKTSLADDNLKLDDMLSELRDKWDTICGKSVERQNKLEEALLFSGQFTDALQALIDWLYRVEPQLAEDQPVHGDIDLVMNLIDNHKAFQKELGKRTSSVQALKRSARELIEGSRDDSSWVKVQMQELSTRWETVCALSISKQTRLEAALRQAEEFHSVVHALLEWLAEAEQTLRFHGVLPDDEDALRTLIDQHKEFMKKLEEKRAELNKATTMGDTVLAICHPDSITTIKHWITIIRARFEEVLAWAKQHQQRLASALAGLIAKQELLEALLAWLQWAETTLTDKDKEVIPQEIEEVKALIAEHQTFMEEMTRKQPDVDKVTKTYKRRAADPSSLQSHIPVLDKGRAGRKRFPASSLYPSGSQTQIETKNPRVNLLVSKWQQVWLLALERRRKLNDALDRLEELREFANFDFDIWRKKYMRWMNHKKSRVMDFFRRIDKDQDGKITRQEFIDGILSSKFPTSRLEMSAVADIFDRDGDGYIDYYEFVAALHPNKDAYKPITDADKIEDEVTRQVAKCKCAKRFQVEQIGDNKYRVSFQSNFGDSQQLRLVRILRSTVMVRVGGGWMALDEFLVKNDPCRVHHHGSKMLRSESNSSITTTQPTIAKGRTNMELREKFILADGASQGMAAFRPRGRRSRPSSRGASPNRSTSVSSQAAQAASPQVPATTTPKGTPIQGSKLRLPGYLSGKGFHSGEDSGLITTAAARVRTQFADSKKTPSRPGSRAGSKAGSRASSRRGSDASDFDISEIQSVCSDVETVPQTHRPTPRAGSRPSTAKPSKIPTPQRKSPASKLDKSSKR

SEQ ID NO: 34040 - protein, 5321 aa, Artificial Sequence
  Synthetic polypeptide
PLISDIHVTGESEDMSAKERLLLWTQQATEGYAGIRCENFTTCWRDGKLFNAIIHKYRPDLIDMNTVAVQSNLANLEHAFYVAEKIGVIRLLDPEDVDVSSPDEKSVITYVSSLYDAFPKVPEGGEGIGANDVEVKWIEYQNMVNYLIQWIRHHVTTMSERTFPNNPVELKALYNQYLQFKETEIPPKETEKSKIKRLYKLLEIWIEFGRIKLLQGYHPNDIEKEWGKLIIAMLEREKALRPEVERLEMLQQIANRVQRDSVICEDKLILAGNALQSDSKRLESGVQFQNEAEIAGYILECENLLRQHVIDVQILIDGKYYQADQLVQRVAKLRDEIMALRNECSSVYSKGRILTTEQTKLMISGITQSLNSGFAQTLHPSLTSGLTQSLTPSLTSSSMTSGLSSGMTSRLTPSVTPAYTPGFPSGLVPNFSSGVEPNSLQTLKLMQIRKPLLKSSLLDQNLTEEEINMKFVQDLLNWVDEMQVQLDRTEWGSDLPSVESHLENHKNVHRAIEEFESSLKEAKISEIQMTAPLKLTYAEKLHRLESQYAKLLNTSRNQERHLDTLHNFVSRATNELIWLNEKEEEEVAYDWSERNTNIARKKDYHAELMRELDQKEENIKSVQEIAEQLLLENHPARLTIEAYRAAMQTQWSWILQLCQCVEQHIKENTAYFEFFNDAKEATDYLRNLKDAIQRKYSCDRSSSIHKLEDLVQESMEEKEELLQYKSTIANLMGKAKTIIQLKPRNSDCPLKTSIPIKAICDYRQIEITIYKDDECVLANNSHRAKWKVISPTGNEAMVPSVCFTVPPPNKEAVDLANRIEQQYQNVLTLWHESHINMKSVVSWHYLINEIDRIRASNVASIKTMLPGEHQQVLSNLQSRFEDFLEDSQESQVFSGSDITQLEKEVNVCKQYYQELLKSAEREEQEESVYNLYISEVRNIRLRLENCEDRLIRQIRTPLERDDLHESVFRITEQEKLKKELERLKDDLGTITNKCEEFFSQAAASSSVPTLRSELNVVLQNMNQVYSMSSTYIDKLKTVNLVLKNTQAAEALVKLYETKLCEEEAVIADKNNIENLISTLKQWRSEVDEKRQVFHALEDELQKAKAISDEMFKTYKERDLDFDWHKEKADQLVERWQNVHVQIDNRLRDLEGIGKSLKYYRDTYHPLDDWIQQVETTQRKIQENQPENSKTLATQLNQQKMLVSEIEMKQSKMDECQKYAEQYSATVKDYELQTMTYRAMVDSQQKSPVKRRRMQSSADLIIQEFMDLRTRYTALVTLMTQYIKFAGDSLKRLEEEEKSLEEEKKEHVEKAKELQKWVSNISKTLKDAEKAGKPPFSKQKISSEEISTKKEQLSEALQTIQLFLAKHGDKMTDEERNELEKQVKTLQESYNLLFSESLKQLQESQTSGDVKVEEKIVAERQQEYKEKLQGICDLLTQTENRLIGHQEAFMIGDGTVELKKYQSKQEELQKDMQGSAQALAEVVKNTENFLKENGEKLSQEDKALIEQKLNEAKIKCEQLNLKAEQSKKELDKVVTTAIKEETEKVAAVKQLEESKTKIENLLDWLSNVDKDSERAGTKHKQVIEQNGTHFQEGDGKSAIGEEDEVNGNLLETDVDGQVGTTQENLNQQYQKVKAQHEKIISQHQAVIIATQSAQVLLEKQGQYLSPEEKEKLQKNMKELKVHYETALAESEKKMKLTHSLQEELEKFDADYTEFEHWLQQSEQELENLEAGADDINGLMTKLKRQKSFSEDVISHKGDLRYITISGNRVLEAAKSCSKRDGGKVDTSATHREVQRKLDHATDRFRSLYSKCNVLGNNLKDLVDKYQHYEDASCGLLAGLQACEATASKHLSEPIAVDPKNLQRQLEETKALQGQISSQQVAVEKLKKTAEVLLDARGSLLPAKNDIQKTLDDIVGRYEDLSKSVNERNEKLQITLTRSLSVQDGLDEMLDWMGNVESSLKEQGQVPLNSTALQDIISKNIMLEQDIAGRQSSINAMNEKVKKFMETTDPSTASSLQAKMKDLSARFSEASHKHKETLAKMEELKTKVELFENLSEKLQTFLETKTQALTEVDVPGKDVTELSQYMQESTSEFLEHKKHLEVLHSLLKEISSHGLPSDKALVLEKTNNLSKKFKEMEDTIKEKKEAVTSCQEQLDAFQVLVKSLKSWIKETTKKVPIVQPSFGAEDLGKSLEDTKKLQEKWSLKTPEIQKVNNSGISLCNLISAVTTPAKAIAAVKSGGAVLNGEGTATNTEEFWANKGLTSIKKDMTDISHGYEDLGLLLKDKIAELNTKLSKLQKAQEESSAMMQWLQKMNKTATKWQQTPAPTDTEAVKTQVEQNKSFEAELKQNVNKVQELKDKLTELLEENPDTPEAPRWKQMLTEIDSKWQELNQLTIDRQQKLEESSNNLTQFQTVEAQLKQWLVEKELMVSVLGPLSIDPNMLNTQRQQVQILLQEFATRKPQYEQLTAAGQGILSRPGEDPSLRGIVKEQLAAVTQKWDSLTGQLSDRCDWIDQAIVKSTQYQSLLRSLSDKLSDLDNKLSSSLAVSTHPDAMNQQLETAQKMKQEIQQEKKQIKVAQALCEDLSALVKEEYLKAELSRQLEGILKSFKDVEQKAENHVQHLQSACASSHQFQQMSRDFQAWLDTKKEEQNKSHPISAKLDVLESLIKDHKDFSKTLTAQSHMYEKTIAEGENLLLKTQGSEKAALQLQLNTIKTNWDTFNKQVKERENKLKESLEKALKYKEQVETLWPWIDKCQNNLEEIKFCLDPAEGENSIAKLKSLQKEMDQHFGMVELLNNTANSLLSVCEIDKEVVTDENKSLIQKVDMVTEQLHSKKFCLENMTQKFKEFQEVSKESKRQLQCAKEQLDIHDSLGSQAYSNKYLTMLQTQQKSLQALKHQVDLAKRLAQDLVVEASDSKGTSDVLLQVETIAQEHSTLSQQVDEKCSFLETKLQGIGHFQNTIREMFSQFAEFDDELDSMAPVGRDAETLQKQKETIKAFLKKLEALMASNDNANKTCKMMLATEETSPDLVGIKRDLEALSKQCNKLLDRAQAREEQVEGTIKRLEEFYSKLKEFSILLQKAEEHEESQGPVGMETETINQQLNMFKVFQKEEIEPLQGKQQDVNWLGQGLIQSAAKSTSTQGLEHDLDDVNARWKTLNKKVAQRAAQLQEALLHCGRFQDALESLLSWMVDTEELVANQKPPSAEFKVVKAQIQEQKLLQRLLDDRKSTVEVIKREGEKIATTAEPADKVKILKQLSLLDSRWEALLNKAETRNRQLEGISVVAQQFHETLEPLNEWLTTIEKRLVNCEPIGTQASKLEEQIAQHKALEDDIINHNKHLHQAVSIGQSLKVLSSREDKDMVQSKLDFSQVWYIEIQEKSHSRSELLQQALCNAKIFGEDEVELMNWLNEVHDKLSKLSVQDYSTEGLWKQQSELRVLQEDILLRKQNVDQALLNGLELLKQTTGDEVLIIQDKLEAIKARYKDITKLSTDVAKTLEQALQLARRLHSTHEELCTWLDKVEVELLSYETQVLKGEEASQAQMRPKELKKEAKNNKALLDSLNEVSSALLELVPWRAREGLEKMVAEDNERYRLVSDTITQKVEEIDAAILRSQQFDQAADAELSWITETEKKLMSLGDIRLEQDQTSAQLQVQKTFTMEILRHKDIIDDLVKSGHKIMTACSEEEKQSMKKKLDKVLKNYDTICQINSERYLQLERAQSLVNQFWETYEELWPWLTETQSIISQLPAPALEYETLRQQQEEHRQLRELIAEHKPHIDKMNKTGPQLLELSPGEGFSIQEKYVAADTLYSQIKEDVKKRAVALDEAISQSTQFHDKIDQILESLERIVERLRQPPSISAEVEKIKEQISENKNVSVDMEKLQPLYETLKQRGEEMIARSGGTDKDISAKAVQDKLDQMVFIWENIHTLVEEREAKLLDVMELAEKFWCDHMSLIVTIKDTQDFIRDLEDPGIDPSVVKQQQEAAETIREEIDGLQEELDIVINLGSELIAACGEPDKPIVKKSIDELNSAWDSLNKAWKDRIDKLEEAMQAAVQYQDGLQAVFDWVDIAGGKLASMSPIGTDLETVKQQIEELKQFKSEAYQQQIEMERLNHQAELLLKKVTEESDKHTVQDPLMELKLIWDSLEERIINRQHKLEGALLALGQFQHALDELLAWLTHTEGLLSEQKPVGGDPKAIEIELAKHHVLQNDVLAHQSTVEAVNKAGNDLIESSAGEEASNLQNKLEVLNQRWQNVLEKTEQRKQQLDGALRQAKGFHGEIEDLQQWLTDTERHLLASKPLGGLPETAKEQLNVHMEVCAAFEAKEETYKSLMQKGQQMLARCPKSAETNIDQDINNLKEKWESVETKLNERKTKLEEALNLAMEFHNSLQDFINWLTQAEQTLNVASRPSLILDTVLFQIDEHKVFANEVNSHREQIIELDKTGTHLKYFSQKQDVVLIKNLLISVQSRWEKVVQRLVERGRSLDDARKRAKQFHEAWSKLMEWLEESEKSLDSELEIANDPDKIKTQLAQHKEFQKSLGAKHSVYDTTNRTGRSLKEKTSLADDNLKLDDMLSELRDKWDTICGKSVERQNKLEEALLFSGQFTDALQALIDWLYRVEPQLAEDQPVHGDIDLVMNLIDNHKAFQKELGKRTSSVQALKRSARELIEGSRDDSSWVKVQMQELSTRWETVCALSISKQTRLEAALRQAEEFHSVVHALLEWLAEAEQTLRFHGVLPDDEDALRTLIDQHKEFMKKLEEKRAELNKATTMGDTVLAICHPDSITTIKHWITIIRARFEEVLAWAKQHQQRLASALAGLIAKQELLEALLAWLQWAETTLTDKDKEVIPQEIEEVKALIAEHQTFMEEMTRKQPDVDKVTKTYKRRAADPSSLQSHIPVLDKGRAGRKRFPASSLYPSGSQTQIETKNPRVNLLLREFANFDFDIWRKKYMRWMNHKKSRVMDFFRRIDKDQDGKITRQEFIDGILSSKFPTSRLEMSAVADIFDRDGDGYIDYYEFVAALHPNKDAYKPITDADKIEDEVTRQVAKCKCAKRFQVEQIGDNKYRVSFQSNFGDSQQLRLVRILRSTVMVRVGGGWMALDEFLVKNDPCRVHHHGSKMLRSESNSSITTTQPTIAKGRTNMELREKFILADGASQGMAAFRPRGRRSRPSSRGASPNRSTSVSSQAAQAASPQVPATTTPKGTPIQGSKLRLPGYLSGKGFHSGEDSGLITTAAARVRTQFADSKKTPSRPGSRAGSKAGSRASSRRGSDASDFDISEIQSVCSDVETVPQTHRPTPRAGSRPSTAKPSKIPTPQRKSPASKLDKSSKR

SEQ ID NO: 34041 - protein, 5239 aa, Artificial Sequence
  Synthetic polypeptide
PLISDIHVTGESEDMSAKERLLLWTQQATEGYAGIRCENFTTCWRDGKLFNAIIHKYRPDLIDMNTVAVQSNLANLEHAFYVAEKIGVIRLLDPEDVDVSSPDEKSVITYVSSLYDAFPKVPEGGEGIGANDVEVKWIEYQNMVNYLIQWIRHHVTTMSERTFPNNPVELKALYNQYLQFKETEIPPKETEKSKIKRLYKLLEIWIEFGRIKLLQGYHPNDIEKEWGKLIIAMLEREKALRPEVERLEMLQQIANRVQRDSVICEDKLILAGNALQSDSKRLESGVQFQNEAEIAGYILECENLLRQHVIDVQILIDGKYYQADQLVQRVAKLRDEIMALRNECSSVYSKGRILTTEQTKLMISGITQSLNSGFAQTLHPSLTSGLTQSLTPSLTSSSMTSGLSSGMTSRLTPSVTPAYTPGFPSGLVPNFSSGVEPNSLQTLKLMQIRKPLLKSSLLDQNLTEEEINMKFVQDLLNWVDEMQVQLDRTEWGSDLPSVESHLENHKNVHRAIEEFESSLKEAKISEIQMTAPLKLTYAEKLHRLESQYAKLLNTSRNQERHLDTLHNFVSRATNELIWLNEKEEEEVAYDWSERNTNIARKKDYHAELMRELDQKEENIKSVQEIAEQLLLENHPARLTIEAYRAAMQTQWSWILQLCQCVEQHIKENTAYFEFFNDAKEATDYLRNLKDAIQRKYSCDRSSSIHKLEDLVQESMEEKEELLQYKSTIANLMGKAKTIIQLKPRNSDCPLKTSIPIKAICDYRQIEITIYKDDECVLANNSHRAKWKVISPTGNEAMVPSVCFTVPPPNKEAVDLANRIEQQYQNVLTLWHESHINMKSVVSWHYLINEIDRIRASNVASIKTMLPGEHQQVLSNLQSRFEDFLEDSQESQVFSGSDITQLEKEVNVCKQYYQELLKSAEREEQEESVYNLYISEVRNIRLRLENCEDRLIRQIRTPLERDDLHESVFRITEQEKLKKELERLKDDLGTITNKCEEFFSQAAASSSVPTLRSELNVVLQNMNQVYSMSSTYIDKLKTVNLVLKNTQAAEALVKLYETKLCEEEAVIADKNNIENLISTLKQWRSEVDEKRQVFHALEDELQKAKAISDEMFKTYKERDLDFDWHKEKADQLVERWQNVHVQIDNRLRDLEGIGKSLKYYRDTYHPLDDWIQQVETTQRKIQENQPENSKTLATQLNQQKMLVSEIEMKQSKMDECQKYAEQYSATVKDYELQTMTYRAMVDSQQKSPVKRRRMQSSADLIIQEFMDLRTRYTALVTLMTQYIKFAGDSLKRLEEEEKSLEEEKKEHVEKAKELQKWVSNISKTLKDAEKAGKPPFSKQKISSEEISTKKEQLSEALQTIQLFLAKHGDKMTDEERNELEKQVKTLQESYNLLFSESLKQLQESQTSGDVKVEEKIVAERQQEYKEKLQGICDLLTQTENRLIGHQEAFMIGDGTVELKKYQSKQEELQKDMQGSAQALAEVVKNTENFLKENGEKLSQEDKALIEQKLNEAKIKCEQLNLKAEQSKKELDKVVTTAIKEETEKVAAVKQLEESKTKIENLLDWLSNVDKDSERAGTKHKQVIEQNGTHFQEGDGKSAIGEEDEVNGNLLETDVDGQVGTTQENLNQQYQKVKAQHEKIISQHQAVIIATQSAQVLLEKQGQYLSPEEKEKLQKNMKELKVHYETALAESEKKMKLTHSLQEELEKFDADYTEFEHWLQQSEQELENLEAGADDINGLMTKLKRQKSFSEDVISHKGDLRYITISGNRVLEAAKSCSKRDGGKVDTSATHREVQRKLDHATDRFRSLYSKCNVLGNNLKDLVDKYQHYEDASCGLLAGLQACEATASKHLSEPIAVDPKNLQRQLEETKALQGQISSQQVAVEKLKKTAEVLLDARGSLLPAKNDIQKTLDDIVGRYEDLSKSVNERNEKLQITLTRSLSVQDGLDEMLDWMGNVESSLKEQGQVPLNSTALQDIISKNIMLEQDIAGRQSSINAMNEKVKKFMETTDPSTASSLQAKMKDLSARFSEASHKHKETLAKMEELKTKVELFENLSEKLQTFLETKTQALTEVDVPGKDVTELSQYMQESTSEFLEHKKHLEVLHSLLKEISSHGLPSDKALVLEKTNNLSKKFKEMEDTIKEKKEAVTSCQEQLDAFQVLVKSLKSWIKETTKKVPIVQPSFGAEDLGKSLEDTKKLQEKWSLKTPEIQKVNNSGISLCNLISAVTTPAKAIAAVKSGGAVLNGEGTATNTEEFWANKGLTSIKKDMTDISHGYEDLGLLLKDKIAELNTKLSKLQKAQEESSAMMQWLQKMNKTATKWQQTPAPTDTEAVKTQVEQNKSFEAELKQNVNKVQELKDKLTELLEENPDTPEAPRWKQMLTEIDSKWQELNQLTIDRQQKLEESSNNLTQFQTVEAQLKQWLVEKELMVSVLGPLSIDPNMLNTQRQQVQILLQEFATRKPQYEQLTAAGQGILSRPGEDPSLRGIVKEQLAAVTQKWDSLTGQLSDRCDWIDQAIVKSTQYQSLLRSLSDKLSDLDNKLSSSLAVSTHPDAMNQQLETAQKMKQEIQQEKKQIKVAQALCEDLSALVKEEYLKAELSRQLEGILKSFKDVEQKAENHVQHLQSACASSHQFQQMSRDFQAWLDTKKEEQNKSHPISAKLDVLESLIKDHKDFSKTLTAQSHMYEKTIAEGENLLLKTQGSEKAALQLQLNTIKTNWDTFNKQVKERENKLKESLEKALKYKEQVETLWPWIDKCQNNLEEIKFCLDPAEGENSIAKLKSLQKEMDQHFGMVELLNNTANSLLSVCEIDKEVVTDENKSLIQKVDMVTEQLHSKKFCLENMTQKFKEFQEVSKESKRQLQCAKEQLDIHDSLGSQAYSNKYLTMLQTQQKSLQALKHQVDLAKRLAQDLVVEASDSKGTSDVLLQVETIAQEHSTLSQQVDEKCSFLETKLQGIGHFQNTIREMFSQFAEFDDELDSMAPVGRDAETLQKQKETIKAFLKKLEALMASNDNANKTCKMMLATEETSPDLVGIKRDLEALSKQCNKLLDRAQAREEQVEGTIKRLEEFYSKLKEFSILLQKAEEHEESQGPVGMETETINQQLNMFKVFQKEEIEPLQGKQQDVNWLGQGLIQSAAKSTSTQGLEHDLDDVNARWKTLNKKVAQRAAQLQEALLHCGRFQDALESLLSWMVDTEELVANQKPPSAEFKVVKAQIQEQKLLQRLLDDRKSTVEVIKREGEKIATTAEPADKVKILKQLSLLDSRWEALLNKAETRNRQLEGISVVAQQFHETLEPLNEWLTTIEKRLVNCEPIGTQASKLEEQIAQHKVLQEDILLRKQNVDQALLNGLELLKQTTGDEVLIIQDKLEAIKARYKDITKLSTDVAKTLEQALQLARRLHSTHEELCTWLDKVEVELLSYETQVLKGEEASQAQMRPKELKKEAKNNKALLDSLNEVSSALLELVPWRAREGLEKMVAEDNERYRLVSDTITQKVEEIDAAILRSQQFDQAADAELSWITETEKKLMSLGDIRLEQDQTSAQLQVQKTFTMEILRHKDIIDDLVKSGHKIMTACSEEEKQSMKKKLDKVLKNYDTICQINSERYLQLERAQSLVNQFWETYEELWPWLTETQSIISQLPAPALEYETLRQQQEEHRQLRELIAEHKPHIDKMNKTGPQLLELSPGEGFSIQEKYVAADTLYSQIKEDVKKRAVALDEAISQSTQFHDKIDQILESLERIVERLRQPPSISAEVEKIKEQISENKNVSVDMEKLQPLYETLKQRGEEMIARSGGTDKDISAKAVQDKLDQMVFIWENIHTLVEEREAKLLDVMELAEKFWCDHMSLIVTIKDTQDFIRDLEDPGIDPSVVKQQQEAAETIREEIDGLQEELDIVINLGSELIAACGEPDKPIVKKSIDELNSAWDSLNKAWKDRIDKLEEAMQAAVQYQDGLQAVFDWVDIAGGKLASMSPIGTDLETVKQQIEELKQFKSEAYQQQIEMERLNHQAELLLKKVTEESDKHTVQDPLMELKLIWDSLEERIINRQHKLEGALLALGQFQHALDELLAWLTHTEGLLSEQKPVGGDPKAIEIELAKHHVLQNDVLAHQSTVEAVNKAGNDLIESSAGEEASNLQNKLEVLNQRWQNVLEKTEQRKQQLDGALRQAKGFHGEIEDLQQWLTDTERHLLASKPLGGLPETAKEQLNVHMEVCAAFEAKEETYKSLMQKGQQMLARCPKSAETNIDQDINNLKEKWESVETKLNERKTKLEEALNLAMEFHNSLQDFINWLTQAEQTLNVASRPSLILDTVLFQIDEHKVFANEVNSHREQIIELDKTGTHLKYFSQKQDVVLIKNLLISVQSRWEKVVQRLVERGRSLDDARKRAKQFHEAWSKLMEWLEESEKSLDSELEIANDPDKIKTQLAQHKEFQKSLGAKHSVYDTTNRTGRSLKEKTSLADDNLKLDDMLSELRDKWDTICGKSVERQNKLEEALLFSGQFTDALQALIDWLYRVEPQLAEDQPVHGDIDLVMNLIDNHKAFQKELGKRTSSVQALKRSARELIEGSRDDSSWVKVQMQELSTRWETVCALSISKQTRLEAALRQAEEFHSVVHALLEWLAEAEQTLRFHGVLPDDEDALRTLIDQHKEFMKKLEEKRAELNKATTMGDTVLAICHPDSITTIKHWITIIRARFEEVLAWAKQHQQRLASALAGLIAKQELLEALLAWLQWAETTLTDKDKEVIPQEIEEVKALIAEHQTFMEEMTRKQPDVDKVTKTYKRRAADPSSLQSHIPVLDKGRAGRKRFPASSLYPSGSQTQIETKNPRVNLLVSKWQQVWLLALERRRKLNDALDRLEELREFANFDFDIWRKKYMRWMNHKKSRVMDFFRRIDKDQDGKITRQEFIDGILSSKFPTSRLEMSAVADIFDRDGDGYIDYYEFVAALHPNKDAYKPITDADKIEDEVTRQVAKCKCAKRFQVEQIGDNKYRFFLGNQFGDSQQLRLVRILRSTVMVRVGGGWMALDEFLVKNDPCRVHHHGSKMLRSESNSSITTTQPTIAKGRTNMELREKFILADGASQGMAAFRPRGRRSRPSSRGASPNRSTSVSSQAAQAASPQVPATTTPKGTPIQGSKLRLPGYLSGKGFHSGEDSGLITTAAARVRTQFADSKKTPSRPGSRAGSKAGSRASSRRGSDASDFDISEIQSVCSDVETVPQTHRPTPRAGSRPSTAKPSKIPTPQRKSPASKLDKSSKR

SEQ ID NO: 34042 - protein, 7325 aa, Artificial Sequence
  Synthetic polypeptide
PLISDIHVTGESEDMSAKERLLLWTQQATEGYAGIRCENFTTCWRDGKLFNAIIHKYRPDLIDMNTVAVQSNLANLEHAFYVAEKIGVIRLLDPEDVDVSSPDEKSVITYVSSLYDAFPKVPEGGEGIGANDVEVKWIEYQNMVNYLIQWIRHHVTTMSERTFPNNPVELKALYNQYLQFKETEIPPKETEKSKIKRLYKLLEIWIEFGRIKLLQGYHPNDIEKEWGKLIIAMLEREKALRPEVERLEMLQQIANRVQRDSVICEDKLILAGNALQSDSKRLESGVQFQNEAEIAGYILECENLLRQHVIDVQILIDGKYYQADQLVQRVAKLRDEIMALRNECSSVYSKGRILTTEQTKLMISGITQSLNSGFAQTLHPSLTSGLTQSLTPSLTSSSMTSGLSSGMTSRLTPSVTPAYTPGFPSGLVPNFSSGVEPNSLQTLKLMQIRKPLLKSSLLDQNLTEEEINMKFVQDLLNWVDEMQVQLDRTEWGSDLPSVESHLENHKNVHRAIEEFESSLKEAKISEIQMTAPLKLTYAEKLHRLESQYAKLLNTSRNQERHLDTLHNFVSRATNELIWLNEKEEEEVAYDWSERNTNIARKKDYHAELMRELDQKEENIKSVQEIAEQLLLENHPARLTIEAYRAAMQTQWSWILQLCQCVEQHIKENTAYFEFFNDAKEATDYLRNLKDAIQRKYSCDRSSSIHKLEDLVQESMEEKEELLQYKSTIANLMGKAKTIIQLKPRNSDCPLKTSIPIKAICDYRQIEITIYKDDECVLANNSHRAKWKVISPTGNEAMVPSVCFTVPPPNKEAVDLANRIEQQYQNVLTLWHESHINMKSVVSWHYLINEIDRIRASNVASIKTMLPGEHQQVLSNLQSRFEDFLEDSQESQVFSGSDITQLEKEVNVCKQYYQELLKSAEREEQEESVYNLYISEVRNIRLRLENCEDRLIRQIRTPLERDDLHESVFRITEQEKLKKELERLKDDLGTITNKCEEFFSQAAASSSVPTLRSELNVVLQNMNQVYSMSSTYIDKLKTVNLVLKNTQAAEALVKLYETKLCEEEAVIADKNNIENLISTLKQWRSEVDEKRQVFHALEDELQKAKAISDEMFKTYKERDLDFDWHKEKADQLVERWQNVHVQIDNRLRDLEGIGKSLKYYRDTYHPLDDWIQQVETTQRKIQENQPENSKTLATQLNQQKMLVSEIEMKQSKMDECQKYAEQYSATVKDYELQTMTYRAMVDSQQKSPVKRRRMQSSADLIIQEFMDLRTRYTALVTLMTQYIKFAGDSLKRLEEEEKSLEEEKKEHVEKAKELQKWVSNISKTLKDAEKAGKPPFSKQKISSEEISTKKEQLSEALQTIQLFLAKHGDKMTDEERNELEKQVKTLQESYNLLFSESLKQLQESQTSGDVKVEEKLDKVIAGTIDQTTGEVLSVFQAVLRGLIDYDTGIRLLETQLMISGLISPELRKCFDLKDAKSHGLIDEQILCQLKELSKAKEIISAASPTTIPVLDALAQSMITESMAIKVLEILLSTGSLVIPATGEQLTLQKAFQQNLVSSALFSKVLERQNMCKDLIDPCTSEKVSLIDMVQRSTLQENTGMWLLPVRPQEGGRITLKCGRNISILRAAHEGLIDRETMFRLLSAQLLSGGLINSNSGQRMTVEEAVREGVIDRDTASSILTYQVQTGGIIQSNPAKRLTVDEAVQCDLITSSSALLVLEAQRGYVGLIWPHSGEIFPTSSSLQQELITNELAYKILNGRQKIAALYIPESSQVIGLDAAKQLGIIDNNTASILKNITLPDKMPDLGDLEACKNARRWLSFCKFQPSTVHDYRQEEDVFDGEEPVTTQTSEETKKLFLSYLMINSYMDANTGQRLLLYDGDLDEAVGMLLEGCHAEFDGNTAIKECLDVLSSSGVFLNNASGREKDECTATPSSFNKCHCGEPEHEETPENRKCAIDEEFNEMRNTVINSEFSQSGKLASTISIDPKVNSSPSVCVPSLISYLTQTELADISMLRSDSENILTNYENQSRVETNERANECSHSKNIQNFPSDLIENPIMKSKMSKFCGVNETENEDNTNRDSPIFDYSPRLSALLSHDKLMHSQGSFNDTHTPESNGNKCEAPALSFSDKTMLSGQRIGEKFQDQFLGIAAINISLPGEQYGQKSLNMISSNPQVQYHNDKYISNTSGEDEKTHPGFQQMPEDKEDESEIEEYSCAVTPGGDTDNAIVSLTCATPLLDETISASDYETSLLNDQQNNTGTDTDSDDDFYDTPLFEDDDHDSLLLDGDDRDCLHPEDYDTLQEENDETASPADVFYDVSKENENSMVPQGAPVGSLSVKNKAHCLQDFLMDVEKDELDSGEKIHLNPVGSDKVNGQSLETGSERECTNILEGDESDSLTDYDIVGGKESFTASLKFDDSGSWRGRKEEYVTGQEFHSDTDHLDSMQSEESYGDYIYDSNDQDDDDDDGIDEEGGGIRDENGKPRCQNVAEDMDIQLCASILNENSDENENINTMILLDKMHSCSSLEKQQRVNVVQLASPSENNLVTEKSNLPEYTTEIAGKSKENLLNHEMVLKDVLPPIIKDTESEKTFGPASISHDNNNISSTSELGTDLANTKVKLIQGSELPELTDSVKGKDEYFKNMTPKVDSSLDHIICTEPDLIGKPAEESHLSLIASVTDKDPQGNGSDLIKGRDGKSDILIEDETSIQKMYLGEGEVLVEGLVEEENRHLKLLPGKNTRDSFKLINSQFPFPQITNNEELNQKGSLKKATVTLKDEPNNLQIIVSKSPVQFENLEEIFDTSVSKEISDDITSDITSWEGNTHFEESFTDGPEKELDLFTYLKHCAKNIKAKDVAKPNEDVPSHVLITAPPMKEHLQLGVNNTKEKSTSTQKDSPLNDMIQSNDLCSKESISGGGTEISQFTPESIEATLSILSRKHVEDVGKNDFLQSERCANGLGNDNSSNTLNTDYSFLEINNKKERIEQQLPKEQALSPRSQEKEVQIPELSQVFVEDVKDILKSRLKEGHMNPQEVEEPSACADTKILIQNLIKRITTSQLVNEASTVPSDSQMSDSSGVSPMTNSSELKPESRDDPFCIGNLKSELLLNILKQDQHSQKITGVFELMRELTHMEYDLEKRGITSKVLPLQLENIFYKLLADGYSEKIEHVGDFNQKACSTSEMMEEKPHILGDIKSKEGNYYSPNLETVKEIGLESSTVWASTLPRDEKLKDLCNDFPSHLECTSGSKEMASGDSSTEQFSSELQQCLQHTEKMHEYLTLLQDMKPPLDNQESLDNNLEALKNQLRQLETFELGLAPIAVILRKDMKLAEEFLKSLPSDFPRGHVEELSISHQSLKTAFSSLSNVSSERTKQIMLAIDSEMSKLAVSHEEFLHKLKSFSDWVSEKSKSVKDIEIVNVQDSEYVKKRLEFLKNVLKDLGHTKMQLETTAFDVQFFISEYAQDLSPNQSKQLLRLLNTTQKCFLDVQESVTTQVERLETQLHLEQDLDDQKIVAERQQEYKEKLQGICDLLTQTENRLIGHQEAFMIGDGTVELKKYQSKQEELQKDMQGSAQALAEVVKNTENFLKENGEKLSQEDKALIEQKLNEAKIKCEQLNLKAEQSKKELDKVVTTAIKEETEKVAAVKQLEESKTKIENLLDWLSNVDKDSERAGTKHKQVIEQNGTHFQEGDGKSAIGEEDEVNGNLLETDVDGQVGTTQENLNQQYQKVKAQHEKIISQHQAVIIATQSAQVLLEKQGQYLSPEEKEKLQKNMKELKVHYETALAESEKKMKLTHSLQEELEKFDADYTEFEHWLQQSEQELENLEAGADDINGLMTKLKRQKSFSEDVISHKGDLRYITISGNRVLEAAKSCSKRDGGKVDTSATHREVQRKLDHATDRFRSLYSKCNVLGNNLKDLVDKYQHYEDASCGLLAGLQACEATASKHLSEPIAVDPKNLQRQLEETKALQGQISSQQVAVEKLKKTAEVLLDARGSLLPAKNDIQKTLDDIVGRYEDLSKSVNERNEKLQITLTRSLSVQDGLDEMLDWMGNVESSLKEQGQVPLNSTALQDIISKNIMLEQDIAGRQSSINAMNEKVKKFMETTDPSTASSLQAKMKDLSARFSEASHKHKETLAKMEELKTKVELFENLSEKLQTFLETKTQALTEVDVPGKDVTELSQYMQESTSEFLEHKKHLEVLHSLLKEISSHGLPSDKALVLEKTNNLSKKFKEMEDTIKEKKEAVTSCQEQLDAFQVLVKSLKSWIKETTKKVPIVQPSFGAEDLGKSLEDTKKLQEKWSLKTPEIQKVNNSGISLCNLISAVTTPAKAIAAVKSGGAVLNGEGTATNTEEFWANKGLTSIKKDMTDISHGYEDLGLLLKDKIAELNTKLSKLQKAQEESSAMMQWLQKMNKTATKWQQTPAPTDTEAVKTQVEQNKSFEAELKQNVNKVQELKDKLTELLEENPDTPEAPRWKQMLTEIDSKWQELNQLTIDRQQKLEESSNNLTQFQTVEAQLKQWLVEKELMVSVLGPLSIDPNMLNTQRQQVQILLQEFATRKPQYEQLTAAGQGILSRPGEDPSLRGIVKEQLAAVTQKWDSLTGQLSDRCDWIDQAIVKSTQYQSLLRSLSDKLSDLDNKLSSSLAVSTHPDAMNQQLETAQKMKQEIQQEKKQIKVAQALCEDLSALVKEEYLKAELSRQLEGILKSFKDVEQKAENHVQHLQSACASSHQFQQMSRDFQAWLDTKKEEQNKSHPISAKLDVLESLIKDHKDFSKTLTAQSHMYEKTIAEGENLLLKTQGSEKAALQLQLNTIKTNWDTFNKQVKERENKLKESLEKALKYKEQVETLWPWIDKCQNNLEEIKFCLDPAEGENSIAKLKSLQKEMDQHFGMVELLNNTANSLLSVCEIDKEVVTDENKSLIQKVDMVTEQLHSKKFCLENMTQKFKEFQEVSKESKRQLQCAKEQLDIHDSLGSQAYSNKYLTMLQTQQKSLQALKHQVDLAKRLAQDLVVEASDSKGTSDVLLQVETIAQEHSTLSQQVDEKCSFLETKLQGIGHFQNTIREMFSQFAEFDDELDSMAPVGRDAETLQKQKETIKAFLKKLEALMASNDNANKTCKMMLATEETSPDLVGIKRDLEALSKQCNKLLDRAQAREEQVEGTIKRLEEFYSKLKEFSILLQKAEEHEESQGPVGMETETINQQLNMFKVFQKEEIEPLQGKQQDVNWLGQGLIQSAAKSTSTQGLEHDLDDVNARWKTLNKKVAQRAAQLQEALLHCGRFQDALESLLSWMVDTEELVANQKPPSAEFKVVKAQIQEQKLLQRLLDDRKSTVEVIKREGEKIATTAEPADKVKILKQLSLLDSRWEALLNKAETRNRQLEGISVVAQQFHETLEPLNEWLTTIEKRLVNCEPIGTQASKLEEQIAQHKVLQEDILLRKQNVDQALLNGLELLKQTTGDEVLIIQDKLEAIKARYKDITKLSTDVAKTLEQALQLARRLHSTHEELCTWLDKVEVELLSYETQVLKGEEASQAQMRPKELKKEAKNNKALLDSLNEVSSALLELVPWRAREGLEKMVAEDNERYRLVSDTITQKVEEIDAAILRSQQFDQAADAELSWITETEKKLMSLGDIRLEQDQTSAQLQVQKTFTMEILRHKDIIDDLVKSGHKIMTACSEEEKQSMKKKLDKVLKNYDTICQINSERYLQLERAQSLVNQFWETYEELWPWLTETQSIISQLPAPALEYETLRQQQEEHRQLRELIAEHKPHIDKMNKTGPQLLELSPGEGFSIQEKYVAADTLYSQIKEDVKKRAVALDEAISQSTQFHDKIDQILESLERIVERLRQPPSISAEVEKIKEQISENKNVSVDMEKLQPLYETLKQRGEEMIARSGGTDKDISAKAVQDKLDQMVFIWENIHTLVEEREAKLLDVMELAEKFWCDHMSLIVTIKDTQDFIRDLEDPGIDPSVVKQQQEAAETIREEIDGLQEELDIVINLGSELIAACGEPDKPIVKKSIDELNSAWDSLNKAWKDRIDKLEEAMQAAVQYQDGLQAVFDWVDIAGGKLASMSPIGTDLETVKQQIEELKQFKSEAYQQQIEMERLNHQAELLLKKVTEESDKHTVQDPLMELKLIWDSLEERIINRQHKLEGALLALGQFQHALDELLAWLTHTEGLLSEQKPVGGDPKAIEIELAKHHVLQNDVLAHQSTVEAVNKAGNDLIESSAGEEASNLQNKLEVLNQRWQNVLEKTEQRKQQLDGALRQAKGFHGEIEDLQQWLTDTERHLLASKPLGGLPETAKEQLNVHMEVCAAFEAKEETYKSLMQKGQQMLARCPKSAETNIDQDINNLKEKWESVETKLNERKTKLEEALNLAMEFHNSLQDFINWLTQAEQTLNVASRPSLILDTVLFQIDEHKVFANEVNSHREQIIELDKTGTHLKYFSQKQDVVLIKNLLISVQSRWEKVVQRLVERGRSLDDARKRAKQFHEAWSKLMEWLEESEKSLDSELEIANDPDKIKTQLAQHKEFQKSLGAKHSVYDTTNRTGRSLKEKTSLADDNLKLDDMLSELRDKWDTICGKSVERQNKLEEALLFSGQFTDALQALIDWLYRVEPQLAEDQPVHGDIDLVMNLIDNHKAFQKELGKRTSSVQALKRSARELIEGSRDDSSWVKVQMQELSTRWETVCALSISKQTRLEAALRQAEEFHSVVHALLEWLAEAEQTLRFHGVLPDDEDALRTLIDQHKEFMKKLEEKRAELNKATTMGDTVLAICHPDSITTIKHWITIIRARFEEVLAWAKQHQQRLASALAGLIAKQELLEALLAWLQWAETTLTDKDKEVIPQEIEEVKALIAEHQTFMEEMTRKQPDVDKVTKTYKRRAADPSSLQSHIPVLDKGRAGRKRFPASSLYPSGSQTQIETKNPRVNLLVSKWQQVWLLALERRRKLNDALDRLEELREFANFDFDIWRKKYMRWMNHKKSRVMDFFRRIDKDQDGKITRQEFIDGILSSKFPTSRLEMSAVADIFDRDGDGYIDYYEFVAALHPNKDAYKPITDADKIEDEVTRQVAKCKCAKRFQVEQIGDNKYRFFLGNQFGDSQQLRLVRILRSTVMVRVGGGWMALDEFLVKNDPCRVHHHGSKMLRSESNSSITTTQPTIAKGRTNMELREKFILADGASQGMAAFRPRGRRSRPSSRGASPNRSTSVSSQAAQAASPQVPATTTPKGTPIQGSKLRLPGYLSGKGFHSGEDSGLITTAAARVRTQFADSKKTPSRPGSRAGSKAGSRASSRRGSDASDFDISEIQSVCSDVETVPQTHRPTPRAGSRPSTAKPSKIPTPQRKSPASKLDKSSKR

SEQ ID NO: 34043 - protein, 1303 aa, Artificial Sequence
  Synthetic polypeptide
PLISDIHVTGESEDMSAKERLLLWTQQATEGYAGIRCENFTTCWRDGKLFNAIIHKYRPDLIDMNTVAVQSNLANLEHAFYVAEKIGVIRLLDPEDVDVSSPDEKSVITYVSSLYDAFPKVPEGGEGIGANDVEVKWIEYQNMVNYLIQWIRHHVTTMSERTFPNNPVELKALYNQYLQFKETEIPPKETEKSKIKRLYKLLEIWIEFGRIKLLQGYHPNDIEKEWGKLIIAMLEREKALRPEVERLEMLQQIANRVQRDSVICEDKLILAGNALQSDSKRLESGVQFQNEAEIAGYILECENLLRQHVIDVQILIDGKYYQADQLVQRVAKLRDEIMALRNECSSVYSKGRILTTEQTKLMISGITQSLNSGFAQTLHPSLTSGLTQSLTPSLTSSSMTSGLSSGMTSRLTPSVTPAYTPGFPSGLVPNFSSGVEPNSLQTLKLMQIRKPLLKSSLLDQNLTEEEINMKFVQDLLNWVDEMQVQLDRTEWGSDLPSVESHLENHKNVHRAIEEFESSLKEAKISEIQMTAPLKLTYAEKLHRLESQYAKLLNTSRNQERHLDTLHNFVSRATNELIWLNEKEEEEVAYDWSERNTNIARKKDYHAELMRELDQKEENIKSVQEIAEQLLLENHPARLTIEAYRAAMQTQWSWILQLCQCVEQHIKENTAYFEFFNDAKEATDYLRNLKDAIQRKYSCDRSSSIHKLEDLVQESMEEKEELLQYKSTIANLMGKAKTIIQLKPRNSDCPLKTSIPIKAICDYRQIEITIYKDDECVLANNSHRAKWKVISPTGNEAMVPSVCFTVPPPNKEAVDLANRIEQQYQNVLTLWHESHINMKSVVSWHYLINEIDRIRASNVASIKTMLPGEHQQVLSNLQSRFEDFLEDSQESQVFSGSDITQLEKEVNVCKQYYQELLKSAEREEQEESVYNLYISEVRNIRLRLENCEDRLIRQIRTPLERDDLHESVFRITEQEKLKKELERLKDDLGTITNKCEEFFSQAAASSSVPTLRSELNVVLQNMNQVYSMSSTYIDKLKTVNLVLKNTQAAEALVKLYETKLCEEEAVIADKNNIENLISTLKQWRSEVDEKRQVFHALEDELQKAKAISDEMFKTYKERDLDFDWHKEKADQLVERWQNVHVQIDNRLRDLEGIGKSLKYYRDTYHPLDDWIQQVETTQRKIQENQPENSKTLATQLNQQKMLVSEIEMKQSKMDECQKYAEQYSATVKDYELQTMTYRAMVDSQQKSPVKRRRMQSSADLIIQEFMDLRTRYTALVTLMTQYIKFAGDSLKRLEEEEKSLEEEK

SEQ ID NO: 34044 - protein, 375 aa, Artificial Sequence
  Synthetic polypeptide
PLISDIHVTGESEDMSAKERLLLWTQQATEGYAGIRCENFTTCWRDGKLFNAIIHKYRPDLIDMNTVAVQSNLANLEHAFYVAEKIGVIRLLDPEDVDVSSPDEKSVITYVSSLYDAFPKVPEGGEGIGANDVEVKWIEYQNMVNYLIQWIRHHVTTMSERTFPNNPVELKALYNQYLQFKETEIPPKETEKSKIKRLYKLLEIWIEFGRIKLLQGYHPNDIEKEWGKLIIAMLEREKALRPEVERLEMLQQIANRVQRDSVICEDKLILAGNALQSDSKRLESGVQFQNEAEIAGYILECENLLRQHVIDVQILIDGKYYQADQLVQRVAKLRDEIMALRNECSSVYSKGRILTTEQTKLMISGITQSLNSGFA

SEQ ID NO: 34045 - protein, 46 aa, Artificial Sequence
  Synthetic polypeptide
PLISDIHVTGESEDMSAKERLLLWTQQATEGYAGIRCENFTTCWRD

SEQ ID NO: 34046 - protein, 25 aa, Artificial Sequence
  Synthetic polypeptide
PLISDIHVTGESEDMSAKERLLLWT

SEQ ID NO: 34047 - protein, 7 aa, Artificial Sequence
  Synthetic polypeptide
FLHFHLR

SEQ ID NO: 34048 - protein, 46 aa, Artificial Sequence
  Synthetic polypeptide
GRSQDGRIGTAPVCISQRERRRRRVISAFPFEMNGTKFRRKHLQNG

SEQ ID NO: 34049 - protein, 7695 aa, Artificial Sequence
  Synthetic polypeptide
DGKIFRSQEFVTSLSSMGFRASPRHLRRRVAAAAAARLEEVKPVVEVHHQSEQETSVRKRRIKKSSRVQPEFYHSVQGASIRRPSSGNASYRCSMSSSADFSDEDDFSQKSGSASPAPGDTLPWNLPKHERSKRKIQGGSVLDPAERAVLRIADERDKVQKKTFTKWINQHLMKVRKHVNDLYEDLRDGHNLISLLEVLSGDTLPREKGRMRFHRLQNVQIALDYLKRRQVKLVNIRNDDITDGNPKLTLGLIWTIILHFQISDIHVTGESEDMSAKERLLLWTQQATEGYAGIRCENFTTCWRDGKLFNAIIHKYRPDLIDMNTVAVQSNLANLEHAFYVAEKIGVIRLLDPEDVDVSSPDEKSVITYVSSLYDAFPKVPEGGEGIGANDVEVKWIEYQNMVNYLIQWIRHHVTTMSERTFPNNPVELKALYNQYLQFKETEIPPKETEKSKIKRLYKLLEIWIEFGRIKLLQGYHPNDIEKEWGKLIIAMLEREKALRPEVERLEMLQQIANRVQRDSVICEDKLILAGNALQSDSKRLESGVQFQNEAEIAGYILECENLLRQHVIDVQILIDGKYYQADQLVQRVAKLRDEIMALRNECSSVYSKGRILTTEQTKLMISGITQSLNSGFAQTLHPSLTSGLTQSLTPSLTSSSMTSGLSSGMTSRLTPSVTPAYTPGFPSGLVPNFSSGVEPNSLQTLKLMQIRKPLLKSSLLDQNLTEEEINMKFVQDLLNWVDEMQVQLDRTEWGSDLPSVESHLENHKNVHRAIEEFESSLKEAKISEIQMTAPLKLTYAEKLHRLESQYAKLLNTSRNQERHLDTLHNFVSRATNELIWLNEKEEEEVAYDWSERNTNIARKKDYHAELMRELDQKEENIKSVQEIAEQLLLENHPARLTIEAYRAAMQTQWSWILQLCQCVEQHIKENTAYFEFFNDAKEATDYLRNLKDAIQRKYSCDRSSSIHKLEDLVQESMEEKEELLQYKSTIANLMGKAKTIIQLKPRNSDCPLKTSIPIKAICDYRQIEITIYKDDECVLANNSHRAKWKVISPTGNEAMVPSVCFTVPPPNKEAVDLANRIEQQYQNVLTLWHESHINMKSVVSWHYLINEIDRIRASNVASIKTMLPGEHQQVLSNLQSRFEDFLEDSQESQVFSGSDITQLEKEVNVCKQYYQELLKSAEREEQEESVYNLYISEVRNIRLRLENCEDRLIRQIRTPLERDDLHESVFRITEQEKLKKELERLKDDLGTITNKCEEFFSQAAASSSVPTLRSELNVVLQNMNQVYSMSSTYIDKLKTVNLVLKNTQAAEALVKLYETKLCEEEAVIADKNNIENLISTLKQWRSEVDEKRQVFHALEDELQKAKAISDEMFKTYKERDLDFDWHKEKADQLVERWQNVHVQIDNRLRDLEGIGKSLKYYRDTYHPLDDWIQQVETTQRKIQENQPENSKTLATQLNQQKMLVSEIEMKQSKMDECQKYAEQYSATVKDYELQTMTYRAMVDSQQKSPVKRRRMQSSADLIIQEFMDLRTRYTALVTLMTQYIKFAGDSLKRLEEEEKSLEEEKKEHVEKAKELQKWVSNISKTLKDAEKAGKPPFSKQKISSEEISTKKEQLSEALQTIQLFLAKHGDKMTDEERNELEKQVKTLQESYNLLFSESLKQLQESQTSGDVKVEEKLDKVIAGTIDQTTGEVLSVFQAVLRGLIDYDTGIRLLETQLMISGLISPELRKCFDLKDAKSHGLIDEQILCQLKELSKAKEIISAASPTTIPVLDALAQSMITESMAIKVLEILLSTGSLVIPATGEQLTLQKAFQQNLVSSALFSKVLERQNMCKDLIDPCTSEKVSLIDMVQRSTLQENTGMWLLPVRPQEGGRITLKCGRNISILRAAHEGLIDRETMFRLLSAQLLSGGLINSNSGQRMTVEEAVREGVIDRDTASSILTYQVQTGGIIQSNPAKRLTVDEAVQCDLITSSSALLVLEAQRGYVGLIWPHSGEIFPTSSSLQQELITNELAYKILNGRQKIAALYIPESSQVIGLDAAKQLGIIDNNTASILKNITLPDKMPDLGDLEACKNARRWLSFCKFQPSTVHDYRQEEDVFDGEEPVTTQTSEETKKLFLSYLMINSYMDANTGQRLLLYDGDLDEAVGMLLEGCHAEFDGNTAIKECLDVLSSSGVFLNNASGREKDECTATPSSFNKCHCGEPEHEETPENRKCAIDEEFNEMRNTVINSEFSQSGKLASTISIDPKVNSSPSVCVPSLISYLTQTELADISMLRSDSENILTNYENQSRVETNERANECSHSKNIQNFPSDLIENPIMKSKMSKFCGVNETENEDNTNRDSPIFDYSPRLSALLSHDKLMHSQGSFNDTHTPESNGNKCEAPALSFSDKTMLSGQRIGEKFQDQFLGIAAINISLPGEQYGQKSLNMISSNPQVQYHNDKYISNTSGEDEKTHPGFQQMPEDKEDESEIEEYSCAVTPGGDTDNAIVSLTCATPLLDETISASDYETSLLNDQQNNTGTDTDSDDDFYDTPLFEDDDHDSLLLDGDDRDCLHPEDYDTLQEENDETASPADVFYDVSKENENSMVPQGAPVGSLSVKNKAHCLQDFLMDVEKDELDSGEKIHLNPVGSDKVNGQSLETGSERECTNILEGDESDSLTDYDIVGGKESFTASLKFDDSGSWRGRKEEYVTGQEFHSDTDHLDSMQSEESYGDYIYDSNDQDDDDDDGIDEEGGGIRDENGKPRCQNVAEDMDIQLCASILNENSDENENINTMILLDKMHSCSSLEKQQRVNVVQLASPSENNLVTEKSNLPEYTTEIAGKSKENLLNHEMVLKDVLPPIIKDTESEKTFGPASISHDNNNISSTSELGTDLANTKVKLIQGSELPELTDSVKGKDEYFKNMTPKVDSSLDHIICTEPDLIGKPAEESHLSLIASVTDKDPQGNGSDLIKGRDGKSDILIEDETSIQKMYLGEGEVLVEGLVEEENRHLKLLPGKNTRDSFKLINSQFPFPQITNNEELNQKGSLKKATVTLKDEPNNLQIIVSKSPVQFENLEEIFDTSVSKEISDDITSDITSWEGNTHFEESFTDGPEKELDLFTYLKHCAKNIKAKDVAKPNEDVPSHVLITAPPMKEHLQLGVNNTKEKSTSTQKDSPLNDMIQSNDLCSKESISGGGTEISQFTPESIEATLSILSRKHVEDVGKNDFLQSERCANGLGNDNSSNTLNTDYSFLEINNKKERIEQQLPKEQALSPRSQEKEVQIPELSQVFVEDVKDILKSRLKEGHMNPQEVEEPSACADTKILIQNLIKRITTSQLVNEASTVPSDSQMSDSSGVSPMTNSSELKPESRDDPFCIGNLKSELLLNILKQDQHSQKITGVFELMRELTHMEYDLEKRGITSKVLPLQLENIFYKLLADGYSEKIEHVGDFNQKACSTSEMMEEKPHILGDIKSKEGNYYSPNLETVKEIGLESSTVWASTLPRDEKLKDLCNDFPSHLECTSGSKEMASGDSSTEQFSSELQQCLQHTEKMHEYLTLLQDMKPPLDNQESLDNNLEALKNQLRQLETFELGLAPIAVILRKDMKLAEEFLKSLPSDFPRGHVEELSISHQSLKTAFSSLSNVSSERTKQIMLAIDSEMSKLAVSHEEFLHKLKSFSDWVSEKSKSVKDIEIVNVQDSEYVKKRLEFLKANNVLKDLGHTKMQLETTAFDVQFFISEYAQDLSPNQSKQLLRLLNTTQKCFLDVQESVTTQVERLETQLHLEQDLDDQKIVAERQQEYKEKLQGICDLLTQTENRLIGHQEAFMIGDGTVELKKYQSKQEELQKDMQGSAQALAEVVKNTENFLKENGEKLSQEDKALIEQKLNEAKIKCEQLNLKAEQSKKELDKVVTTAIKEETEKVAAVKQLEESKTKIENLLDWLSNVDKDSERAGTKHKQVIEQNGTHFQEGDGKSAIGEEDEVNGNLLETDVDGQVGTTQENLNQQYQKVKAQHEKIISQHQAVIIATQSAQVLLEKQGQYLSPEEKEKLQKNMKELKVHYETALAESEKKMKLTHSLQEELEKFDADYTEFEHWLQQSEQELENLEAGADDINGLMTKLKRQKSFSEDVISHKGDLRYITISGNRVLEAAKSCSKRDGGKVDTSATHREVQRKLDHATDRFRSLYSKCNVLGNNLKDLVDKYQHYEDASCGLLAGLQACEATASKHLSEPIAVDPKNLQRQLEETKALQGQISSQQVAVEKLKKTAEVLLDARGSLLPAKNDIQKTLDDIVGRYEDLSKSVNERNEKLQITLTRSLSVQDGLDEMLDWMGNVESSLKEQGQVPLNSTALQDIISKNIMLEQDIAGRQSSINAMNEKVKKFMETTDPSTASSLQAKMKDLSARFSEASHKHKETLAKMEELKTKVELFENLSEKLQTFLETKTQALTEVDVPGKDVTELSQYMQESTSEFLEHKKHLEVLHSLLKEISSHGLPSDKALVLEKTNNLSKKFKEMEDTIKEKKEAVTSCQEQLDAFQVLVKSLKSWIKETTKKVPIVQPSFGAEDLGKSLEDTKKLQEKWSLKTPEIQKVNNSGISLCNLISAVTTPAKAIAAVKSGGAVLNGEGTATNTEEFWANKGLTSIKKDMTDISHGYEDLGLLLKDKIAELNTKLSKLQKAQEESSAMMQWLQKMNKTATKWQQTPAPTDTEAVKTQVEQNKSFEAELKQNVNKVQELKDKLTELLEENPDTPEAPRWKQMLTEIDSKWQELNQLTIDRQQKLEESSNNLTQFQTVEAQLKQWLVEKELMVSVLGPLSIDPNMLNTQRQQVQILLQEFATRKPQYEQLTAAGQGILSRPGEDPSLRGIVKEQLAAVTQKWDSLTGQLSDRCDWIDQAIVKSTQYQSLLRSLSDKLSDLDNKLSSSLAVSTHPDAMNQQLETAQKMKQEIQQEKKQIKVAQALCEDLSALVKEEYLKAELSRQLEGILKSFKDVEQKAENHVQHLQSACASSHQFQQMSRDFQAWLDTKKEEQNKSHPISAKLDVLESLIKDHKDFSKTLTAQSHMYEKTIAEGENLLLKTQGSEKAALQLQLNTIKTNWDTFNKQVKERENKLKESLEKALKYKEQVETLWPWIDKCQNNLEEIKFCLDPAEGENSIAKLKSLQKEMDQHFGMVELLNNTANSLLSVCEIDKEVVTDENKSLIQKVDMVTEQLHSKKFCLENMTQKFKEFQEVSKESKRQLQCAKEQLDIHDSLGSQAYSNKYLTMLQTQQKSLQALKHQVDLAKRLAQDLVVEASDSKGTSDVLLQVETIAQEHSTLSQQVDEKCSFLETKLQGIGHFQNTIREMFSQFAEFDDELDSMAPVGRDAETLQKQKETIKAFLKKLEALMASNDNANKTCKMMLATEETSPDLVGIKRDLEALSKQCNKLLDRAQAREEQVEGTIKRLEEFYSKLKEFSILLQKAEEHEESQGPVGMETETINQQLNMFKVFQKEEIEPLQGKQQDVNWLGQGLIQSAAKSTSTQGLEHDLDDVNARWKTLNKKVAQRAAQLQEALLHCGRFQDALESLLSWMVDTEELVANQKPPSAEFKVVKAQIQEQKLLQRLLDDRKSTVEVIKREGEKIATTAEPADKVKILKQLSLLDSRWEALLNKAETRNRQLEGISVVAQQFHETLEPLNEWLTTIEKRLVNCEPIGTQASKLEEQIAQHKALEDDIINHNKHLHQAVSIGQSLKVLSSREDKDMVQSKLDFSQVWYIEIQEKSHSRSELLQQALCNAKIFGEDEVELMNWLNEVHDKLSKLSVQDYSTEGLWKQQSELRVLQEDILLRKQNVDQALLNGLELLKQTTGDEVLIIQDKLEAIKARYKDITKLSTDVAKTLEQALQLARRLHSTHEELCTWLDKVEVELLSYETQVLKGEEASQAQMRPKELKKEAKNNKALLDSLNEVSSALLELVPWRAREGLEKMVAEDNERYRLVSDTITQKVEEIDAAILRSQQFDQAADAELSWITETEKKLMSLGDIRLEQDQTSAQLQVQKTFTMEILRHKDIIDDLVKSGHKIMTACSEEEKQSMKKKLDKVLKNYDTICQINSERYLQLERAQSLVNQFWETYEELWPWLTETQSIISQLPAPALEYETLRQQQEEHRQLRELIAEHKPHIDKMNKTGPQLLELSPGEGFSIQEKYVAADTLYSQIKEDVKKRAVALDEAISQSTQFHDKIDQILESLERIVERLRQPPSISAEVEKIKEQISENKNVSVDMEKLQPLYETLKQRGEEMIARSGGTDKDISAKAVQDKLDQMVFIWENIHTLVEEREAKLLDVMELAEKFWCDHMSLIVTIKDTQDFIRDLEDPGIDPSVVKQQQEAAETIREEIDGLQEELDIVINLGSELIAACGEPDKPIVKKSIDELNSAWDSLNKAWKDRIDKLEEAMQAAVQYQDGLQAVFDWVDIAGGKLASMSPIGTDLETVKQQIEELKQFKSEAYQQQIEMERLNHQAELLLKKVTEESDKHTVQDPLMELKLIWDSLEERIINRQHKLEGALLALGQFQHALDELLAWLTHTEGLLSEQKPVGGDPKAIEIELAKHHVLQNDVLAHQSTVEAVNKAGNDLIESSAGEEASNLQNKLEVLNQRWQNVLEKTEQRKQQLDGALRQAKGFHGEIEDLQQWLTDTERHLLASKPLGGLPETAKEQLNVHMEVCAAFEAKEETYKSLMQKGQQMLARCPKSAETNIDQDINNLKEKWESVETKLNERKTKLEEALNLAMEFHNSLQDFINWLTQAEQTLNVASRPSLILDTVLFQIDEHKVFANEVNSHREQIIELDKTGTHLKYFSQKQDVVLIKNLLISVQSRWEKVVQRLVERGRSLDDARKRAKQFHEAWSKLMEWLEESEKSLDSELEIANDPDKIKTQLAQHKEFQKSLGAKHSVYDTTNRTGRSLKEKTSLADDNLKLDDMLSELRDKWDTICGKSVERQNKLEEALLFSGQFTDALQALIDWLYRVEPQLAEDQPVHGDIDLVMNLIDNHKAFQKELGKRTSSVQALKRSARELIEGSRDDSSWVKVQMQELSTRWETVCALSISKQTRLEAALRQAEEFHSVVHALLEWLAEAEQTLRFHGVLPDDEDALRTLIDQHKEFMKKLEEKRAELNKATTMGDTVLAICHPDSITTIKHWITIIRARFEEVLAWAKQHQQRLASALAGLIAKQELLEALLAWLQWAETTLTDKDKEVIPQEIEEVKALIAEHQTFMEEMTRKQPDVDKVTKTYKRRAADPSSLQSHIPVLDKGRAGRKRFPASSLYPSGSQTQIETKNPRVNLLVSKWQQVWLLALERRRKLNDALDRLEELREFANFDFDIWRKKYMRWMNHKKSRVMDFFRRIDKDQDGKITRQEFIDGILSSKFPTSRLEMSAVADIFDRDGDGYIDYYEFVAALHPNKDAYKPITDADKIEDEVTRQVAKCKCAKRFQVEQIGDNKYRVSFQSNFGDSQQLRLVRILRSTVMVRVGGGWMALDEFLVKNDPCRVHHHGSKMLRSESNSSITTTQPTIAKGRTNMELREKFILADGASQGMAAFRPRGRRSRPSSRGASPNRSTSVSSQAAQAASPQVPATTTPKGTPIQGSKLRLPGYLSGKGFHSGEDSGLITTAAARVRTQFADSKKTPSRPGSRAGSKAGSRASSRRGSDASDFDISEIQSVCSDVETVPQTHRPTPRAGSRPSTAKPSKIPTPQRKSPASKLDKSSKR

SEQ ID NO: 34050 - protein, 26 aa, Artificial Sequence
  Synthetic polypeptide
AAWDSEQALGILEDELQRPQLPVWKK

SEQ ID NO: 34051 - protein, 20 aa, Artificial Sequence
  Synthetic polypeptide
KPGVCDQPEQHGIQSKPSAS

SEQ ID NO: 34052 - protein, 634 aa, Artificial Sequence
  Synthetic polypeptide
DGKIFRSQEFVTSLSSMGFRASPRHLRRRVAAAAAARLEEVKPVVEVHHQSEQETSVRKRRIKKSSRVQPEFYHSVQGASIRRPSSGNASYRCSMSSSADFSDEDDFSQKSGSASPAPGDTLPWNLPKHERSKRKIQGGSVLDPAERAVLRIADERDKVQKKTFTKWINQHLMKVRKHVNDLYEDLRDGHNLISLLEVLSGDTLPREKGRMRFHRLQNVQIALDYLKRRQVKLVNIRNDDITDGNPKLTLGLIWTIILHFQISDIHVTGESEDMSAKERLLLWTQQATEGYAGIRCENFTTCWRDGKLFNAIIHKYRPDLIDMNTVAVQSNLANLEHAFYVAEKIGVIRLLDPEDVDVSSPDEKSVITYVSSLYDAFPKVPEGGEGIGANDVEVKWIEYQNMVNYLIQWIRHHVTTMSERTFPNNPVELKALYNQYLQFKETEIPPKETEKSKIKRLYKLLEIWIEFGRIKLLQGYHPNDIEKEWGKLIIAMLEREKALRPEVERLEMLQQIANRVQRDSVICEDKLILAGNALQSDSKRLESGVQFQNEAEIAGYILECENLLRQHVIDVQILIDGKYYQADQLVQRVAKLRDEIMALRNECSSVYSKGRILTTEQTKLMISGITQSLNSGFA

SEQ ID NO: 34053 - protein, 47 aa, Artificial Sequence
  Synthetic polypeptide
SQHFGRTRWTDHLRKKLIFSMLMGYKNWNLFEDILIQKQQDCVWTSG

SEQ ID NO: 34054 - protein, 104 aa, Artificial Sequence
  Synthetic polypeptide
QTWWLMPVIPALWEDKVDRSPEEKIDFQHAHGLQELEFIRGHSDTEAARLCVDQWLKMPGLKTGTINCGTKSSFRRGGHTWVSGKPILCPIMHCNKEFDNGHLL

SEQ ID NO: 34055 - protein, 979 aa, Artificial Sequence
  Synthetic polypeptide
QTWWLMPVIPALWEDKVDRSPEEKIDFQHAHGLQELEFIRGHSDTEAARLCVDQWLKMPGLKTGTINCGTKSSFRRGGHTWVSGKPILCPIMHCNKEFDNGHLLLGHLKRFDHSPCDPTITLHGPFFSSFACVVCYKKFVTQQQYRDHLFDKEATDDGHNNNLLPQIIQCFACPNCFLLFSRKEECSKHMSGKNHFHQSFKLGDNKGIAHPISFPSFAKKLLISLCKDVPFQVKCVACHKTLRSHMELTAHFRVHCRNAGPVAVAEKSITQVAEKFILRGYCPDCNQVFVDETSTQNHKQNSGHKVRVINSVEESVLLYCHSSEGNKDPSSDLHLLLDQSKFSSLKRTMSIKESSSLECIAIPKKKMNLKDKSHEGVACVQKEKSVVKTWFCECNQRFPSEDAVEKHVFSANTMGYKCVVCGKVCDDSGVIRLHMSRIHGGAHLNNFLFWCRTCKKELTRKDTIMAHVTEFHNGHRYFYEMDEVEGETLPSSSTTLDNLTANKPSSAITVIDHSPANSSPRGKWQCRICEDMFDSQEYVKQHCMSLASHKFHRYSCAHCRKPFHKIETLYRHCQDEHDNEIKIKYFCGLCDLIFNVEEAFLSHYEEHHSIDYVFVSEKTETSIKTEDDFPVIETSNQLTCGCRESYICKVNRKEDYSRCLQIMLDKGKLWFRCSLCSATAQNLTDMNTHIHQVHKEKSDEEEQQYVIKCGTCTKAFHDPESAQQHFHRKHCFLQKPSVAHFGSEKSNLYKFTASASHTERKLKQAINYSKSLDMEKGVENDLSYQNIEEEIVELPDLDYLRTMTHIVFVDFDNWSNFFGHLPGHLNQGTFIWGFQGGNTNWKPPLNCKIYNYLNRIGCFFLHPRCSKRKDAADFAICMHAGRLDEQLPKQIPFTILSGDQGFLELENQFKKTQRPAHILNPHHLEGDMMCALLNSISDTTKECDSDDNMGAKNTSIGEEFISTEDVELEEAIRRSLEEM

SEQ ID NO: 34056 - protein, 931 aa, Artificial Sequence
  Synthetic polypeptide
QTWWLMPVIPALWEDKVDRSPEEKIDFQHAHGLQELEFIRGHSDTEAARLCVDQWLKMPGLKTGTINCGTKSSFRRGGHTWVSGKPILCPIMHCNKEFDNGHLLLGHLKRFDHSPCDPTITLHGPFFSSFACVVCYKKFVTQQQYRDHLFDKEATDDGHNNNLLPQIIQCFACPNCFLLFSRKEECSKHMSGKNHFHQSFKLGDNKGIAHPISFPSFAKKLLISLCKDVPFQVKCVACHKTLRSHMELTAHFRVHCRNAGPVAVAEKSITQVAEKFILRGYCPDCNQVFVDETSTQNHKQNSGHKVRVINSVEESVLLYCHSSEGNKDPSSDLHLLLDQSKFSSLKRTMSIKESSSLECIAIPKKKMNLKDKSHEGVACVQKEKSVVKTWFCECNQRFPSEDAVEKHVFSANTMGYKCVVCGKVCDDSGVIRLHMSRIHGGAHLNNFLFWCRTCKKELTRKDTIMAHVTEFHNGHRYFYEMDEVEGETLPSSSTTLDNLTANKPSSAITVIDHSPANSSPRGKWQCRICEDMFDSQEYVKQHCMSLASHKFHRYSCAHCRKPFHKIETLYRHCQDEHDNEIKIKYFCGLCDLIFNVEEAFLSHYEEHHSIDYVFVSEKTETSIKTEDDFPVIETSNQLTCGCRESYICKVNRKEDYSRCLQIMLDKGKLWFRCSLCSATAQNLTDMNTHIHQVHKEKSDEEEQQYVIKCGTCTKAFHDPESAQQHFHRKHCFLQKPSVAHFGSEKSNLYKFTASASHTERKLKQAINYSKSLDMEKGVENDLSYQNIGGNTNWKPPLNCKIYNYLNRIGCFFLHPRCSKRKDAADFAICMHAGRLDEQLPKQIPFTILSGDQGFLELENQFKKTQRPAHILNPHHLEGDMMCALLNSISDTTKECDSDDNMGAKNTSIGEEFISTEDVELEEAIRRSLEEM

SEQ ID NO: 34057 - protein, 959 aa, Artificial Sequence
  Synthetic polypeptide
QTWWLMPVIPALWEDKVDRSPEEKIDFQHAHGLQELEFIRGHSDTEAARLCVDQWLKMPGLKTGTINCGTKSSFRRGGHTWVSGKPILCPIMHCNKEFDNGHLLLGHLKRFDHSPCDPTITLHGPFFSSFACVVCYKKFVTQQQYRDHLFDKEATDDGHNNNLLPQIIQCFACPNCFLLFSRKEECSKHMSGKNHFHQSFKLGDNKGIAHPISFPSFAKKLLISLCKDVPFQVKCVACHKTLRSHMELTAHFRVHCRNAGPVAVAEKSITQVAEKFILRGYCPDCNQVFVDETSTQNHKQNSGHKVRVINSVEESVLLYCHSSEGNKDPSSDLHLLLDQSKFSSLKRTMSIKESSSLECIAIPKKKMNLKDKSHEGVACVQKEKSVVKTWFCECNQRFPSEDAVEKHVFSANTMGYKCVVCGKVCDDSGVIRLHMSRIHGGAHLNNFLFWCRTCKKELTRKDTIMAHVTEFHNGHRYFYEMDEVEGETLPSSSTTLDNLTANKPSSAITVIDHSPANSSPRGKWQCRICEDMFDSQEYVKQHCMSLASHKFHRYSCAHCRKPFHKIETLYRHCQDEHDNEIKIKYFCGLCDLIFNVEEAFLSHYEEHHSIDYVFVSEKTETSIKTEDDFPVIETSNQLTCGCRESYICKVNRKEDYSRCLQIMLDKGKLWFRCSLCSATAQNLTDMNTHIHQVHKEKSDEEEQQYVIKCGTCTKAFHDPESAQQHFHRKHCFLQKPSVAHFGSEKSNLYKFTASASHTERKLKQAINYSKSLDMEKGVENDLSYQNIEEEIVELPDLDYLRTMTHIVFVDFDNWSNFFGHLPGHLNQGTFIWGFQGGNTNWKPPLNCKIYNYLNRIGCFFLHPRCSKRKDAADFAICMHAGRLDEQLPKQIPFTILSGDQGFLELENQFKKTQRPAHILNPHHLEGDMMCALLNSISDTTKGTQLQSQCKPPKRRRLHC

SEQ ID NO: 34058 - protein, 166 aa, Artificial Sequence
  Synthetic polypeptide
GRARWLTSVIPELWKAEADGSRGGNTNWKPPLNCKIYNYLNRIGCFFLHPRCSKRKDAADFAICMHAGRLDEQLPKQIPFTILSGDQGFLELENQFKKTQRPAHILNPHHLEGDMMCALLNSISDTTKECDSDDNMGAKNTSIGEEFISTEDVELEEAIRRSLEEM

SEQ ID NO: 34059 - protein, 30 aa, Artificial Sequence
  Synthetic polypeptide
SQNFGRLRRTDHEEETPIGSLRSTVRFITT

SEQ ID NO: 34060 - protein, 17 aa, Artificial Sequence
  Synthetic polypeptide
GGRITRRKHQLEASAQL

SEQ ID NO: 34061 - protein, 146 aa, Artificial Sequence
  Synthetic polypeptide
GRARWLTSVIPELWKAEADGSRGGNTNWKPPLNCKIYNYLNRIGCFFLHPRCSKRKDAADFAICMHAGRLDEQLPKQIPFTILSGDQGFLELENQFKKTQRPAHILNPHHLEGDMMCALLNSISDTTKGTQLQSQCKPPKRRRLHC

SEQ ID NO: 34062 - protein, 50 aa, Artificial Sequence
  Synthetic polypeptide
GRARWLTSVIPELWKAEADGSRGQKIETILANMEETPIGSLRSTVRFITT

SEQ ID NO: 34063 - protein, 35 aa, Artificial Sequence
  Synthetic polypeptide
SQNFGRLRRTDHEVRRSRPSWLTWRKHQLEASAQL

SEQ ID NO: 34064 - protein, 145 aa, Artificial Sequence
  Synthetic polypeptide
HGGNTNWKPPLNCKIYNYLNRIGCFFLHPRCSKRKDAADFAICMHAGRLDEQLPKQIPFTILSGDQGFLELENQFKKTQRPAHILNPHHLEGDMMCALLNSISDTTKECDSDDNMGAKNTSIGEEFISTEDVELEEAIRRSLEEM

SEQ ID NO: 34065 - protein, 125 aa, Artificial Sequence
  Synthetic polypeptide
HGGNTNWKPPLNCKIYNYLNRIGCFFLHPRCSKRKDAADFAICMHAGRLDEQLPKQIPFTILSGDQGFLELENQFKKTQRPAHILNPHHLEGDMMCALLNSISDTTKGTQLQSQCKPPKRRRLHC

SEQ ID NO: 34066 - protein, 549 aa, Artificial Sequence
  Synthetic polypeptide
GWTRWLTPVIPAPGEADAGRSQGNPGLHSPMLDLDNDTRPSVLGHLSQTASLKRGSSFQSGRDDTWRYKTPHRVAFVEKLTKLVLSQLPNFWKLWISYVNGSLFSETAEKSGQIERSKNVRQRQNDFKKMIQEVMHSLVKLTRGALLPLSIRDGEAKQYGGWEVKCELSGQWLAHAIQTVRLTHESLTALEIPNDLLQTIQDLILDLRVRCVMATLQHTAEEIKRLAEKEDWIVDNEGLTSLPCQFEQCIVCSLQSLKGVLECKPGEASVFQQPKTQEEVCQLSINIMQVFIYCLEQLSTKPDADIDTTHLSVDVSSPDLFGSIHEDFSLTSEQRLLIVLSNCCYLERHTFLNIAEHFEKHNFQGIEKITQVSMASLKELDQRLFENYIELKADPIVGSLEPGIYAGYFDWKDCLPPTGVRNYLKEALVNIIAVHAEVFTISKELVPRVLSKVIEAVSEELSRLMQCVSSFSKNGALQARLEICALRDTVAVYLTPESKSSFKQALEALPQLSSGADKKLLEELLNKFKSSMHLQLTCFQAASSTMMKT

SEQ ID NO: 34067 - protein, 42 aa, Artificial Sequence
  Synthetic polypeptide
SQHLGRLTQADHKVTQACTVPCWILIMIHVPQCWAISVRQRP

SEQ ID NO: 34068 - protein, 6 aa, Artificial Sequence
  Synthetic polypeptide
RRQITR

SEQ ID NO: 34069 - protein, 221 aa, Artificial Sequence
  Synthetic polypeptide
ESGPSADTESAGVLILNIPASRTDSTRDEGNETEANSMNTLRRTRKKVTKPYVCSTEVGETDMSNSNDCMRDSSQILTPPQLSSRMKHIRQAMAKNRLQFVRFEATDLHGVSRSKTIPAHFFQEKVSHGVCMPRGYLEVIPNPKDNEMNNIRATCFNSDIVLMPELSTFRVLPWADRTARVICDTFTVTVSGMSIGRKTCSAALLELSSSRSLGKNGWQDS

SEQ ID NO: 34070 - protein, 21 aa, Artificial Sequence
  Synthetic polypeptide
IYQPPELTQQEMKAMRLKPTA

SEQ ID NO: 34071 - protein, 204 aa, Artificial Sequence
  Synthetic polypeptide
ESGPSADTESAGVLILNIPASRTDSTRDEGNETEANSMNTLRRTRKKVTKPYVCSTEVGETDMSNSNDCMRDSSQILTPPQLSSRMKHIRQAMAKNRLQFVRFEATDLHGVSRSKTIPAHFFQEKVSHGVCMPRGYLEVIPNPKDNEMNNIRATCFNSDIVLMPELSTFRVLPWADRTARVICDTFTVTAPEKLMNFKVIMSSR

SEQ ID NO: 34072 - protein, 522 aa, Artificial Sequence
  Synthetic polypeptide
ESGPSADTESAGVLILNIPASRTDSTRDEGNETEANSMNTLRRTRKKVTKPYVCSTEVGETDMSNSNDCMRDSSQILTPPQLSSRMKHIRQAMAKNRLQFVRFEATDLHGVSRSKTIPAHFFQEKVSHGVCMPRGYLEVIPNPKDNEMNNIRATCFNSDIVLMPELSTFRVLPWADRTARVICDTFTVTGEPLLTSPRYIAKRQLSHLQASGFSLLSAFIYDFCIFGVPEILNSKIISFPALTFLNNHDQPFMQELVDGLYHTGANVESFSSSTRPGQMEISFLPEFGISSADNAFTLRTGVKEVARKYNYIASFFIETGFCDSGILSHSLWDVDRKKNMFCSTSGTEQLTITGKKWLAGLLKHSAALSCLMAPSVSCRKRYSKDRKDLKKSVPTTWGYNDNSCIFNIKCHGEKGTRIENKLGSATANPYLVLAATVAAGLDGLHSSNEVLAGPDESTDFYQVEPSEIPLKLEDALVALEEDQCLRQALGETFIRYFVAMKKYELENEEIAAERNKFLEYFI

SEQ ID NO: 34073 - protein, 788 aa, Artificial Sequence
  Synthetic polypeptide
LVVGLDDIMDEGVVKESGNDTIDEEELILPNRNLRDKVEENSVRSPRKSPRLMAQEQVRSLRQSTIAKRSNAAPLSNTKKASGKTVSTAKAGVKQPERSQVKEEVCMSLKPEYHKENRRCSRNSGQIEVVPEVSVSSSHSSVSSCLEMKDEDGLDSKHKCNNPGEIDVPSHELNCSLLSETCVTIGEKKNEALMECKAKPVGSPLFKFSDKEEHEQNDSISGKTGETVVEEMIATRKVEQDSKETVKLSHEDDHILEDAGSSDISSDAACTNPNKTENSLVGLPSCVDEVTECNLELKDTMGIADKTENTLERNKIEPLGYCEDAESNRQLESTEFNKSNLEVVDTSTFGPESNILENAICDVPDQNSKQLNAIESTKIESHETANLQDDRNSQSSSVSYLESKSVKSKHTKPVIHSKQNMTTDAPKKIVAAKYEVIHSKTKVNVKSVKRNTDVPESQQNFHRPVKVRKKQIDKEPKIQSCNSGVKSVKNQAHSVLKKTLQDQTLVQIFKPLTHSLSDKSHAHPGCLKEPHHPAQTGHVSHSSQKQCHKPQQQAPAMKTNSHVKEELEHPGVEHFKEEDKLKLKKPEKNLQPRQRRSSKSFSLDEPPLFIPDNIATIRREGSDHSSSFESKYMWTPSKQCGFCKKPHGNRFMVGCGRCDDWFHGDCVGLSLSQAQQMGEEDKEYVCVKCCAEEDKKTEILDPDTLENQATVEFHSGDKTMECEKLGLSKHTTNDRTKYIDDTVKHKVKILKRESGEGRNSSDCRDNEIKKWQLAPLRKMGQPVLPRRS

SEQ ID NO: 34074 - protein, 1959 aa, Artificial Sequence
  Synthetic polypeptide
LVVGLDDIMDEGVVKESGNDTIDEEELILPNRNLRDKVEENSVRSPRKSPRLMAQEQVRSLRQSTIAKRSNAAPLSNTKKASGKTVSTAKAGVKQPERSQVKEEVCMSLKPEYHKENRRCSRNSGQIEVVPEVSVSSSHSSVSSCLEMKDEDGLDSKHKCNNPGEIDVPSHELNCSLLSETCVTIGEKKNEALMECKAKPVGSPLFKFSDKEEHEQNDSISGKTGETVVEEMIATRKVEQDSKETVKLSHEDDHILEDAGSSDISSDAACTNPNKTENSLVGLPSCVDEVTECNLELKDTMGIADKTENTLERNKIEPLGYCEDAESNRQLESTEFNKSNLEVVDTSTFGPESNILENAICDVPDQNSKQLNAIESTKIESHETANLQDDRNSQSSSVSYLESKSVKSKHTKPVIHSKQNMTTDAPKKIVAAKYEVIHSKTKVNVKSVKRNTDVPESQQNFHRPVKVRKKQIDKEPKIQSCNSGVKSVKNQAHSVLKKTLQDQTLVQIFKPLTHSLSDKSHAHPGCLKEPHHPAQTGHVSHSSQKQCHKPQQQAPAMKTNSHVKEELEHPGVEHFKEEDKLKLKKPEKNLQPRQRRSSKSFSLDEPPLFIPDNIATIRREGSDHSSSFESKYMWTPSKQCGFCKKPHGNRFMVGCGRCDDWFHGDCVGLSLSQAQQMGEEDKEYVCVKCCAEEDKKTEILDPDTLENQATVEFHSGDKTMECEKLGLSKHTTNDRTKYIDDTVKHKVKILKRESGEGRNSSDCRDNEIKKWQLAPLRKMGQPVLPRRSSEEKSEKIPKESTTVTCTGEKASKPGTHEKQEMKKKKVEKGVLNVHPAASASKPSADQIRQSVRHSLKDILMKRLTDSNLKVPEEKAAKVATKIEKELFSFFRDTDAKYKNKYRSLMFNLKDPKNNILFKKVLKGEVTPDHLIRMSPEELASKELAAWRRRENRHTIEMIEKEQREVERRPITKITHKGEIEIESDAPMKEQEAAMEIQEPAANKSLEKPEGSEKQKEEVDSMSKDTTSQHRQHLFDLNCKICIGRMAPPVDDLSPKKVKVVVGVARKHSDNEAESIADALSSTSNILASEFFEEEKQESPKSTFSPAPRPEMPGTVEVESTFLARLNFIWKGFINMPSVAKFVTKAYPVSGSPEYLTEDLPDSIQVGGRISPQTVWDYVEKIKASGTKEICVVRFTPVTEEDQISYTLLFAYFSSRKRYGVAANNMKQVKDMYLIPLGATDKIPHPLVPFDGPGLELHRPNLLLGLIIRQKLKRQHSACASTSHIAETPESAPPIALPPDKKSKIEVSTEEAPEEENDFFNSFTTVLHKQRNKPQQNLQEDLPTAVEPLMEVTKQEPPKPLRFLPGVLIGWENQPTTLELANKPLPVDDILQSLLGTTGQVYDQAQSVMEQNTVKEIPFLNEQTNSKIEKTDNVEVTDGENKEIKVKVDNISESTDKSAEIETSVVGSSSISAGSLTSLSLRGKPPDVSTEAFLTNLSIQSKQEETVESKEKTLKRQLQEDQENNLQDNQTSNSSPCRSNVGKGNIDGNVSCSENLVANTARSPQFINLKRDPRQAAGRSQPVTTSESKDGDSCRNGEKHMLPGLSHNKEHLTEQINVEEKLCSAEKNSCVQQSDNLKVAQNSPSVENIQTSQAEQAKPLQEDILMQNIETVHPFRRGSAVATSHFEVGNTCPSEFPSKSITFTSRSTSPRTSTNFSPMRPQQPNLQHLKSSPPGFPFPGPPNFPPQSMFGFPPHLPPPLLPPPGFGFAQNPMVPWPPVVHLPGQPQRMMGPLSQASRYIGPQNFYQVKDIRRPERRHSDPWGRQDQQQLDRPFNRGKGDRQRFYSDSHHLKRERHEKEWEQESERHRRRDRSQDKDRDRKSREEGHKDKERARLSHGDRGTDGKASRDSRNVDKKPDKPKSEDYEKDKEREKSKHREGEKDRDRYHKDRDHTDRTKSKR

SEQ ID NO: 34075 - protein, 656 aa, Artificial Sequence
  Synthetic polypeptide
LVVGLDDIMDEGVVKESGNDTIDEEELILPNRNLRDKVEENSVRSPRKSPRLMAQEQVRSLRQSTIAKRSNAAPLSNTKKASGKTVSTAKAGVKQPERSQVKEEVCMSLKPEYHKENRRCSRNSGQIEVVPEVSVSSSHSSVSSCLEMKDEDGLDSKHKCNNPGEIDVPSHELNCSLLSETCVTIGEKKNEALMECKAKPVGSPLFKFSDKEEHEQNDSISGKTGETVVEEMIATRKVEQDSKETVKLSHEDDHILEDAGSSDISSDAACTNPNKTENSLVGLPSCVDEVTECNLELKDTMGIADKTENTLERNKIEPLGYCEDAESNRQLESTEFNKSNLEVVDTSTFGPESNILENAICDVPDQNSKQLNAIESTKIESHETANLQDDRNSQSSSVSYLESKSVKSKHTKPVIHSKQNMTTDAPKKIVAAKYEVIHSKTKVNVKSVKRNTDVPESQQNFHRPVKVRKKQIDKEPKIQSCNSGVKSVKNQAHSVLKKTLQDQTLVQIFKPLTHSLSDKSHAHPGCLKEPHHPAQTGHVSHSSQKQCHKPQQQAPAMKTNSHVKEELEHPGVEHFKEEDKLKLKKPEKNLQPRQRRSSKSFSLDEPPLFIPDNIATIRREGSDHSSSFESKYMWTPSKQCGFCKKPHGNRCVCMCV

SEQ ID NO: 34076 - protein, 94 aa, Artificial Sequence
  Synthetic polypeptide
LVVGLDDIMDEGVVKESGNDTIDEEELILPNRNLRDKVEENSVRSPRKSPRLMAQEQVRSLRQSTIAKRSNAAPLSNTKKASGKTVSTAKAGVK

SEQ ID NO: 34077 - protein, 30 aa, Artificial Sequence
  Synthetic polypeptide
GLSSHVELEKHDTGQHCVQHLGGPQDFPVL

SEQ ID NO: 34078 - protein, 87 aa, Artificial Sequence
  Synthetic polypeptide
NGSFTAEALFSLLATIHVRRDLLLLAFCHDCEASPAMWNWRSMTLANTASSIWVALRISQSSEMAILLSANLKSENTALKKCKNTSC

SEQ ID NO: 34079 - protein, 24 aa, Artificial Sequence
  Synthetic polypeptide
DVTCSSLPSAMIVRPLQPCGTGEA

SEQ ID NO: 34080 - protein, 67 aa, Artificial Sequence
  Synthetic polypeptide
YPSYNIIEKLERLEDCLAHAAIVPLGGKDHSAQRQFLPVILNMTLHTTVAEEQPAFHYLMDTPVSVL

SEQ ID NO: 34081 - protein, 25 aa, Artificial Sequence
  Synthetic polypeptide
KTAWHMLQLYHWVERIILHRDSFYL

SEQ ID NO: 34082 - protein, 526 aa, Artificial Sequence
  Synthetic polypeptide
HNRETRKVRRLPGTCCNCTTGWKGSFCTETVSTCDPEHDPPHHCSRGATCISLPHGYTCFCPLGTTGIYCEQALSISDPSFRSNELSWMSFASFHVRKKTHIQLQFQPLAADGILFYAAQHLKAQSGDFLCISLVNSSVQLRYNLGDRTIILETLQKVTINGSTWHIIKAGRVGAEGYLDLDGINVTEKASTKMSSLDTNTDFYIGGVSSLNLVNPMAIENEPVGFQGCIRQVIINNQELQLTEFGAKGGSNVGDCDGTACGYNTCRNGGECTVNGTTFSCRCLPDWAGNTCNQSVSCLNNLCLHQSLCIPDQSFSYSCLCTLGWVGRYCENKTSFSTAKFMGNSYIKYIDPNYRMRNLQFTTISLNFSTTKTEGLIVWMGIAQNEENDFLAIGLHNQTLKIAVNLGERISVPMSYNNGTFCCNKWHHVVVIQNQTLIKAYINNSLILSEDIDPHKNFVALNYDGICYLGGFEYGRKVNIVTQEIFKTNFVGKIKDVVFFQEPKNIELIKLEGYNVYDGDEQNEVT

SEQ ID NO: 34083 - protein, 547 aa, Artificial Sequence
  Synthetic polypeptide
HNRETRKVRRLPGTCCNCTTGWKGSFCTETVSTCDPEHDPPHHCSRGATCISLPHGYTCFCPLGTTGIYCEQALILIVILEKPKPAERKVKKEALSISDPSFRSNELSWMSFASFHVRKKTHIQLQFQPLAADGILFYAAQHLKAQSGDFLCISLVNSSVQLRYNLGDRTIILETLQKVTINGSTWHIIKAGRVGAEGYLDLDGINVTEKASTKMSSLDTNTDFYIGGVSSLNLVNPMAIENEPVGFQGCIRQVIINNQELQLTEFGAKGGSNVGDCDGTACGYNTCRNGGECTVNGTTFSCRCLPDWAGNTCNQSVSCLNNLCLHQSLCIPDQSFSYSCLCTLGWVGRYCENKTSFSTAKFMGNSYIKYIDPNYRMRNLQFTTISLNFSTTKTEGLIVWMGIAQNEENDFLAIGLHNQTLKIAVNLGERISVPMSYNNGTFCCNKWHHVVVIQNQTLIKAYINNSLILSEDIDPHKNFVALNYDGICYLGGFEYGRKVNIVTQEIFKTNFVGKIKDVVFFQEPKNIELIKLEGYNVYDGDEQNEVT

SEQ ID NO: 34084 - protein, 83 aa, Artificial Sequence
  Synthetic polypeptide
HNRETRKVRRLPGTCCNCTTGWKGSFCTETVSTCDPEHDPPHHCSRGATCISLPHGYTCFCPLGTTGIYCEQGHQFIGKDVFK

SEQ ID NO: 34085 - protein, 734 aa, Artificial Sequence
  Synthetic polypeptide
VRRVNLNHKIGPDCSELTLDVSGQGTLNPYCVLWDDSKTNESLGTWSTQGCKTVLTDASHTKCLCDRLSTFAILAQQPREIIMESSGTPSVTLIVGSGLSCLALITLAVVYAALWRYIRSERSIILINFCLSIISSNILILVGQTQTHNKSICTTTTAFLHFFFLASFCWVLTEAWQSYMAVTGKIRTRLIRKRFLCLGWGLPALVVATSVGFTRTKGYGTDHYCWLSLEGGLLYAFVGPAAAVVLVNMVIGILVFNKLVSRDGILDKKLKHRAGQMSEPHSGLTLKCAKCGVVSTTALSATTASNAMASLWSSCVVLPLLALTWMSAVLAMTDKRSILFQILFAVFDSLQGFVIVMVHCILRREVQDAFRCRLRNCQDPINADSSSSFPNGHAQIMTDFEKDVDIACRSVLHKDIGPCRAATITGTLSRISLNDDEEEKGTNPEGLSYSTLPGNVISKVIIQQPTGLHMPMSMNELSNPCLKKENSELRRTVYLCTDDNLRGADMDIVHPQERMMESDYIVMPRSSVNNQPSMKEESKMNIGMETLPHERLLHYKVNPEFNMNPPVMDQFNMNLEQHLAPQEHMQNLPFEPRTAVKNFMASELDDNAGLSRSETGSTISMSSLERRKSRYSDLDFEKVMHTRKRHMELFQELNQKFQTLDRFRDIPNTSSMENPAPNKNPWDTFKNPSEYPHYTTINVLDTEAKDALELRPAEWEKCLNLPLDVQEGDFQTEV

SEQ ID NO: 34086 - protein, 9 aa, Artificial Sequence
  Synthetic polypeptide
LWTLVGRVL

SEQ ID NO: 34087 - protein, 13 aa, Artificial Sequence
  Synthetic polypeptide
WAGYFESLLCIVG

SEQ ID NO: 34088 - protein, 16 aa, Artificial Sequence
  Synthetic polypeptide
SDIQSGYFESLLCIVG

SEQ ID NO: 34089 - protein, 721 aa, Artificial Sequence
  Synthetic polypeptide
WRREDDLTFNQGTLNPYCVLWDDSKTNESLGTWSTQGCKTVLTDASHTKCLCDRLSTFAILAQQPREIIMESSGTPSVTLIVGSGLSCLALITLAVVYAALWRYIRSERSIILINFCLSIISSNILILVGQTQTHNKSICTTTTAFLHFFFLASFCWVLTEAWQSYMAVTGKIRTRLIRKRFLCLGWGLPALVVATSVGFTRTKGYGTDHYCWLSLEGGLLYAFVGPAAAVVLVNMVIGILVFNKLVSRDGILDKKLKHRAGQMSEPHSGLTLKCAKCGVVSTTALSATTASNAMASLWSSCVVLPLLALTWMSAVLAMTDKRSILFQILFAVFDSLQGFVIVMVHCILRREVQDAFRCRLRNCQDPINADSSSSFPNGHAQIMTDFEKDVDIACRSVLHKDIGPCRAATITGTLSRISLNDDEEEKGTNPEGLSYSTLPGNVISKVIIQQPTGLHMPMSMNELSNPCLKKENSELRRTVYLCTDDNLRGADMDIVHPQERMMESDYIVMPRSSVNNQPSMKEESKMNIGMETLPHERLLHYKVNPEFNMNPPVMDQFNMNLEQHLAPQEHMQNLPFEPRTAVKNFMASELDDNAGLSRSETGSTISMSSLERRKSRYSDLDFEKVMHTRKRHMELFQELNQKFQTLDRFRDIPNTSSMENPAPNKNPWDTFKNPSEYPHYTTINVLDTEAKDALELRPAEWEKCLNLPLDVQEGDFQTEV

SEQ ID NO: 34090 - protein, 6 aa, Artificial Sequence
  Synthetic polypeptide
HSIRVL

SEQ ID NO: 34091 - protein, 22 aa, Artificial Sequence
  Synthetic polypeptide
GQLNLLFFPVSGYFGILLDICS

SEQ ID NO: 34092 - protein, 525 aa, Artificial Sequence
  Synthetic polypeptide
TSFSSQSQAILAFCWIYVRKYQSRRESEVVSTITAIFSLAIALITSALLPVDIFLVSYMKNQNGTFKDWANANVSRQIEDTVLYGYYTLYSVILFCVFFWIPFVYFYYEEKDDDDTSKCTQIKTALKYTLGFVVICALLLLVGAFVPLNVPNNKNSTEWEKVKSLFEELGSSHGLAALSFSISSLTLIGMLAAITYTAYGMSALPLNLIKGTRSAAYERLENTEDIEEVEQHIQTIKSKSKDGRPLPARDKRALKQFEERLRTLKKRERHLEFIENSWWTKFCGALRPLKIVWGIFFILVALLFVISLFLSNLDKALHSAGIDSGFIIFGANLSNPLNMLLPLLQTVFPLDYILITIIIMYFIFTSMAGIRNIGIWFFWIRLYKIRRGRTRPQALLFLCMILLLIVLHTSYMIYSLAPQYVMYGSQNYLIETNITSDNHKGNSTLSVPKRCDADAPEDQCTVTRTYLFLHKFWFFSAAYYFGNWAFLGVFLIGLIVSCCKGKKSVIEGVDEDSDISDDEPSVYSA

SEQ ID NO: 34093 - protein, 76 aa, Artificial Sequence
  Synthetic polypeptide
WVYQGFPLLLLPHSVLLSLCKKCFSLSAMIVRPPQPCGTVRTIKPPFLPSLRLFWHSAGYMFVNTKVGGKVKLSPP

SEQ ID NO: 34094 - protein, 377 aa, Artificial Sequence
  Synthetic polypeptide
TSFSSQSQAILAFCWIYVRKYQSRRESEVVSTITAIFSLAIALITSALLPVDIFLVSYMKNQNGTFKDWANANVSRQIEDTVLYGYYTLYSVILFCVFFWIPFVYFYYEEKDDDDTSKCTQIKTALKYTLGFVVICALLLLVGAFVPLNVPNNKNSTEWEKVKSLFEELGSSHGLAALSFSISSLTLIGMLAAITYTAYGMSALPLNLIKGTRSAAYERLENTEDIEEVEQHIQTIKSKSKDGRPLPARDKRALKQFEERLRTLKKRERHLEFIENSWWTKFCGALRPLKIVWGIFFILVALLFVISLFLSNLDKALHSAGIDSGFIIFGANLSNPLNMLLPLLQTEFEILAYGSFGLDYIKSEEVEPGPKHSFFSA

SEQ ID NO: 34095 - protein, 1063 aa, Artificial Sequence
  Synthetic polypeptide
FINYQPEHLSKIFPKGLPEEYSVAAMFRVRRNAKKERWFLWQVLNQQNIPQISIVVDGGKKVVEFMFQATEGDVLNYIFRNRELRPLFDRQWHKLGISIQSQVISLYMDCNLIARRQTDEKDTVDFHGRTVIATRASDGKPVDIELHQLKIYCSANLIAQETCCEISDTKCPEQDGFGNIASSWVTAHASKMSSYLPAKQELKDQCQCIPNKGEAGLPGAPGSPGQKGHKGEPGENGLHGAPGFPGQKGEQGFEGSKGETGEKGEQGEKGDPALAGLNGENGLKGDLGPHGPPGPKGEKGDTGPPGPPALPGSLGIQGPQGPPGKEGQRGRRGKTGPPGKPGPPGPPGPPGIQGIHQTLGGYYNKDNKGNDEHEAGGLKGDKGETGLPGFPGSVGPKGQKGEPGEPFTKGEKGDRGEPGVIGSQGVKGEPGDPGPPGLIGSPGLKGQQGSAGSMGPRGPPGDVGLPGEHGIPGKQGIKGEKGDPGGIIGPPGLPGPKGEAGPPGKSLPGEPGLDGNPGAPGPRGPKGERGLPGVHGSPGDIGPQGIGIPGRTGAQGPAGEPGIQGPRGLPGLPGTPGTPGNDGVPGRDGKPGLPGPPGDPIALPLLGDIGALLKNFCGNCQASVPGLKSNKGEEGGAGEPGKYDSMARKGDIGPRGPPGIPGREGPKGSKGERGYPGIPGEKGDEGLQGIPGIPGAPGPTGPPGLMGRTGHPGPTGAKGEKGSDGPPGKPGPPGPPGIPFNERNGMSSLYKIKGGVNVPSYPGPPGPPGPKGDPGPVGEPGAMGLPGLEGFPGVKGDRGPAGPPGIAGMSGKPGAPGPPGVPGEPGERGPVGDIGFPGPEGPSGKPGINGKDGIPGAQGIMGKPGDRGPKGERGDQGIPGDRGSQGERGKPGLTGMKGAIGPMGPPGNKGSMGSPGHQGPPGSPGIPGIPADAVSFEEIKKYINQEVLRIFEERMAVFLSQLKLPAAMLAAQAYGRPGPPGKDGLPGPPGDPGPQGYRGQKGERGEPGIGLPGSPGLPGTSALGLPGSPGAPGPQGPPGPSGRCNPEDCLYPVSHAHQRTGGN

SEQ ID NO: 34096 - protein, 754 aa, Artificial Sequence
  Synthetic polypeptide
QEGSLGIQGPQGPPGKEGQRGRRGKTGPPGKPGPPGPPGPPGIQGIHQTLGGYYNKDNKGNDEHEAGGLKGDKGETGLPGFPGSVGPKGQKGEPGEPFTKGEKGDRGEPGVIGSQGVKGEPGDPGPPGLIGSPGLKGQQGSAGSMGPRGPPGDVGLPGEHGIPGKQGIKGEKGDPGGIIGPPGLPGPKGEAGPPGKSLPGEPGLDGNPGAPGPRGPKGERGLPGVHGSPGDIGPQGIGIPGRTGAQGPAGEPGIQGPRGLPGLPGTPGTPGNDGVPGRDGKPGLPGPPGDPIALPLLGDIGALLKNFCGNCQASVPGLKSNKGEEGGAGEPGKYDSMARKGDIGPRGPPGIPGREGPKGSKGERGYPGIPGEKGDEGLQGIPGIPGAPGPTGPPGLMGRTGHPGPTGAKGEKGSDGPPGKPGPPGPPGIPFNERNGMSSLYKIKGGVNVPSYPGPPGPPGPKGDPGPVGEPGAMGLPGLEGFPGVKGDRGPAGPPGIAGMSGKPGAPGPPGVPGEPGERGPVGDIGFPGPEGPSGKPGINGKDGIPGAQGIMGKPGDRGPKGERGDQGIPGDRGSQGERGKPGLTGMKGAIGPMGPPGNKGSMGSPGHQGPPGSPGIPGIPADAVSFEEIKKYINQEVLRIFEERMAVFLSQLKLPAAMLAAQAYGRPGPPGKDGLPGPPGDPGPQGYRGQKGERGEPGIGLPGSPGLPGTSALGLPGSPGAPGPQGPPGPSGRCNPEDCLYPVSHAHQRTGGN

SEQ ID NO: 34097 - protein, 91 aa, Artificial Sequence
  Synthetic polypeptide
RGPQPPGKGPVPVRSLLGTGPHSRRVPWGYKAPKVHLEKRVRGEDEGKQDLPENQDPQDHLDLLEYKEYTKLLVDIITRITREMMNMKLEA

SEQ ID NO: 34098 - protein, 59 aa, Artificial Sequence
  Synthetic polypeptide
EPDHIAGGFPGDTRPPRSTWKRGSEGKTRENRTSRKTRTPRTTWTSWNTRNTPNSWWIL

SEQ ID NO: 34099 - protein, 756 aa, Artificial Sequence
  Synthetic polypeptide
FHITGSLGIQGPQGPPGKEGQRGRRGKTGPPGKPGPPGPPGPPGIQGIHQTLGGYYNKDNKGNDEHEAGGLKGDKGETGLPGFPGSVGPKGQKGEPGEPFTKGEKGDRGEPGVIGSQGVKGEPGDPGPPGLIGSPGLKGQQGSAGSMGPRGPPGDVGLPGEHGIPGKQGIKGEKGDPGGIIGPPGLPGPKGEAGPPGKSLPGEPGLDGNPGAPGPRGPKGERGLPGVHGSPGDIGPQGIGIPGRTGAQGPAGEPGIQGPRGLPGLPGTPGTPGNDGVPGRDGKPGLPGPPGDPIALPLLGDIGALLKNFCGNCQASVPGLKSNKGEEGGAGEPGKYDSMARKGDIGPRGPPGIPGREGPKGSKGERGYPGIPGEKGDEGLQGIPGIPGAPGPTGPPGLMGRTGHPGPTGAKGEKGSDGPPGKPGPPGPPGIPFNERNGMSSLYKIKGGVNVPSYPGPPGPPGPKGDPGPVGEPGAMGLPGLEGFPGVKGDRGPAGPPGIAGMSGKPGAPGPPGVPGEPGERGPVGDIGFPGPEGPSGKPGINGKDGIPGAQGIMGKPGDRGPKGERGDQGIPGDRGSQGERGKPGLTGMKGAIGPMGPPGNKGSMGSPGHQGPPGSPGIPGIPADAVSFEEIKKYINQEVLRIFEERMAVFLSQLKLPAAMLAAQAYGRPGPPGKDGLPGPPGDPGPQGYRGQKGERGEPGIGLPGSPGLPGTSALGLPGSPGAPGPQGPPGPSGRCNPEDCLYPVSHAHQRTGGN

SEQ ID NO: 34100 - protein, 81 aa, Artificial Sequence
  Synthetic polypeptide
LQENKLRTLTDSTLRVPWGYKAPKVHLEKRVRGEDEGKQDLPENQDPQDHLDLLEYKEYTKLLVDIITRITREMMNMKLEA

SEQ ID NO: 34101 - protein, 71 aa, Artificial Sequence
  Synthetic polypeptide
KGPSSCRKTSSGLSLIPHYGFPGDTRPPRSTWKRGSEGKTRENRTSRKTRTPRTTWTSWNTRNTPNSWWIL

SEQ ID NO: 34102 - protein, 27 aa, Artificial Sequence
  Synthetic polypeptide
ARKKALMRTNHATTLISAYQPPELISR

SEQ ID NO: 34103 - protein, 41 aa, Artificial Sequence
  Synthetic polypeptide
GHSKKRPSVSQEESPHENQPCYHPDFSLPASRANFQMMLIQ

SEQ ID NO: 34104 - protein, 318 aa, Artificial Sequence
  Synthetic polypeptide
SSVYLFFFCCQETKGQKEKEKKKEEKKREKEPEKPAKPLTAEKLQKKDQQLEPKKSTSPKKAAEPTVDLLGLDGPAVAPVTNGNTTVPPLNDDLDIFGPMISNPLPATVMPPAQGTPSAPAAATLSTVTSGDLDLFTEQTTKSEEVAKKQLSKDSILSLYGTGTIQQQSTPGVFMGPTNIPFTSQAPAAFQGFPSMGVPVPAAPGLIGNVMGQSPSMMVGMPMPNGFMGNAQTGVMPLPQNVVGPQGGMVGQMGAPQSKFGLPQAQQPQWSLSQMNQQMAGMSISSATPTAGFGQPSSTTAGWSGSSSGQTLSTQLWK

SEQ ID NO: 34105 - protein, 69 aa, Artificial Sequence
  Synthetic polypeptide
HQFIFSFFAARKLRARKKRKKKRKRKREKRSQKSRQNHLQLKSCRRKISNWSLKKVPALKKLRSPLWIF

SEQ ID NO: 34106 - protein, 27 aa, Artificial Sequence
  Synthetic polypeptide
GPERKGKKKGREKERKGARKAGKTTYS

SEQ ID NO: 34107 - protein, 314 aa, Artificial Sequence
  Synthetic polypeptide
SSVYLFFFCCQETKGQKEKEKKKEEKKREKEPEKPAKPLTAEKLQKKDQQLEPKKSTSPKKAAEPTVDLLGLDGPAVAPVTNGNTTVPPLNDDLDIFGPMISNPLPATVMPPAQGTPSAPAAATLSTVTSGDLDLFTEQTTKSEEVAKKQLSKDSILSLYGTGTIQQQSTPGVFMGPTNIPFTSQAPAAFQGFPSMGVPVPAAPGLIGNVMGQSPSMMVGMPMPNGFMGNAQTGVMPLPQNVVGPQGGMVGQMGAPQSKFGLPQAQQPQWSLSQIMQKGDAVLQHSISAIYWPMTRWLKCPLVDESADGWHEYQ

SEQ ID NO: 34108 - protein, 101 aa, Artificial Sequence
  Synthetic polypeptide
SSVYLFFFCCQETKGQKEKEKKKEEKKREKEPEKPAKPLTAEKLQKKDQQLEPKKSTSPKKAAEPTVDLLGLVWRKIEKEKSERQLVEVEELTFMYCFPKN

SEQ ID NO: 34109 - protein, 334 aa, Artificial Sequence
  Synthetic polypeptide
RLSWKMCALCNMGTACSVYIEEVLSKWKGDYEKLEHNHTYIQWLFPLREQGLNFYAKELTTYEIEEFKKTKEAIRRFLLAYKMMLEFFGIKLTDKTGNVARAVNWQERFQHLNESQHNYLRITRILKSLGELGYESFKSPLVKFILHEALVENTIPNIKQSALEYFVYTIRDRRERRKLLRFAQKHYTPSENFIWGPPRKEQSEGSKAQKMSSPLASSHNSQTSMHKKAKDSKNSSSAVHLNSKTAEDKKVAPKEPVEETDRPSPEPSNEAAKPRNTEKDSNAENMNSQPEKTVTTPTEKKESVSPENNEEGGNDNQDNENPGNTNCHDVVLVQ

SEQ ID NO: 34110 - protein, 21 aa, Artificial Sequence
  Synthetic polypeptide
AGKCALCVIWAQHVVFTLKKF

SEQ ID NO: 34111 - protein, 38 aa, Artificial Sequence
  Synthetic polypeptide
LLSLGQIQDIKVWRVGKIGEGFLRICRVMSSCLPDQKA

SEQ ID NO: 34112 - protein, 23 aa, Artificial Sequence
  Synthetic polypeptide
VPVSQIKKLRKSSEVHDHDASSF

SEQ ID NO: 34113 - protein, 68 aa, Artificial Sequence
  Synthetic polypeptide
FQRTPSMTPISWPDPRYKSMESREDWRRISSNLSCHEFLSPRSKSLENHPKSMTMMPALFKENRNDLD

SEQ ID NO: 34114 - protein, 21 aa, Artificial Sequence
  Synthetic polypeptide
VPVSQIKKLRKSSEVHDHVGI

SEQ ID NO: 34115 - protein, 88 aa, Artificial Sequence
  Synthetic polypeptide
FQRTPSMTPISWPDPRYKSMESREDWRRISSNLSCHEFLSPRSKSLENHPKSMTMLAYNLYIFIGYRLGAVADACNPSTLGGRGGWIT

SEQ ID NO: 34116 - protein, 632 aa, Artificial Sequence
  Synthetic polypeptide
SFFFNRMEEELLSPEKFCADQCNNGILGSGFALKVQEQHRQKHFEKRRNPAANLIQCVWRSYAADEKSVSIATWKPHLKALHTCSPTKKEQGEASSSKFCSNKQKLFRMYTSRKQSQKLSFKERVRMASPRGQSIKSRQASVGDRRSPSTDITAEGSPTKVQKSWSFNDRTRFRPSLRLKSSQPKPVIDADTALGTDDVYDEKGCQCDVSVEDLTPPLKTVIRAIRIMKFHVAKRKFKETLRPYDVKDVIEQYSAGHLDMLCRIKSLQTRVDQILGKGQITSDKKSREKITAEHETTDDLSMLGRVVKVEKQVQSIESKLDCLLDIYQQVLRKGSASALALASFQIPPFECEQTSDYQSPVDSKDLSGSAQNSGCLSRSTSANISRGLQFILTPNEFSAQTFYALSPTMHSQATQVPISQSDGSAVAATNTIANQINTAPKPAAPTTLQIPPPLPAIKHLPRPETLHPNPAGLQESISDVTTCLVASKENVQVAQSNLTKDRSMRKSFDMGGETLLSVCPMVPKDLGKSLSVQNLIRSTEELNIQLSGSESSGSRGSQDFYPKWRESKLFITDEEVGPEETETDTFDAAPQPAREAAFASDSLRTGRSRSSQSICKAGESTDALSLPHVKLK

SEQ ID NO: 34117 - protein, 20 aa, Artificial Sequence
  Synthetic polypeptide
AQRNFVRTNVIMAFLAQVLH

SEQ ID NO: 34118 - protein, 613 aa, Artificial Sequence
  Synthetic polypeptide
SFFFNRMEEELLSPEKFCADQCNNGILGSGFALKVQEQHRQKHFEKRRNPAANLIQCVWRSYAADEKSVSIATWKPHLKALHTCSPTKKEQGEASSSQKLSFKERVRMASPRGQSIKSRQASVGDRRSPSTDITAEGSPTKVQKSWSFNDRTRFRPSLRLKSSQPKPVIDADTALGTDDVYDEKGCQCDVSVEDLTPPLKTVIRAIRIMKFHVAKRKFKETLRPYDVKDVIEQYSAGHLDMLCRIKSLQTRVDQILGKGQITSDKKSREKITAEHETTDDLSMLGRVVKVEKQVQSIESKLDCLLDIYQQVLRKGSASALALASFQIPPFECEQTSDYQSPVDSKDLSGSAQNSGCLSRSTSANISRGLQFILTPNEFSAQTFYALSPTMHSQATQVPISQSDGSAVAATNTIANQINTAPKPAAPTTLQIPPPLPAIKHLPRPETLHPNPAGLQESISDVTTCLVASKENVQVAQSNLTKDRSMRKSFDMGGETLLSVCPMVPKDLGKSLSVQNLIRSTEELNIQLSGSESSGSRGSQDFYPKWRESKLFITDEEVGPEETETDTFDAAPQPAREAAFASDSLRTGRSRSSQSICKAGESTDALSLPHVKLK

SEQ ID NO: 34119 - protein, 108 aa, Artificial Sequence
  Synthetic polypeptide
SFFFNRMEEELLSPEKFCADQCNNGILGSGFALKVQEQHRQKHFEKRRNPAANLIQCVWRSYAADEKSVSIATWKPHLKALHTCSPTKKEQGEASSRFVISLLLHVCL

SEQ ID NO: 34120 - protein, 614 aa, Artificial Sequence
  Synthetic polypeptide
SFFFNRMEEELLSPEKFCADQCNNGILGSGFALKVQEQHRQKHFEKRRNPAANLIQCVWRSYAADEKSVSIATWKPHLKALHTCSPTKQNQQGESQSCQKLSFKERVRMASPRGQSIKSRQASVGDRRSPSTDITAEGSPTKVQKSWSFNDRTRFRPSLRLKSSQPKPVIDADTALGTDDVYDEKGCQCDVSVEDLTPPLKTVIRAIRIMKFHVAKRKFKETLRPYDVKDVIEQYSAGHLDMLCRIKSLQTRVDQILGKGQITSDKKSREKITAEHETTDDLSMLGRVVKVEKQVQSIESKLDCLLDIYQQVLRKGSASALALASFQIPPFECEQTSDYQSPVDSKDLSGSAQNSGCLSRSTSANISRGLQFILTPNEFSAQTFYALSPTMHSQATQVPISQSDGSAVAATNTIANQINTAPKPAAPTTLQIPPPLPAIKHLPRPETLHPNPAGLQESISDVTTCLVASKENVQVAQSNLTKDRSMRKSFDMGGETLLSVCPMVPKDLGKSLSVQNLIRSTEELNIQLSGSESSGSRGSQDFYPKWRESKLFITDEEVGPEETETDTFDAAPQPAREAAFASDSLRTGRSRSSQSICKAGESTDALSLPHVKLK

SEQ ID NO: 34121 - protein, 623 aa, Artificial Sequence
  Synthetic polypeptide
SFFFNRMEEELLSPEKFCADQCNNGILGSGFALKVQEQHRQKHFEKRRNPAANLIQCVWRSYAADEKSVSIATWKPHLKALHTCSPTNKFCSNKQKLFRMYTSRKQSQKLSFKERVRMASPRGQSIKSRQASVGDRRSPSTDITAEGSPTKVQKSWSFNDRTRFRPSLRLKSSQPKPVIDADTALGTDDVYDEKGCQCDVSVEDLTPPLKTVIRAIRIMKFHVAKRKFKETLRPYDVKDVIEQYSAGHLDMLCRIKSLQTRVDQILGKGQITSDKKSREKITAEHETTDDLSMLGRVVKVEKQVQSIESKLDCLLDIYQQVLRKGSASALALASFQIPPFECEQTSDYQSPVDSKDLSGSAQNSGCLSRSTSANISRGLQFILTPNEFSAQTFYALSPTMHSQATQVPISQSDGSAVAATNTIANQINTAPKPAAPTTLQIPPPLPAIKHLPRPETLHPNPAGLQESISDVTTCLVASKENVQVAQSNLTKDRSMRKSFDMGGETLLSVCPMVPKDLGKSLSVQNLIRSTEELNIQLSGSESSGSRGSQDFYPKWRESKLFITDEEVGPEETETDTFDAAPQPAREAAFASDSLRTGRSRSSQSICKAGESTDALSLPHVKLK

SEQ ID NO: 34122 - protein, 604 aa, Artificial Sequence
  Synthetic polypeptide
SFFFNRMEEELLSPEKFCADQCNNGILGSGFALKVQEQHRQKHFEKRRNPAANLIQCVWRSYAADEKSVSIATWKPHLKALHTCSPTNQKLSFKERVRMASPRGQSIKSRQASVGDRRSPSTDITAEGSPTKVQKSWSFNDRTRFRPSLRLKSSQPKPVIDADTALGTDDVYDEKGCQCDVSVEDLTPPLKTVIRAIRIMKFHVAKRKFKETLRPYDVKDVIEQYSAGHLDMLCRIKSLQTRVDQILGKGQITSDKKSREKITAEHETTDDLSMLGRVVKVEKQVQSIESKLDCLLDIYQQVLRKGSASALALASFQIPPFECEQTSDYQSPVDSKDLSGSAQNSGCLSRSTSANISRGLQFILTPNEFSAQTFYALSPTMHSQATQVPISQSDGSAVAATNTIANQINTAPKPAAPTTLQIPPPLPAIKHLPRPETLHPNPAGLQESISDVTTCLVASKENVQVAQSNLTKDRSMRKSFDMGGETLLSVCPMVPKDLGKSLSVQNLIRSTEELNIQLSGSESSGSRGSQDFYPKWRESKLFITDEEVGPEETETDTFDAAPQPAREAAFASDSLRTGRSRSSQSICKAGESTDALSLPHVKLK

SEQ ID NO: 34123 - protein, 503 aa, Artificial Sequence
  Synthetic polypeptide
SFFFNRMEEELLSPEKFCADQCNNGILGSGFALKVQEQHRQKHFEKRRNPAANLIQCVWRSYAADEKSVSIATWKPHLKALHTCSPTKKEQGEASSRIMKFHVAKRKFKETLRPYDVKDVIEQYSAGHLDMLCRIKSLQTRVDQILGKGQITSDKKSREKITAEHETTDDLSMLGRVVKVEKQVQSIESKLDCLLDIYQQVLRKGSASALALASFQIPPFECEQTSDYQSPVDSKDLSGSAQNSGCLSRSTSANISRGLQFILTPNEFSAQTFYALSPTMHSQATQVPISQSDGSAVAATNTIANQINTAPKPAAPTTLQIPPPLPAIKHLPRPETLHPNPAGLQESISDVTTCLVASKENVQVAQSNLTKDRSMRKSFDMGGETLLSVCPMVPKDLGKSLSVQNLIRSTEELNIQLSGSESSGSRGSQDFYPKWRESKLFITDEEVGPEETETDTFDAAPQPAREAAFASDSLRTGRSRSSQSICKAGESTDALSLPHVKLK

SEQ ID NO: 34124 - protein, 108 aa, Artificial Sequence
  Synthetic polypeptide
PGVVAHACNPSTLEGQGEWITRSRDRDHPGQHEETWRLSFSHIEKEILNNHGKSKTCCENKEEKCCRKDCLKLMKYLLEQLKERFKDKKHLDKFSSYHVKTAFFHRLY

SEQ ID NO: 34125 - protein, 47 aa, Artificial Sequence
  Synthetic polypeptide
QAWWLTPVIPALWKAKVSGLRGQEIETILANMKKHGGYPSLTSKRKF

SEQ ID NO: 34126 - protein, 183 aa, Artificial Sequence
  Synthetic polypeptide
PGVVAHACNPSTLEGQGEWITRSRDRDHPGQHEETWRLSFSHIEKEILNNHGKSKTCCENKEEKCCRKDCLKLMKYLLEQLKERFKDKKHLDKFSSYHVKTAFFHVCTQNPQDSQWDRKDLGLCFDNCVTYFLQCLRTEKLENYFIPEFNLFSSNLIDKRSKEFLTKQIEYERNNEFPVFDEF

SEQ ID NO: 34127 - protein, 77 aa, Artificial Sequence
  Synthetic polypeptide
SQHFRRPSGWKHSICRECDSDYWDISERHDCNWIGDASSRTFRGSAFYRIGSDTGEVRVCGGKVEDWDSTPNCQRVH

SEQ ID NO: 34128 - protein, 570 aa, Artificial Sequence
  Synthetic polypeptide
MDTVAHACNPSTLGGRVDGSTVYAESVILTTGTFLRGMIVIGLETHPAGRLGDQPSIGLAQTLEKLGFVVGRLKTGTPPRIAKESINFSILNKHIPDNPSIPFSFTNETVWIKPEDQLPCYLTHTNPRVDEIVLKNLHLNSHVKETTRGPRYCPSIESKVLRFPNRLHQVWLEPEGMDSDLIYPQGLSMTLPAELQEKMITCIRGLEKAKVIQPGYGVQYDYLDPRQITPSLETHLVQRLFFAGQINGTTGYEEAAAQTECCSVARLECSDMISQLQAILLPQPSLVAGTAGMHHNTQGVIAGINASLRVSRKPPFVVSRTEGYIGVLIDDLTTLGTSEPYRMFTSRVEFRLSLRPDNADSRLTLRGYKDAGCVSQQRYERACWMKSSLEEGISVLKSIEFLSSKWKKLIPEASISTSRSLPVRALDVLKYEEVDMDSLAKAVPEPLKKYTKCRELAERLKIEATYESVLFHQLQEIKGVQQDEALQLPKDLDYLTIRDVSLSHEVREKLHFSRPQTIGAASRIPGVTPAAIINLLRFVKTTQRRQSAMNESSKTDQYLCDADRLQEREL

SEQ ID NO: 34129 - protein, 13 aa, Artificial Sequence
  Synthetic polypeptide
EAEWMEAQYMQRV

SEQ ID NO: 34130 - protein, 530 aa, Artificial Sequence
  Synthetic polypeptide
MDTVAHACNPSTLGGRVDGSTVYAESVILTTGTFLRGMIVIGLETHPAGRLGDQPSIGLAQTLEKLGFVVGRLKTGTPPRIAKESINFSILNKHIPDNPSIPFSFTNETVWIKPEDQLPCYLTHTNPRVDEIVLKNLHLNSHVKETTRGPRYCPSIESKVLRFPNRLHQVWLEPEGMDSDLIYPQGLSMTLPAELQEKMITCIRGLEKAKVIQPGYGVQYDYLDPRQITPSLETHLVQRLFFAGQINGTTGYEEAAAQGVIAGINASLRVSRKPPFVVSRTEGYIGVLIDDLTTLGTSEPYRMFTSRVEFRLSLRPDNADSRLTLRGYKDAGCVSQQRYERACWMKSSLEEGISVLKSIEFLSSKWKKLIPEASISTSRSLPVRALDVLKYEEVDMDSLAKAVPEPLKKYTKCRELAERLKIEATYESVLFHQLQEIKGVQQDEALQLPKDLDYLTIRDVSLSHEVREKLHFSRPQTIGAASRIPGVTPAAIINLLRFVKTTQRRQSAMNESSKTDQYLCDADRLQEREL

SEQ ID NO: 34131 - protein, 555 aa, Artificial Sequence
  Synthetic polypeptide
MDTVAHACNPSTLGGRVDGSTVYAESVILTTGTFLRGMIVIGLETHPAGRLGDQPSIGLAQTLEKLGFVVGRLKTGTPPRIAKESINFSILNKHIPDNPSIPFSFTNETVWIKPEDQLPCYLTHTNPRVDEIVLKNLHLNSHVKETTRGPRYCPSIESKVLRFPNRLHQVWLEPEGMDSDLIYPQGLSMTLPAELQEKMITCIRGLEKAKVIQPDGVLLLLPRMECNGAISAHHNLPLPGYGVQYDYLDPRQITPSLETHLVQRLFFAGQINGTTGYEEAAAQGVIAGINASLRVSRKPPFVVSRTEGYIGVLIDDLTTLGTSEPYRMFTSRVEFRLSLRPDNADSRLTLRGYKDAGCVSQQRYERACWMKSSLEEGISVLKSIEFLSSKWKKLIPEASISTSRSLPVRALDVLKYEEVDMDSLAKAVPEPLKKYTKCRELAERLKIEATYESVLFHQLQEIKGVQQDEALQLPKDLDYLTIRDVSLSHEVREKLHFSRPQTIGAASRIPGVTPAAIINLLRFVKTTQRRQSAMNESSKTDQYLCDADRLQEREL

SEQ ID NO: 34132 - protein, 14 aa, Artificial Sequence
  Synthetic polypeptide
SCIFTISKIDDRGC

SEQ ID NO: 34133 - protein, 63 aa, Artificial Sequence
  Synthetic polypeptide
VASLLSQKLMIGAASRIPGVTPAAIINLLRFVKTTQRRQSAMNESSKTDQYLCDADRLQEREL

SEQ ID NO: 34134 - protein, 14 aa, Artificial Sequence
  Synthetic polypeptide
VASLLSQKLMIGAA

SEQ ID NO: 34135 - protein, 422 aa, Artificial Sequence
  Synthetic polypeptide
AYLKEAAEMGKGSFKYAWVLDKLKAERERGITIDISLWKFETSKYYVTIIDAPGHRDFIKNMITGTSQADCAVLIVAAGVGEFEAGISKNGQTREHALLAYTLGVKQLIVGVNKMDSTEPPYSQKRYEEIVKEVSTYIKKIGYNPDTVAFVPISGWNGDNMLEPSANMPWFKGWKVTRKDGNASGTTLLEALDCILPPTRPTDKPLRLPLQDVYKIGGIGTVPVGRVETGVLKPGMVVTFAPVNVTTEVKSVEMHHEALSEALPGDNVGFNVKNVSVKDVRRGNVAGDSKNDPPMEAAGFTAQVIILNHPGQISAGYAPVLDCHTAHIACKFAELKEKIDRRSGKKLEDGPKFLKSGDAAIVDMVPGKPMCVESFSDYPPLGRFAVRDMRQTVAVGVIKAVDKKAAGAGKVTKSAQKAQKAK

SEQ ID NO: 34136 - protein, 13 aa, Artificial Sequence
  Synthetic polypeptide
MLKSTLGILEGGC

SEQ ID NO: 34137 - protein, 105 aa, Artificial Sequence
  Synthetic polypeptide
AYLKEAAEMGKGSFKYAWVLDKLKAERERGITIDISLWKFETSKYYVTIIDAPGHRDFIKNMITGTSQADCAVLIVAAGVGEFEAGISKNGQTREHALLAYTLGV

SEQ ID NO: 34138 - protein, 66 aa, Artificial Sequence
  Synthetic polypeptide
AYLKEAAEMGKGSFKYAWVLDKLKAERERGITIDISLWKFETSKYYVTIIDAPGHRDFIKNMITGT

SEQ ID NO: 34139 - protein, 48 aa, Artificial Sequence
  Synthetic polypeptide
GLVWWLMPVIPALREAEAGGSRGQEIETILANMKKHGGYPSLTSKRKF

SEQ ID NO: 34140 - protein, 108 aa, Artificial Sequence
  Synthetic polypeptide
PGVVAYACNPSTSGGRGGWITRSRDRDHPGQHEETWRLSFSHIEKEILNNHGKSKTCCENKEEKCCRKDCLKLMKYLLEQLKERFKDKKHLDKFSSYHVKTAFFHRLY

SEQ ID NO: 34141 - protein, 183 aa, Artificial Sequence
  Synthetic polypeptide
PGVVAYACNPSTSGGRGGWITRSRDRDHPGQHEETWRLSFSHIEKEILNNHGKSKTCCENKEEKCCRKDCLKLMKYLLEQLKERFKDKKHLDKFSSYHVKTAFFHVCTQNPQDSQWDRKDLGLCFDNCVTYFLQCLRTEKLENYFIPEFNLFSSNLIDKRSKEFLTKQIEYERNNEFPVFDEF

SEQ ID NO: 34142 - protein, 87 aa, Artificial Sequence
  Synthetic polypeptide
NVVDVHHGILYSHKKELNYVFCSNMDAAEGRQAVRSYNSEVKLSSCDLCSDVQGCRPCEDGASGSHHHSSVIFIFCFKLLYFMELWL

SEQ ID NO: 34143 - protein, 16 aa, Artificial Sequence
  Synthetic polypeptide
IMSFAATWMQLKGDRL

SEQ ID NO: 34144 - protein, 243 aa, Artificial Sequence
  Synthetic polypeptide
FNSCFYHERCDFQRDKDSQFQIIKQARTAVGKDSDCYNQRIYSSLPVEVPLNHKRFVCDLTQADRLALYDFVVEETKKKRSDSQIIENDSDLFVDLAAKINQDNSRKSPKSYLEILAEVRDYKRRRQSYRAKNVHITKKSYTEVIRDVINVHMEELSNHWQEEQEKAEDDAEKNEERRSASVDSRQSGGSYLDAECSRHRRDRSRSPHKRKRNKDKDKNCESRRRKERDGERHHSHKRRKQKI

SEQ ID NO: 34145 - protein, 34 aa, Artificial Sequence
  Synthetic polypeptide
RLKSWALEKECPDSTPVFIMKDVTFSEIRTHNSR

SEQ ID NO: 34146 - protein, 4 aa, Artificial Sequence
  Synthetic polypeptide
LSAR

SEQ ID NO: 34147 - protein, 984 aa, Artificial Sequence
  Synthetic polypeptide
TWEAELAVSRGHATALQPGRQSETPSQKKKKKKEYPPHVQKVEINPVRLSRLQGVERIMKKTEESESQVEPEIKRKVQQKRHCSTYQPTPPLSPASKKCLTHLEDLQRNCRQAITLNESTGPLLRTSIHQNSGGQKSQNTGLTTKKFYGNNVEKVPIDIIVNCDDSKHTYLQTNGKVILPGAKIPKITNLKERKTSLSDLNDPIILSSDDDDDNDRTNRRESISPQPADSACSSPAPSTGKVEAALNENTCRAERELRSIPEDSELNTVTLPRKARMKDQFGNSIINTPLKRRKVFSQEPPDALALSCQSSFDSVILNCRSIRVGTLFRLLIEPVIFCLDFIKIQLDEPDHDPVEIILNTSDLTKCEWCNVRKLPVVFLQAIPAVYQKLSIQLQMNKEDKVWNDCKGVNKLTNLEEQYIILIFQNGLDPPANMVFESIINEIGIKNNISNFFAKIPFEEANGRLVACTRTYEESIKGSCGQKENKIKTVSFESKIQLRSKQEFQFFDEEEETGENHTIFIGPVEKLIVYPPPPAKGGISVTNEDLHCLNEGEFLNDVIIDFYLKYLVLEKLKKEDADRIHIFSSFFYKRLNQRERRNHETTNLSIQQKRHGRVKTWTRHVDIFEKDFIFVPLNEAAHWFLAVVCFPGLEKPKYEPNPHYHENAVIQKCSTVEDSCISSSASEMESCSQNSSAKPVIKKMLNKKHCIAVIDSNPGQEESDPRYKRNICSVKYSVKKINHTASENEEFNKGESTSQKVADRTKSENGLQNESLSSTHHTDGLSKIRLNYSDESPEAGKMLEDELVDFSEDQDNQDDSSDDGFLADDNCSSEIGQWHLKPTICKQPCILLMDSLRGPSRSNVVKILREYLEVEWEVKKGSKRSFSKDVMKGSNPKVPQQNNFSDCGVYVLQYVESFFENPILSFELPMNLANWFPPPRMRTKREEIRNIILKLQEDQSKEKRKHKDTYSTEAPLGEGTEQYVNSISD

SEQ ID NO: 34148 - protein, 38 aa, Artificial Sequence
  Synthetic polypeptide
AEVMPLHSSLGDRARLRLKKKKKRKNTHLMSKKLKLIL

SEQ ID NO: 34149 - protein, 53 aa, Artificial Sequence
  Synthetic polypeptide
LLGRLRQENGMNLGGGACSEPRSCHCTPAWATERDSVSKKKKKERIPTSCPKS

SEQ ID NO: 34150 - protein, 564 aa, Artificial Sequence
  Synthetic polypeptide
TWEAELAVSRGHATALQPGRQSETPSQKKKKKKEYPPHVQKVEINPVRLSRLQGVERIMKKTEESESQVEPEIKRKVQQKRHCSTYQPTPPLSPASKKCLTHLEDLQRNCRQAITLNESTGPLLRTSIHQNSGGQKSQNTGLTTKKFYGNNVEKVPIDIIVNCDDSKHTYLQTNGKVILPGAKIPKITNLKERKTSLSDLNDPIILSSDDDDDNDRTNRRESISPQPADSACSSPAPSTGKVEAALNENTCRAERELRSIPEDSELNTVTLPRKARMKDQFGNSIINTPLKRRKVFSQEPPDALALSCQSSFDSVILNCRSIRVGTLFRLLIEPVIFCLDFIKIQLDEPDHDPVEIILNTSDLTKCEWCNVRKLPVVFLQAIPAVYQKLSIQLQMNKEDKVWNDCKGVNKLTNLEEQYIILIFQNGLDPPANMVFESIINEIGIKNNISNFFAKIPFEEANGRLVACTRTYEESIKGSCGQKENKIKTVSFESKIQLRSKQEFQFFDEEEETGENHTIFIGPVEKLIVYPPPPAKGGISVTNEDLHCLNEGEFLNDVIIDFYLK

SEQ ID NO: 34151 - protein, 202 aa, Artificial Sequence
  Synthetic polypeptide
TWEAELAVSRGHATALQPGRQSETPSQKKKKKKEYPPHVQKVEINPVRLSRLQGVERIMKKTEESESQVEPEIKRKVQQKRHCSTYQPTPPLSPASKKCLTHLEDLQRNCRQAITLNESTGPLLRTSIHQNSGGQKSQNTGLTTKKFYGNNVEKVPIDIIVNCDDSKHTYLQTNGKVILPGAKIPKITNLKERKTSLSDLND

SEQ ID NO: 34152 - protein, 20 aa, Artificial Sequence
  Synthetic polypeptide
PGRHNIFGSHKPSVSCRRGQ

SEQ ID NO: 34153 - protein, 1258 aa, Artificial Sequence
  Synthetic polypeptide
AQEFETSLGDITFLALINQVFPAEEDSKKDVEDNCSLMYLNEATLLHNIKVRYSKDRIYTYVANILIAVNPYFDIPKIYSSEAIKSYQGKSLGTRPPHVFAIADKAFRDMKVLKMSQSIIVSGESGAGKTENTKFVLRYLTESYGTGQDIDDRIVEANPLLEAFGNAKTVRNNNSSRFGKFVEIHFNEKSSVVGGFVSHYLLEKSRICVQGKEERNYHIFYRLCAGASEDIREKLHLSSPDNFRYLNRGCTRYFANKETDKQILQNRKSPEYLKAGSMKDPLLDDHGDFIRMCTAMKKIGLDDEEKLDLFRVVAGVLHLGNIDFEEAGSTSGGCNLKNKSAQSLEYCAELLGLDQDDLRVSLTTRVMLTTAGGTKGTVIKVPLKVEQANNARDALAKTVYSHLFDHVVNRVNQCFPFETSSYFIGVLDIAGFEYFEHNSFEQFCINYCNEKLQQFFNERILKEEQELYQKEGLGVNEVHYVDNQDCIDLIEAKLVGILDILDEENRLPQPSDQHFTSAVHQKHKDHFRLTIPRKSKLAVHRNIRDDEGFIIRHFAGAVCYETTQFVEKNNDALHMSLESLICESRDKFIRELFESSTNNNKDTKQKAGKLSFISVGNKFKTQLNLLLDKLRSTGASFIRCIKPNLKMTSHHFEGAQILSQLQCSGMVSVLDLMQGGYPSRASFHELYNMYKKYMPDKLARLDPRLFCKALFKALGLNENDYKFGLTKVFFRPGKFAEFDQIMKSDPDHLAELVKRVNHWLTCSRWKKVQWCSLSVIKLKNKIKYRAEACIKMQKTIRMWLCKRRHKPRIDGLVKVGTLKKRLDKFNEVVSVLKDGKPEMNKQIKNLEISIDTLMAKIKSTMMTQEQIQKEYDALVKSSEELLSALQKKKQQEEEAERLRRIQEEMEKERKRREEDEKRRRKEEEERRMKLEMEAKRKQEEEERKKREDDEKRIQAEVEAQLARQKEEESQQQAVLEQERRDRELALRIAQSEAELISDEAQADLALRRYLDSYPVTSKNDGTRPKMTPEQMAKEMSEFLSRGPAVLATKAAAGTKKYDLSKWKYAELRDTINTSCDIELLAACREEFHRRLKVYHAWKSKNKKRNTETEQRAPKSVTDYAQQNPAAQIPARQREIEMNRQQRFFRIPFIRPADQYKDPQSKKKGWWYAHFDGPWIARQMELHPDKPPILLVAGKDDMEMCELNLEETGLTRKRGAEILPRQFEEIWERCGGIQYLQNAIESRQARPTYATAMLQSLLK

SEQ ID NO: 34154 - protein, 1234 aa, Artificial Sequence
  Synthetic polypeptide
AQEFETSLGDITFLALINQVFPAEEDSKKDVEDNCSLMYLNEATLLHNIKVRYSKDRIYTYVANILIAVNPYFDIPKIYSSEAIKSYQGKSLGTRPPHVFAIADKAFRDMKVLKMSQSIIVSGESGAGKTENTKFVLRYLTESYGTGQDIDDRIVEANPLLEAFGNAKTVRNNNSSRFGKFVEIHFNEKSSVVGGFVSHYLLEKSRICVQGKEERNYHIFYRLCAGASEDIREKLHLSSPDNFRYLNRGCTRYFANKETDKQILQNRKSPEYLKAGSMKDPLLDDHGDFIRMCTAMKKIGLDDEEKLDLFRVVAGVLHLGNIDFEEAGSTSGGCNLKNKSAQSLEYCAELLGLDQDDLRVSLTTRVMLTTAGGTKGTVIKVPLKVEQANNARDALAKTVYSHLFDHVVNRVNQCFPFETSSYFIGVLDIAGFEYFEHNSFEQFCINYCNEKLQQFFNERILKEEQELYQKEGLGVNEVHYVDNQDCIDLIEAKLVGILDILDEENRLPQPSDQHFTSAVHQKHKDHFRLTIPRKSKLAVHRNIRDDEGFIIRHFAGAVCYETTQFVEKNNDALHMSLESLICESRDKFIRELFESSTNNNKDTKQKAGKLSFISVGNKFKTQLNLLLDKLRSTGASFIRCIKPNLKMTSHHFEGAQILSQLQCSGMVSVLDLMQGGYPSRASFHELYNMYKKYMPDKLARLDPRLFCKALFKALGLNENDYKFGLTKVFFRPGKFAEFDQIMKSDPDHLAELVKRVNHWLTCSRWKKVQWCSLSVIKLKNKIKYRAEACIKMQKTIRMWLCKRRHKPRIDGLVKVGTLKKRLDKFNEVVSVLKDGKPEMNKQIKNLEISIDTLMAKIKSTMMTQEQIQKEYDALVKSSEELLSALQKKKQQEEEAERLRRIQEEMEKERKRREEDEKRRRKEEEERRMKLEMEAKRKQEEEERKKREDDEKRIQAEVEAQLARQKEEESQQQAVLEQERRDRELALRIAQSEAELISDEAQADLALRRGPAVLATKAAAGTKKYDLSKWKYAELRDTINTSCDIELLAACREEFHRRLKVYHAWKSKNKKRNTETEQRAPKSVTDYDFAPFLNNSPQQNPAAQIPARQREIEMNRQQRFFRIPFIRPADQYKDPQSKKKGWWYAHFDGPWIARQMELHPDKPPILLVAGKDDMEMCELNLEETGLTRKRGAEILPRQFEEIWERCGGIQYLQNAIESRQARPTYATAMLQSLLK

SEQ ID NO: 34155 - protein, 1257 aa, Artificial Sequence
  Synthetic polypeptide
AQEFETSLGDITFLALINQVFPAEEDSKKDVEDNCSLMYLNEATLLHNIKVRYSKDRIYTYVANILIAVNPYFDIPKIYSSEAIKSYQGKSLGTRPPHVFAIADKAFRDMKVLKMSQSIIVSGESGAGKTENTKFVLRYLTESYGTGQDIDDRIVEANPLLEAFGNAKTVRNNNSSRFGKFVEIHFNEKSSVVGGFVSHYLLEKSRICVQGKEERNYHIFYRLCAGASEDIREKLHLSSPDNFRYLNRGCTRYFANKETDKQILQNRKSPEYLKAGSMKDPLLDDHGDFIRMCTAMKKIGLDDEEKLDLFRVVAGVLHLGNIDFEEAGSTSGGCNLKNKSAQSLEYCAELLGLDQDDLRVSLTTRVMLTTAGGTKGTVIKVPLKVEQANNARDALAKTVYSHLFDHVVNRVNQCFPFETSSYFIGVLDIAGFEYFEHNSFEQFCINYCNEKLQQFFNERILKEEQELYQKEGLGVNEVHYVDNQDCIDLIEAKLVGILDILDEENRLPQPSDQHFTSAVHQKHKDHFRLTIPRKSKLAVHRNIRDDEGFIIRHFAGAVCYETTQFVEKNNDALHMSLESLICESRDKFIRELFESSTNNNKDTKQKAGKLSFISVGNKFKTQLNLLLDKLRSTGASFIRCIKPNLKMTSHHFEGAQILSQLQCSGMVSVLDLMQGGYPSRASFHELYNMYKKYMPDKLARLDPRLFCKALFKALGLNENDYKFGLTKVFFRPGKFAEFDQIMKSDPDHLAELVKRVNHWLTCSRWKKVQWCSLSVIKLKNKIKYRAEACIKMQKTIRMWLCKRRHKPRIDGLVKVGTLKKRLDKFNEVVSVLKDGKPEMNKQIKNLEISIDTLMAKIKSTMMTQEQIQKEYDALVKSSEELLSALQKKKQQEEEAERLRRIQEEMEKERKRREEDEKRRRKEEEERRMKLEMEAKRKQEEEERKKREDDEKRIQAEVEAQLARQKEEESQQQAVLEQERRDRELALRIAQSEAELISDEAQADLALRRNDGTRPKMTPEQMAKEMSEFLSRGPAVLATKAAAGTKKYDLSKWKYAELRDTINTSCDIELLAACREEFHRRLKVYHAWKSKNKKRNTETEQRAPKSVTDYDFAPFLNNSPQQNPAAQIPARQREIEMNRQQRFFRIPFIRPADQYKDPQSKKKGWWYAHFDGPWIARQMELHPDKPPILLVAGKDDMEMCELNLEETGLTRKRGAEILPRQFEEIWERCGGIQYLQNAIESRQARPTYATAMLQSLLK

SEQ ID NO: 34156 - protein, 1225 aa, Artificial Sequence
  Synthetic polypeptide
AQEFETSLGDITFLALINQVFPAEEDSKKDVEDNCSLMYLNEATLLHNIKVRYSKDRIYTYVANILIAVNPYFDIPKIYSSEAIKSYQGKSLGTRPPHVFAIADKAFRDMKVLKMSQSIIVSGESGAGKTENTKFVLRYLTESYGTGQDIDDRIVEANPLLEAFGNAKTVRNNNSSRFGKFVEIHFNEKSSVVGGFVSHYLLEKSRICVQGKEERNYHIFYRLCAGASEDIREKLHLSSPDNFRYLNRGCTRYFANKETDKQILQNRKSPEYLKAGSMKDPLLDDHGDFIRMCTAMKKIGLDDEEKLDLFRVVAGVLHLGNIDFEEAGSTSGGCNLKNKSAQSLEYCAELLGLDQDDLRVSLTTRVMLTTAGGTKGTVIKVPLKVEQANNARDALAKTVYSHLFDHVVNRVNQCFPFETSSYFIGVLDIAGFEYFEHNSFEQFCINYCNEKLQQFFNERILKEEQELYQKEGLGVNEVHYVDNQDCIDLIEAKLVGILDILDEENRLPQPSDQHFTSAVHQKHKDHFRLTIPRKSKLAVHRNIRDDEGFIIRHFAGAVCYETTQFVEKNNDALHMSLESLICESRDKFIRELFESSTNNNKDTKQKAGKLSFISVGNKFKTQLNLLLDKLRSTGASFIRCIKPNLKMTSHHFEGAQILSQLQCSGMVSVLDLMQGGYPSRASFHELYNMYKKYMPDKLARLDPRLFCKALFKALGLNENDYKFGLTKVFFRPGKFAEFDQIMKSDPDHLAELVKRVNHWLTCSRWKKVQWCSLSVIKLKNKIKYRAEACIKMQKTIRMWLCKRRHKPRIDGLVKVGTLKKRLDKFNEVVSVLKDGKPEMNKQIKNLEISIDTLMAKIKSTMMTQEQIQKEYDALVKSSEELLSALQKKKQQEEEAERLRRIQEEMEKERKRREEDEKRRRKEEEERRMKLEMEAKRKQEEEERKKREDDEKRIQAEVEAQLARQKEEESQQQAVLEQERRDRELALRIAQSEAELISDEAQADLALRRGPAVLATKAAAGTKKYDLSKWKYAELRDTINTSCDIELLAACREEFHRRLKVYHAWKSKNKKRNTETEQRAPKSVTDYAQQNPAAQIPARQREIEMNRQQRFFRIPFIRPADQYKDPQSKKKGWWYAHFDGPWIARQMELHPDKPPILLVAGKDDMEMCELNLEETGLTRKRGAEILPRQFEEIWERCGGIQYLQNAIESRQARPTYATAMLQSLLK

SEQ ID NO: 34157 - protein, 29 aa, Artificial Sequence
  Synthetic polypeptide
DRAWWLTPVIPALWEAEVWTLPAAAADLE

SEQ ID NO: 34158 - protein, 352 aa, Artificial Sequence
  Synthetic polypeptide
SQHFGRPRCGHCQRLQPTWNDLGDKYNSMEDAKVYVAKVDCTAHSDVCSAQGVRGYPTLKLFKPGQEAVKYQGPRDFQTLENWMLQTLNEEPVTPEPEVEPPSAPELKQGLYELSASNFELHVAQGDHFIKFFAPWCGHCKALAPTWEQLALGLEHSETVKIGKVDCTQHYELCSGNQVRGYPTLLWFRDGKKVDQYKGKRDLESLREYVESQLQRTETGATETVTPSEAPVLAAEPEADKGTVLALTENNFDDTIAEGITFIKFYAPWCGHCKTLAPTWEELSKKEFPGLAGVKIAEVDCTAERNICSKYSVRGYPTLLLFRGGKKVSEHSGGRDLDSLHRFVLSQAKDEL

SEQ ID NO: 34159 - protein, 67 aa, Artificial Sequence
  Synthetic polypeptide
PGVVAHACNPSTLGGRGVDTASGCSRLGMTWETNTTAWKMPKSMWLKWTARPTPTCAPPRGCEDTPP

SEQ ID NO: 34160 - protein, 20 aa, Artificial Sequence
  Synthetic polypeptide
SQHFGRPRCGHCQRLQPTWN

SEQ ID NO: 34161 - protein, 29 aa, Artificial Sequence
  Synthetic polypeptide
PGVVAHACNPSTLGGRGVDTASGCSRLGM

SEQ ID NO: 34162 - protein, 36 aa, Artificial Sequence
  Synthetic polypeptide
NSKKTSLETESTSTLTLDFPASKTVWTLPAAAADLE

SEQ ID NO: 34163 - protein, 353 aa, Artificial Sequence
  Synthetic polypeptide
PWTSQPPKLCGHCQRLQPTWNDLGDKYNSMEDAKVYVAKVDCTAHSDVCSAQGVRGYPTLKLFKPGQEAVKYQGPRDFQTLENWMLQTLNEEPVTPEPEVEPPSAPELKQGLYELSASNFELHVAQGDHFIKFFAPWCGHCKALAPTWEQLALGLEHSETVKIGKVDCTQHYELCSGNQVRGYPTLLWFRDGKKVDQYKGKRDLESLREYVESQLQRTETGATETVTPSEAPVLAAEPEADKGTVLALTENNFDDTIAEGITFIKFYAPWCGHCKTLAPTWEELSKKEFPGLAGVKIAEVDCTAERNICSKYSVRGYPTLLLFRGGKKVSEHSGGRDLDSLHRFVLSQAKDEL

SEQ ID NO: 34164 - protein, 65 aa, Artificial Sequence
  Synthetic polypeptide
IYQHLDLGLPSLQNCVDTASGCSRLGMTWETNTTAWKMPKSMWLKWTARPTPTCAPPRGCEDTPP

SEQ ID NO: 34165 - protein, 21 aa, Artificial Sequence
  Synthetic polypeptide
PWTSQPPKLCGHCQRLQPTWN

SEQ ID NO: 34166 - protein, 27 aa, Artificial Sequence
  Synthetic polypeptide
IYQHLDLGLPSLQNCVDTASGCSRLGM

SEQ ID NO: 34167 - protein, 185 aa, Artificial Sequence
  Synthetic polypeptide
FQDGQIGTAPVYSSQRERCRRRVISAFPTEAENITVTKDFRRVENAYHMEAEVCITFTEFGKMQNICNFLVEKLDSSVVISPPQFYHTPGSVENLRRQACLVAVENAWRKAQEVCNLVGQTLGKPLLIKEEETKEWEGQIDDHQSSRLSSSLTVQQKIKSATIHAASKVFITFEVKGKEKRKKHL

SEQ ID NO: 34168 - protein, 10 aa, Artificial Sequence
  Synthetic polypeptide
FLHFQLRQKI

SEQ ID NO: 34169 - protein, 112 aa, Artificial Sequence
  Synthetic polypeptide
FQDGQIGTAPVYSSQRERCRRRVISAFPTEAENITVTKDFRRVENAYHMEAEVCITFTEFGKMQNICNFLVEKLDSSVVISPPQFYHTPGSVENLRNSWNPSSTSQPTITPR

SEQ ID NO: 34170 - protein, 204 aa, Artificial Sequence
  Synthetic polypeptide
FQDGQIGTAPVYSSQRERCRRRVISAFPTEAENITVTKDFRRVENAYHMEAEVCITFTEFGKMQNICNFLVEKLDSSVVISPPQFYHTPGSVENLRRQACLVAVENAWRKAQEVCNLVGQTLGKPLLIKEEETKEWEGQIDDHQSSRLSSSLTVQQKIKSATIHAASKVFITFEQLLESFFNIPTNNYSQIAMSPVNYHESHIK

SEQ ID NO: 34171 - protein, 1691 aa, Artificial Sequence
  Synthetic polypeptide
VLVSCLSSLLDCNLHEADTLFSRKLNGKYRLERLVPTAVYQHMKMHKRILGHLSSVYCVTFDRTGRRIFTGSDDCLVKIWATDDGRLLATLRGHAAEISDMAVNYENTMIAAGSCDKMIRVWCLRTCAPLAVLQGHSASITSLQFSPLCSGSKRYLSSTGADGTICFWLWDAGTLKINPRPAKFTERPRPGVQMICSSFSAGGMFLATGSTDHIIRVYFFGSGQPEKISELEFHTDKVDSIQFSNTSNRFVSGSRDGTARIWQFKRREWKSILLDMATRPAGQNLQGIEDKITKMKVTMVAWDRHDNTVITAVNNMTLKVWNSYTGQLIHVLMGHEDEVFVLEPHPFDPRVLFSAGHDGNVIVWDLARGVKIRSYFNMIEGQGHGAVFDCKCSPDGQHFACTDSHGHLLIFGFGSSSKYDKIADQMFFHSDYRPLIRDANNFVLDEQTQQAPHLMPPPFLVDVDGNPHPSRYQRLVPGRENCREEQLIPQMGVTSSGLNQVLSQQANQEISPLDSMIQRLQQEQDLRRSGEAVISNTSRLSRGSISSTSEVHSPPNVGLRRSGQIEGVRQMHSNAPRSEIATERDLVAWSRRVVVPELSAGVASRQEEWRTAKGEEEIKTYRSEEKRKHLTVPKENKIPTVSKNHAHEHFLDLGESKKQQTNQHNYRTRSALEETPRPSEEIENGSSSSDEGEVVAVSGGTSEEEERAWHSDGSSSDYSSDYSDWTADAGINLQPPKKVPKNKTKKAESSSDEEEESEKQKQKQIKKEKKKVNEEKDGPISPKKKKPKERKQKRLAVGELTENGLTLEEWLPSTWITDTIPRRCPFVPQMGDEVYYFRQGHEAYVEMARKNKIYSINPKKQPWHKMELREQELMKIVGIKYEVGLPTLCCLKLAFLDPDTGKLTGGSFTMKYHDMPDVIDFLVLRQQFDDAKYRRWNIGDRFRSVIDDAWWFGTIESQEPLQLEYPDSLFQCYNVCWDNGDTEKMSPWDMELIPNNAVFPEELGTSVPLTDGECRSLIYKPLDGEWGTNPRDEECERIVAGINQLMTLDIASAFVAPVDLQAYPMYCTVVAYPTDLSTIKQRLENRFYRRVSSLMWEVRYIEHNTRTFNEPGSPIVKSAKFVTDLLLHFIKDQTCYNIIPLYNSMKKKVLSDSEDEEKDADVPGTSTRKRKDHQPRRRLRNRAQSYDIQAWKKQCEELLNLIFQCEDSEPFRQPVDLLEYPDYRDIIDTPMDFATVRETLEAGNYESPMELCKDVRLIFSNSKAYTPSKRSRIYSMSLRLSAFFEEHISSVLSDYKSALRFHKRNTITKRRKKRNRSSSVSSSAASSPERKKRILKPQLKSESSTSAFSTPTRSIPPRHNAAQINGKTESSSVVRTRSNRVVVDPVVTEQPSTSSAAKTFITKANASAIPGKTILENSVKHSKALNTLSSPGQSSFSHGTRNNSAKENMEKEKPVKRKMKSSVLPKASTLSKSSAVIEQGDCKNNALVPGTIQVNGHGGQPSKLVKRGPGRKPKVEVNTNSGEIIHKKRGRKPKKLQYAKPEDLEQNNVHPIRDEVLPSSTCNFLSETNNVKEDLLQKKNRGGRKPKRKMKTQKLDADLLVPASVKVLRRSNRKKIDDPIDEEEEFEELKGSEPHMRTRNQGRRTAFYNEDDSEEEQRQLLFEDTSLTFGTSSRGRVRKLTEKAKANLIGW

SEQ ID NO: 34172 - protein, 14 aa, Artificial Sequence
  Synthetic polypeptide
TAISMRRILCFQGS

SEQ ID NO: 34173 - protein, 20 aa, Artificial Sequence
  Synthetic polypeptide
WHILEAEAGESLEPGRRRLR

SEQ ID NO: 34174 - protein, 99 aa, Artificial Sequence
  Synthetic polypeptide
TREAEVEIKKKQQDVVRFLEANKIEFEEVDITMSEEQRQWMYKNVPPEKKPTQGNPLPPQIFNGDRYCGDYDSFFESKESNTVFSFLGLKPRLASKAEP

SEQ ID NO: 34175 - protein, 8 aa, Artificial Sequence
  Synthetic polypeptide
SQHFGRPR

SEQ ID NO: 34176 - protein, 109 aa, Artificial Sequence
  Synthetic polypeptide
GRVQWLIPVIPALWEAEIKKKQQDVVRFLEANKIEFEEVDITMSEEQRQWMYKNVPPEKKPTQGNPLPPQIFNGDRYCGDYDSFFESKESNTVFSFLGLKPRLASKAEP

SEQ ID NO: 34177 - protein, 25 aa, Artificial Sequence
  Synthetic polypeptide
PGAVAHTCNPSTLGGRDKEEAARCG

SEQ ID NO: 34178 - protein, 33 aa, Artificial Sequence
  Synthetic polypeptide
AQEDYDSFFESKESNTVFSFLGLKPRLASKAEP

SEQ ID NO: 34179 - protein, 45 aa, Artificial Sequence
  Synthetic polypeptide
NNSWVWWCAPVVPATREAEMGGSPEPRRIMTVFLNPRKATQSFHF

SEQ ID NO: 34180 - protein, 34 aa, Artificial Sequence
  Synthetic polypeptide
STENETIAGCGGVHLWSQLLGRLRWEDHLSPGGL

SEQ ID NO: 34181 - protein, 15 aa, Artificial Sequence
  Synthetic polypeptide
SPLPQLCLHLTINIW

SEQ ID NO: 34182 - protein, 128 aa, Artificial Sequence
  Synthetic polypeptide
QLIFGEDVAFGGVFRCTVGLRDKYGKDRVFNTPLCEQGIVGFGIGIAVTGATAIAEIQFADYIFPAFDQIVNEAAKYRYRSGDLFNCGSLTIRSPWGCVGHGALYHSQSPEAFFAHCPGIKIKVISLS

SEQ ID NO: 34183 - protein, 302 aa, Artificial Sequence
  Synthetic polypeptide
QLIFGEDVAFGGVFRCTVGLRDKYGKDRVFNTPLCEQGIVGFGIGIAVTGATAIAEIQFADYIFPAFDQIVNEAAKYRYRSGDLFNCGSLTIRSPWGCVGHGALYHSQSPEAFFAHCPGIKVVIPRSPFQAKGLLLSCIEDKNPCIFFEPKILYRAAAEEVPIEPYNIPLSQAEVIQEGSDVTLVAWGTQVHVIREVASMAKEKLGVSCEVIDLRTIIPWDVDTICKSVIKTGRLLISHEAPLTGGFASEISSTVQEECFLNLEAPISRVCGYDTPFPHIFEPFYIPDKWKCYDALRKMINY

SEQ ID NO: 34184 - protein, 53 aa, Artificial Sequence
  Synthetic polypeptide
TGLASQPTSFSRAGCFLPSNIRLPSSSVLELGLALLAPQPEDGLLWDLVIVLT

SEQ ID NO: 34185 - protein, 2 aa, Artificial Sequence
  Synthetic polypeptide
LC

SEQ ID NO: 34186 - protein, 56 aa, Artificial Sequence
  Synthetic polypeptide
RWPVVGPCDCVDLTVQEKEKYLNVSRWFCHIQHYPGIRQHLSSVVFIKNRLYTNSH

SEQ ID NO: 34187 - protein, 77 aa, Artificial Sequence
  Synthetic polypeptide
LGPGGRAFMNGIIALIKGLRETSPLPPSEKTAACEPGSKPLPDTASAITFILDFQPPELILIHILKIKSTLQGITLH

SEQ ID NO: 34188 - protein, 79 aa, Artificial Sequence
  Synthetic polypeptide
TRKQALTRHCICHHLHLRLPASRTDLNSYLEDKVYLTGYNFTLADILLYYGLHRFIILEKFIQGFWITDQLFKVKLVIL

SEQ ID NO: 34189 - protein, 67 aa, Artificial Sequence
  Synthetic polypeptide
TRKQALTRHCICHHLHLRLPASRTDLNSYLEDKVYLTGYNFTLADILLYYGLHRFIIRKLRHTEVGN

SEQ ID NO: 34190 - protein, 77 aa, Artificial Sequence
  Synthetic polypeptide
TRKQALTRHCICHHLHLRLPASRTDLNSYLEDKVYLTGYNFTLADILLYYGLHRFIANHDCFVYKKMRIVTGPHVCL

SEQ ID NO: 34191 - protein, 102 aa, Artificial Sequence
  Synthetic polypeptide
TRKQALTRHCICHHLHLRLPASRTDLNSYLEDKVYLTGYNFTLADILLYYGLHRFIVDLTVQEKEKYLNVSRWFCHIQHYPGIRQHLSSVVFIKNRLYTNSH

SEQ ID NO: 34192 - protein, 78 aa, Artificial Sequence
  Synthetic polypeptide
TRKQALTRHCICHHLHLRLPASRTDLNSYLEDKVYLTGYNFTLADILLYYGLHRFIVSICIVTGFFSVVLRMIFKTLS

SEQ ID NO: 34193 - protein, 61 aa, Artificial Sequence
  Synthetic polypeptide
LGPGGRAFMNGIIALIKGLRETSPLPPSEKTAACEPGSKPLPDTASAITFILDFQPPELIL

SEQ ID NO: 34194 - protein, 26 aa, Artificial Sequence
  Synthetic polypeptide
TRKQALTRHCICHHLHLRLPASRTDL

SEQ ID NO: 34195 - protein, 167 aa, Artificial Sequence
  Synthetic polypeptide
ISLMRCDGFKNGSFPAQVLFSCLPPHEMCLTPSTMIVKALQPRRIIPVLQTNNGPSLTGLTTIAAHLVKQANKEYLLGSTAEEKAIVQQWLEYRVTQVDGHSSKNDIHTLLKDLNSYLEDKVYLTGYNFTLADILLYYGLHRFIILEKFIQGFWITDQLFKVKLVIL

SEQ ID NO: 34196 - protein, 19 aa, Artificial Sequence
  Synthetic polypeptide
RLSSHAESFQFFRQTMVQV

SEQ ID NO: 34197 - protein, 76 aa, Artificial Sequence
  Synthetic polypeptide
DVPYTFHHDCEGSPATQNHSSSSDKQWSKSNRIDYYSSSSSQASQQRIFAGEYCRRKSNRSAVVRIQGHSSRWALQ

SEQ ID NO: 34198 - protein, 155 aa, Artificial Sequence
  Synthetic polypeptide
ISLMRCDGFKNGSFPAQVLFSCLPPHEMCLTPSTMIVKALQPRRIIPVLQTNNGPSLTGLTTIAAHLVKQANKEYLLGSTAEEKAIVQQWLEYRVTQVDGHSSKNDIHTLLKDLNSYLEDKVYLTGYNFTLADILLYYGLHRFIIRKLRHTEVGN

SEQ ID NO: 34199 - protein, 165 aa, Artificial Sequence
  Synthetic polypeptide
ISLMRCDGFKNGSFPAQVLFSCLPPHEMCLTPSTMIVKALQPRRIIPVLQTNNGPSLTGLTTIAAHLVKQANKEYLLGSTAEEKAIVQQWLEYRVTQVDGHSSKNDIHTLLKDLNSYLEDKVYLTGYNFTLADILLYYGLHRFIANHDCFVYKKMRIVTGPHVCL

SEQ ID NO: 34200 - protein, 190 aa, Artificial Sequence
  Synthetic polypeptide
ISLMRCDGFKNGSFPAQVLFSCLPPHEMCLTPSTMIVKALQPRRIIPVLQTNNGPSLTGLTTIAAHLVKQANKEYLLGSTAEEKAIVQQWLEYRVTQVDGHSSKNDIHTLLKDLNSYLEDKVYLTGYNFTLADILLYYGLHRFIVDLTVQEKEKYLNVSRWFCHIQHYPGIRQHLSSVVFIKNRLYTNSH

SEQ ID NO: 34201 - protein, 166 aa, Artificial Sequence
  Synthetic polypeptide
ISLMRCDGFKNGSFPAQVLFSCLPPHEMCLTPSTMIVKALQPRRIIPVLQTNNGPSLTGLTTIAAHLVKQANKEYLLGSTAEEKAIVQQWLEYRVTQVDGHSSKNDIHTLLKDLNSYLEDKVYLTGYNFTLADILLYYGLHRFIVSICIVTGFFSVVLRMIFKTLS

SEQ ID NO: 34202 - protein, 98 aa, Artificial Sequence
  Synthetic polypeptide
ISLMRCDGFKNGSFPAQVLFSCLPPHEMCLTPSTMIVKALQPRRIIPVLQTNNGPSLTGLTTIAAHLVKQANKEYLLGSTAEEKAIVQQWLEYRVTQV

SEQ ID NO: 34203 - protein, 72 aa, Artificial Sequence
  Synthetic polypeptide
DVPYTFHHDCEGSPATQNHSSSSDKQWSKSNRIDYYSSSSSQASQQRIFAGEYCRRKSNRSAVVRIQGHSSR

SEQ ID NO: 34204 - protein, 32 aa, Artificial Sequence
  Synthetic polypeptide
KTCRLPSSMILRPPQSHGTEESHTTTYFLNIS

SEQ ID NO: 34205 - protein, 17 aa, Artificial Sequence
  Synthetic polypeptide
GHPSHMALKKVTQPHIF

SEQ ID NO: 34206 - protein, 457 aa, Artificial Sequence
  Synthetic polypeptide
HRMTDQGQVALGGHYMAEGEGYFAMSEDELACSPYIPLGGDFGGGDFGGGDFGGGDFGGGGSFGGHCLDYCESPTAHCNVLNWEQVQRLDGILSETIPIHGRGNFPTLELQPSLIVKVVRRRLAEKRIGVRDVRLNGSAASHVLHQDSGLGYKDLDLIFCADLRGEGEFQTVKDVVLDCLLDFLPEGVNKEKITPLTLKEAYVQKMVKVCNDSDRWSLISLSNNSGKNVELKFVDSLRRQFEFSVDSFQIKLDSLLLFYECSENPMTETFHPTIIGESVYGDFQEAFDHLCNKIIATRNPEEIRGGGLLKYCNLLVRGFRPASDEIKTLQRYMCSRFFIDFSDIGEQQRKLESYLQNHFVGLEDRKYEYLMTLHGVVNESTVCLMGHERRQTLNLITMLAIRVLADQNVIPNVANVTCYYQPAPYVADANFSNYYIAQVQPVFTCQQQTYSTWLPCN

SEQ ID NO: 34207 - protein, 3 aa, Artificial Sequence
  Synthetic polypeptide
QND

SEQ ID NO: 34208 - protein, 15 aa, Artificial Sequence
  Synthetic polypeptide
LYLSACGKVTSASTR

SEQ ID NO: 34209 - protein, 57 aa, Artificial Sequence
  Synthetic polypeptide
IDLASQPTCFSHARCFLFSNIELQVLRLWDWGWFPCSSACKQPIVGPYDCTCQLVGK

SEQ ID NO: 34210 - protein, 99 aa, Artificial Sequence
  Synthetic polypeptide
PPSLPASPMLDASCSRTLNSKFFGFGTGAGFLAPQLANSLLWDLMIVLVSLWESDISVHPLTLPSATCLELLLILSKSNANLPSSLRRVNSFQVAFLKM

SEQ ID NO: 34211 - protein, 14 aa, Artificial Sequence
  Synthetic polypeptide
PVAETRNTCQLVGK

SEQ ID NO: 34212 - protein, 140 aa, Artificial Sequence
  Synthetic polypeptide
NTGDPLGHLLVLPCPVIKVNGKLQQLNSGRTRNDPDPSGMKVWFILPGKKPQPAEVLAEGKGNTGWVVEEGSHQYQLRPGDQLQKQGILVSLWESDISVHPLTLPSATCLELLLILSKSNANLPSSLRRVNSFQVAFLKM

SEQ ID NO: 34213 - protein, 33 aa, Artificial Sequence
  Synthetic polypeptide
KKVVINTSYDQVTSCRNKEYLSACGKVTSASTR

SEQ ID NO: 34214 - protein, 564 aa, Artificial Sequence
  Synthetic polypeptide
RRQGIQEMGCNTKEKARGISGIMVIPAASEEQLLLVELVRSISVMRAETVIQTVKEVLKQPPAIAKDKKHLSLEVCMLQFFYAYIQRVLNEFIMKNPSLENKKDQRDLQDVTHKIVDAIGAIAGSSLEQTTWLRRNLEVKPSPKIMVDGTNLESDVEGILVKHLGLLSVLAHLLDMVFYSDEKERVIPLLVNIMHYVVPYLRNHSAHNAPSYRACVQLLSSLSGYQYTRRAWKKEAFDLFMDPSFFQMDASCVNHWRAIMDNLMTHDKTTFRDLMTRVAVAQSSSLNLFANRDVELEQRAMLLKRLAFAIFSSEIDQYQKYLPDIQGIPVSKWVQLLTALSPAYRTSGPSVAGLETTYTGGNGFSTSYNSQRWLNLYLSACKFLDLALALPSENLPQFQMYRWAFIPEASDDSGLEVRRQGIHQREFKPYVVRLAKLLRKRAKDKEEDFKTVILEGLEMAKHQKNPEEDNSGRTLGWEPGHLLLTICTVRSMEQLLPFFNVLSQVFNSKVTSRCGGHSGSPILYSNAFPNKDMKLENHKPCSSKARQKIEEMVEKDFLEGMIKT

SEQ ID NO: 34215 - protein, 39 aa, Artificial Sequence
  Synthetic polypeptide
LHRRRNKPRMKKTGDPRNGLQHKRESKGNLWDNGHSCSQ

SEQ ID NO: 34216 - protein, 641 aa, Artificial Sequence
  Synthetic polypeptide
RRQGIQEMGCNTKEKARGISGIMVIPAASEEQLLLVELVRSISVMRAETVIQTVKEVLKQPPAIAKDKKHLSLEVCMLQFFYAYIQRIPVPNLVDSWASLLILLKDSIQLSLPAPGQFLILGVLNEFIMKNPSLENKKDQRDLQDVTHKIVDAIGAIAGSSLEQTTWLRRNLEVKPSPKIMVDGTNLESDVEDMLSPAMETANITPSVYSVHALTLLSEVLAHLLDMVFYSDEKERVIPLLVNIMHYVVPYLRNHSAHNAPSYRACVQLLSSLSGYQYTRRAWKKEAFDLFMDPSFFQMDASCVNHWRAIMDNLMTHDKTTFRDLMTRVAVAQSSSLNLFANRDVELEQRAMLLKRLAFAIFSSEIDQYQKYLPDIQERLVESLRLPQVPTLHSQVFLFFRVLLLRMSPQHLTSLWPTMITELVQVFLLMEQELTADEDISRTSGPSVAGLETTYTGGNGFSTSYNSQRWLNLYLSACKFLDLALALPSENLPQFQMYRWAFIPEASDDSGLEVRRQGIHQREFKPYVVRLAKLLRKRAKKNPEEDNSGRTLGWEPGHLLLTICTVRSMEQLLPFFNVLSQVFNSKVTSRCGGHSGSPILYSNAFPNKDMKLENHKPCSSKARQKIEEMVEKDFLEGMIKT

SEQ ID NO: 34217 - protein, 661 aa, Artificial Sequence
  Synthetic polypeptide
RRQGIQEMGCNTKEKARGISGIMVIPAASEEQLLLVELVRSISVMRAETVIQTVKEVLKQPPAIAKDKKHLSLEVCMLQFFYAYIQRIPVPNLVDSWASLLILLKDSIQLSLPAPGQFLILGVLNEFIMKNPSLENKKDQRDLQDVTHKIVDAIGAIAGSSLEQTTWLRRNLEVKPSPKIMVDGTNLESDVEDMLSPAMETANITPSVYSVHALTLLSEVLAHLLDMVFYSDEKERVIPLLVNIMHYVVPYLRNHSAHNAPSYRACVQLLSSLSGYQYTRRAWKKEAFDLFMDPSFFQMDASCVNHWRAIMDNLMTHDKTTFRDLMTRVAVAQSSSLNLFANRDVELEQRAMLLKRLAFAIFSSEIDQYQKYLPDIQERLVESLRLPQVPTLHSQVFLFFRVLLLRMSPQHLTSLWPTMITELVQVFLLMEQELTADEDISRTSGPSVAGLETTYTGGNGFSTSYNSQRWLNLYLSACKFLDLALALPSENLPQFQMYRWAFIPEASDDSGLEVRRQGIHQREFKPYVVRLAKLLRKRAKDKEEDFKTVILEGLEMAKHQKNPEEDNSGRTLGWEPGHLLLTICTVRSMEQLLPFFNVLSQVFNSKVTSRCGGHSGSPILYSNAFPNKDMKLENHKPCSSKARQKIEEMVEKDFLEGMIKT

SEQ ID NO: 34218 - protein, 443 aa, Artificial Sequence
  Synthetic polypeptide
GQKWWLRPVIPTLWEAEAIVVTDGERILGLGDLGCNGMGIPVGKLALYTACGGMNPQECLPVILDVGTENEELLKDPLYIGLRQRRVRGSEYDDFLDEFMEAVSSKYGMNCLIQFEDFANVNAFRLLNKYRNQYCTFNDDIQGTASVAVAGLLAALRITKNKLSDQTILFQGAGEAALGIAHLIVMALEKEGLPKEKAIKKIWLVDSKGLIVKGRASLTQEKEKFAHEHEEMKNLEAIVQEIKPTALIGVAAIGGAFSEQILKDMAAFNERPIIFALSNPTSKAECSAEQCYKITKGRAIFASGSPFDPVTLPNGQTLYPGQGNNSYVFPGVALGVVACGLRQITDNIFLTTAEVIAQQVSDKHLEEGRLYPPLNTIRDVSLKIAEKIVKDAYQEKTATVYPEPQNKEAFVRSQMYSTDYDQILPDCYSWPEEVQKIQTKVDQ

SEQ ID NO: 34219 - protein, 11 aa, Artificial Sequence
  Synthetic polypeptide
SQHFGRPRPLW

SEQ ID NO: 34220 - protein, 21 aa, Artificial Sequence
  Synthetic polypeptide
PEVVAQACDPNTLGGRGHCGD

SEQ ID NO: 34221 - protein, 29 aa, Artificial Sequence
  Synthetic polypeptide
HFGRPRQVDHLRLGVRDQPGQHEYQEKPT

SEQ ID NO: 34222 - protein, 64 aa, Artificial Sequence
  Synthetic polypeptide
EFETSLANMNTRKNLHDNSFSNCGYYGVIKHFLGLPELPYPSHLQVLQIDSCYARRSFYSRKAL

SEQ ID NO: 34223 - protein, 516 aa, Artificial Sequence
  Synthetic polypeptide
REYIAFCGCEDGFQQGASPLASPGGSPKGSPARSLARPGTPLPSPQAPRVDLQGAELWKRFHEIGTEMIITKAGRRMFPAMRVKISGLDPHQQYYIAMDIVPVDNKRYRYVYHSSKWMVAGNADSPVPPRVYIHPDSPASGETWMRQVISFDKLKLTNNELDDQGHIILHSMHKYQPRVHVIRKDCGDDLSPIKPVPSGEGVKAFSFPETVFTTVTAYQNQQITRLKIDRNPFAKGFRDSGRNRMGLEALVESYAFWRPSLRTLTFEDIPGIPKQGNASSSTLLQGTGNGVPATHPHLLSGSSCSSPAFHLGPNTSQLCSLAPADYSACARSGLTLNRYSTSLAETYNRLTNQAGETFAPPRTPSYVGVSSSTSVNMSMGGTDGDTFSCPQTSLSMQISGMSPQLQYIMPSPSSNAFATNQTHQGSYNTFRLHSPCALYGYNFSTSPKLAASPEKIVSSQGSFLGSSPSGTMTDRQMLPPVEGVHLLSSGGQQSFFDSRTLGSLTLSSSQVSAHMV

SEQ ID NO: 34224 - protein, 63 aa, Artificial Sequence
  Synthetic polypeptide
GNILLSAAVRTASSRELPLWRHREAPPRGLRRAPWPGPGPLCPRRRPRGWICREPSSGSAFMR

SEQ ID NO: 34225 - protein, 8 aa, Artificial Sequence
  Synthetic polypeptide
GIYCFLRL

SEQ ID NO: 34226 - protein, 8 aa, Artificial Sequence
  Synthetic polypeptide
TSLGNGKL

SEQ ID NO: 34227 - protein, 31 aa, Artificial Sequence
  Synthetic polypeptide
PAWATENYKICSWKTNERERSAFGTFYHEFH

SEQ ID NO: 34228 - protein, 248 aa, Artificial Sequence
  Synthetic polypeptide
QPGQRKIIKSVPGKLMKEKGQHLEPFIMNFINSCESPKPKPSRPELTILSPTSENNKKLFNDLFKNNANRAENTERKQNQNYFMEVMTVEGVYDYLMYVGRVVFQVPDWLHHLLMGTRILFKNTLEMYTDYYLQCKLEQLFQEHRLVSLITLLRDAIFCENTEPRSLQDKQKGAKQTFEEMMNYIPDLLVKCIGEETKYESIRLLFDGLQQPVLNKQLTYVLLDIVIQELFPELNKVQKEVTSVTSWM

SEQ ID NO: 34229 - protein, 217 aa, Artificial Sequence
  Synthetic polypeptide
QPGQRKIIKSVPGKLMKEKGQHLEPFIMNFINSCESPKPKPSRPELTILSPTSENNKKLFNDLFKNNANRAENTERKQNQNYFMEVMTVEGVYDYLMYVGRVVFQVPDWLHHLLMGTRILFKNTLEMYTDYYLQCKLEQLFQEHRLVSLITLLRDAIFCENTEPRSLQDKQKGAKQTFEEMMNYIPDLLVKCIGEETKYESIRLLFDGLQQPVLNKQ

SEQ ID NO: 34230 - protein, 149 aa, Artificial Sequence
  Synthetic polypeptide
QPGQRKIIKSVPGKLMKEKGQHLEPFIMNFINSCESPKPKPSRPELTILSPTSENNKKLFNDLFKNNANRAENTERKQNQNYFMEVMTVEGVYDYLMYVDAIFCENTEPRSLQDKQKGAKQTFEEMMNYIPDLLVKCIGEETKYESIRL

SEQ ID NO: 34231 - protein, 22 aa, Artificial Sequence
  Synthetic polypeptide
GRLKRADHEVKRSRPSWLTRHS

SEQ ID NO: 34232 - protein, 31 aa, Artificial Sequence
  Synthetic polypeptide
QDTPRICREMENFRRSFTFIGGIHSGYPKLC

SEQ ID NO: 34233 - protein, 2686 aa, Artificial Sequence
  Synthetic polypeptide
QAEAGGSRGQEIKTILADKTLLEYAEKWKTSEDPLPLLEVYTVAIQSYVKARPYLTSECENVALVLERLALSCVELLLCLPVELSDKQWEQFQTLVQVAHEKLMENGSCELHFLATLAQETGVWKNPVLCTILSQEPLDKDKVNEFLAFEGPILLDMRIKHLIKTNQLSQATALAKLCSDHPEIGIKGSFKQTYLVCLCTSSPNGKLIEEISEVDCKDALEMICNLESEGDEKSALVLCTAFLSRQLQQGDMYCAWELTLFWSKLQQRVEPSIQVYLERCRQLSLLTKTVYHIFFLIKVINSETEGAGLATCIELCVKALRLESTENTEVKISICKTISCLLPDDLEVKRACQLSEFLIEPTVDAYYAVEMLYNQPDQKYDEENLPIPNSLRCELLLVLKTQWPFDPEFWDWKTLKRQCLALMGEEASIVSSIDELNDSEVYEKVVDYQEESKETSMNGLSGGVGANSGLLKDIGDEKQKKREIKQLRERGFISARFRNWQAYMQYCVLCDKEFLGHRIVRHAQKHYKDGIYSCPICAKNFNSKETFVPHVTLHVKQSSKERLAAMKPLRRLGRPPKITTTNENQKTNTVAKQEQRPIKKNSLYSTDFIVFNDNDGSDDENDDKDKSYEPEVIPVQKPVPVNEFNCPVTFCKKGFKYFKNLIAHVKGHKDNEDAKRFLEMQSKKVICQYCRRHFVSVTHLNDHLQMHCGSKPYICIQMKCKAGFNSYAELLTHRKEHQVFRAKCMFPKCGRIFSEAYLLYDHEAQHYNTYTCKFTGCGKVYRSQGELEKHLDDHSTPPEKVLPPEAQLNSSGDSIQPSEVNQNTAENIEKERSMLPSENNIENSLLADRSDAWDKSKAESAVTKQDQISASELRQANGPLSNGLENPATTPLLQSSEVAVSIKVSLNQGIEDNFGKQENSTVEGSGEALVTDLHTPVEDTCNDLCHPGFQERKEQDCFNDAHVTQNSLVNSETLKIGDLTPQNLERQVNNLMTFSVQNQAAFQNNLPTSKFECGDNVKTSSNLYNLPLKTLESIAFVPPQSDLSNSLGTPSVPPKAPVQKFSCQVEGCTRTYNSSQSIGKHMKTAHPDQYAAFKMQRKSKKGQKANNLNTPNNGKFVYFLPSPVNSSNPFFTSQTKANGNPACSAQLQHVSPPIFPAHLASVSTPLLSSMESVINPNITSQDKNEQGGMLCSQMENLPSTALPAQMEDLTKTVLPLNIDSGSDPFLPLPAESSSMSLFPSPADSGTNSVFSQLENNTNHYSSQIEGNTNSSFLKGGNGENAVFPSQVNVANNFSSTNAQQSAPEKVKKDRGRGPNGKERKPKHNKRAKWPAIIRDGKFICSRCYRAFTNPRSLGGHLSKRSYCKPLDGAEIAQELLQSNGQPSLLASMILSTNAVNLQQPQQSTFNPEACFKDPSFLQLLAENRSPAFLPNTFPRSGVTNFNTSVSQEGSEIIKQALETAGIPSTFEGAEMLSHVSTGCVSDASQVNATVMPNPTVPPLLHTVCHPNTLLTNQNRTSNSKTSSIEECSSLPVFPTNDLLLKTVENGLCSSSFPNSGGPSQNFTSNSSRVSVISGPQNTRSSHLNKKGNSASKRRKKVAPPLIAPNASQNLVTSDLTTMGLIAKSVEIPTTNLHSNVIPTCEPQSLVENLTQKLNNVNNQLFMTDVKENFKTSLESHTVLAPLTLKTENGDSQMMALNSCTTSINSDLQISEDNVIQNFEKTLEIIKTAMNSQILEVKSGSQGAGETSQNAQINYNIQLPSVNTVQNNKLPDSSPFSSFISVMPTKSNIPQSEVSHKEDQIQEILEGLQKLKLENDLSTPASQCVLINTSVTLTPTPVKSTADITVIQPVSEMINIQFNDKVNKPFVCQNQGCNYSAMTKDALFKHYGKIHQYTPEMILEIKKNQLKFAPFKCVVPTCTKTFTRNSNLRAHCQLVHHFTTEEMVKLKIKRPYGRKSQSENVPASRSTQVKKQLAMTEENKKESQPALELRAETQNTHSNVAVIPEKQLVEKKSPDKTESSLQVITVTSEQCNTNALTNTQTKGRKIRRHKKEKEEKKRKKPVSQSLEFPTRYSPYRPYRCVHQGCFAAFTIQQNLILHYQAVHKSDLPAFSAEVEEESEAGKESEETETKQTLKEFRCQVSDCSRIFQAITGLIQHYMKLHEMTPEEIESMTASVDVGKFPCDQLECKSSFTTYLNYVVHLEADHGIGLRASKTEEDGVYKCDCEGCDRIYATRSNLLRHIFNKHNDKHKAHLIRPRRLTPGQENMSSKANQEKSKSKHRGTKHSRCGKEGIKMPKTKRKKKNNLENKNAKIVQIEENKPYSLKRGKHVYSIKARNDALSECTSRFVTQYPCMIKGCTSVVTSESNIIRHYKCHKLSKAFTSQHRNLLIVFKRCCNSQVKETSEQEGAKNDVKDSDTCVSESNDNSRTTATVSQKEVEKNEKDEMDELTELFITKLINEDSTSVETQANTSSNVSNDFQEDNLCQSERQKASNLKRVNKEKNVSQNKKRKVEKAEPASAAELSSVRKEEETAVAIQTIEEHPASFDWSSFKPMGFEVSFLKFLEESAVKQKKNTDKDHPNTGNKKGSHSNSRKNIDKTAVTSGNHVCPCKESETFVQFANPSQLQCSDNVKIVLDKNLKDCTELVLKQLQEMKPTVSLKKLEVHSNDPDMSVMKDISIGKATGRGQY

SEQ ID NO: 34234 - protein, 2681 aa, Artificial Sequence
  Synthetic polypeptide
QAEAGGSRGQEIKTILADKTLLEYAEKWKTSEDPLPLLEVYTVAIQSYVKARPYLTSECENVALVLERLALSCVELLLCLPVELSDKQWEQFQTLVQVAHEKLMENGSCELHFLATLAQETGVWKNPVLCTILSQEPLDKDKAFEGPILLDMRIKHLIKTNQLSQATALAKLCSDHPEIGIKGSFKQTYLVCLCTSSPNGKLIEEISEVDCKDALEMICNLESEGDEKSALVLCTAFLSRQLQQGDMYCAWELTLFWSKLQQRVEPSIQVYLERCRQLSLLTKTVYHIFFLIKVINSETEGAGLATCIELCVKALRLESTENTEVKISICKTISCLLPDDLEVKRACQLSEFLIEPTVDAYYAVEMLYNQPDQKYDEENLPIPNSLRCELLLVLKTQWPFDPEFWDWKTLKRQCLALMGEEASIVSSIDELNDSEVYEKVVDYQEESKETSMNGLSGGVGANSGLLKDIGDEKQKKREIKQLRERGFISARFRNWQAYMQYCVLCDKEFLGHRIVRHAQKHYKDGIYSCPICAKNFNSKETFVPHVTLHVKQSSKERLAAMKPLRRLGRPPKITTTNENQKTNTVAKQEQRPIKKNSLYSTDFIVFNDNDGSDDENDDKDKSYEPEVIPVQKPVPVNEFNCPVTFCKKGFKYFKNLIAHVKGHKDNEDAKRFLEMQSKKVICQYCRRHFVSVTHLNDHLQMHCGSKPYICIQMKCKAGFNSYAELLTHRKEHQVFRAKCMFPKCGRIFSEAYLLYDHEAQHYNTYTCKFTGCGKVYRSQGELEKHLDDHSTPPEKVLPPEAQLNSSGDSIQPSEVNQNTAENIEKERSMLPSENNIENSLLADRSDAWDKSKAESAVTKQDQISASELRQANGPLSNGLENPATTPLLQSSEVAVSIKVSLNQGIEDNFGKQENSTVEGSGEALVTDLHTPVEDTCNDLCHPGFQERKEQDCFNDAHVTQNSLVNSETLKIGDLTPQNLERQVNNLMTFSVQNQAAFQNNLPTSKFECGDNVKTSSNLYNLPLKTLESIAFVPPQSDLSNSLGTPSVPPKAPVQKFSCQVEGCTRTYNSSQSIGKHMKTAHPDQYAAFKMQRKSKKGQKANNLNTPNNGKFVYFLPSPVNSSNPFFTSQTKANGNPACSAQLQHVSPPIFPAHLASVSTPLLSSMESVINPNITSQDKNEQGGMLCSQMENLPSTALPAQMEDLTKTVLPLNIDSGSDPFLPLPAESSSMSLFPSPADSGTNSVFSQLENNTNHYSSQIEGNTNSSFLKGGNGENAVFPSQVNVANNFSSTNAQQSAPEKVKKDRGRGPNGKERKPKHNKRAKWPAIIRDGKFICSRCYRAFTNPRSLGGHLSKRSYCKPLDGAEIAQELLQSNGQPSLLASMILSTNAVNLQQPQQSTFNPEACFKDPSFLQLLAENRSPAFLPNTFPRSGVTNFNTSVSQEGSEIIKQALETAGIPSTFEGAEMLSHVSTGCVSDASQVNATVMPNPTVPPLLHTVCHPNTLLTNQNRTSNSKTSSIEECSSLPVFPTNDLLLKTVENGLCSSSFPNSGGPSQNFTSNSSRVSVISGPQNTRSSHLNKKGNSASKRRKKVAPPLIAPNASQNLVTSDLTTMGLIAKSVEIPTTNLHSNVIPTCEPQSLVENLTQKLNNVNNQLFMTDVKENFKTSLESHTVLAPLTLKTENGDSQMMALNSCTTSINSDLQISEDNVIQNFEKTLEIIKTAMNSQILEVKSGSQGAGETSQNAQINYNIQLPSVNTVQNNKLPDSSPFSSFISVMPTKSNIPQSEVSHKEDQIQEILEGLQKLKLENDLSTPASQCVLINTSVTLTPTPVKSTADITVIQPVSEMINIQFNDKVNKPFVCQNQGCNYSAMTKDALFKHYGKIHQYTPEMILEIKKNQLKFAPFKCVVPTCTKTFTRNSNLRAHCQLVHHFTTEEMVKLKIKRPYGRKSQSENVPASRSTQVKKQLAMTEENKKESQPALELRAETQNTHSNVAVIPEKQLVEKKSPDKTESSLQVITVTSEQCNTNALTNTQTKGRKIRRHKKEKEEKKRKKPVSQSLEFPTRYSPYRPYRCVHQGCFAAFTIQQNLILHYQAVHKSDLPAFSAEVEEESEAGKESEETETKQTLKEFRCQVSDCSRIFQAITGLIQHYMKLHEMTPEEIESMTASVDVGKFPCDQLECKSSFTTYLNYVVHLEADHGIGLRASKTEEDGVYKCDCEGCDRIYATRSNLLRHIFNKHNDKHKAHLIRPRRLTPGQENMSSKANQEKSKSKHRGTKHSRCGKEGIKMPKTKRKKKNNLENKNAKIVQIEENKPYSLKRGKHVYSIKARNDALSECTSRFVTQYPCMIKGCTSVVTSESNIIRHYKCHKLSKAFTSQHRNLLIVFKRCCNSQVKETSEQEGAKNDVKDSDTCVSESNDNSRTTATVSQKEVEKNEKDEMDELTELFITKLINEDSTSVETQANTSSNVSNDFQEDNLCQSERQKASNLKRVNKEKNVSQNKKRKVEKAEPASAAELSSVRKEEETAVAIQTIEEHPASFDWSSFKPMGFEVSFLKFLEESAVKQKKNTDKDHPNTGNKKGSHSNSRKNIDKTAVTSGNHVCPCKESETFVQFANPSQLQCSDNVKIVLDKNLKDCTELVLKQLQEMKPTVSLKKLEVHSNDPDMSVMKDISIGKATGRGQY

SEQ ID NO: 34235 - protein, 211 aa, Artificial Sequence
  Synthetic polypeptide
QDTPRICREMENFRRSFTFIGEVEEESEAGKESEETETKQTLKEFRCQVSDCSRIFQAITGLIQHYMKLHEMTPEEIESMTASVDVGKFPCDQLECKSSFTTYLNYVVHLEADHGIGLRASKTEEDGVYKCDCEGCDRIYATRSNLLRHIFNKHNDKHKAHLIRPRRLTPGQENMSSKANQEKSKSKHRGTKHSRCGKEGIKMPKTKRKKK

SEQ ID NO: 34236 - protein, 59 aa, Artificial Sequence
  Synthetic polypeptide
QAEAGGSRGQEIKTILADKTLLEYAEKWKTSEDPLPLLERSKRKVKLVKKVKKLKLNKL

SEQ ID NO: 34237 - protein, 27 aa, Artificial Sequence
  Synthetic polypeptide
TPLLEKPSNGSMNTSHLRHAFTLTKTY

SEQ ID NO: 34238 - protein, 51 aa, Artificial Sequence
  Synthetic polypeptide
AQPLAMSYPIPPQESSVSSHHQEDSYLMQLLHLGLLSLHKLPFWKNLQTDP

SEQ ID NO: 34239 - protein, 320 aa, Artificial Sequence
  Synthetic polypeptide
CNSSTLDFSASINSPFGKTFKRIHEYKPLKTRFYTHKDILDIGANILKKEEQFQEDILREHIAKAEAEVWAQANERQKQAVEKALEEANDRHKIEIQILKEEHQKDLQEVTAKTKTEMYQNMDDEMKREHLAAEQRMVHRIQRIMMECHREKVEAVEKARAEERHIAQEAIQAQKSKAVEEIVNTGVTVIKDEKTSVARLMREKEHEMSILYGIAQRQRQEEVQEVLQEAEKTHQATLGNMMDKLANTQGELLSIAKQLGIMTNWKDFLEEELQETRMAFQKYINYTFPKLSPGHADFILPERKKTPSNLVIKENKTTLD

SEQ ID NO: 34240 - protein, 37 aa, Artificial Sequence
  Synthetic polypeptide
AEIVPLHHSSLGNKKRNGCSRSLWEWRPLLNLYCNAK

SEQ ID NO: 34241 - protein, 321 aa, Artificial Sequence
  Synthetic polypeptide
FQLLERLKQENCLNPGGRGCNELRSCHCTTPAWATKKGTAVVDLSGNGDPSSICTVMRSDGTSLYATRDLAAAIDRMDKYNFDTMIYVTDKGQKKHFQQVFQMLKIMGYDWAERCQHVPFGVVQGMKTRRGDVTFLEDVLNEIQLRMLQNMASIKTTKELKNPQETAERVGLAALIIQDFKGLLLSDYKFSWDRVFQSRGDTGVFLQYTHARLHSLEETFGCGYLNDFNTACLQEPQSVSILQHLLRFDEVLYKSSQDFQPRHIVSYLLTLSHLAAVAHKTLQIKDSPPEVAGARLHLFKAVRSVLANGMKLLGITPVCRM

SEQ ID NO: 34242 - protein, 17 aa, Artificial Sequence
  Synthetic polypeptide
DRATAPLQPGQQKKERL

SEQ ID NO: 34243 - protein, 38 aa, Artificial Sequence
  Synthetic polypeptide
LLIIPSSRNTSFQSVESSTRKLDHINICSSNFPKRRSS

SEQ ID NO: 34244 - protein, 574 aa, Artificial Sequence
  Synthetic polypeptide
LSPVPGIPLSRVLNLPPENLITSISAVPISQKEEVADFQLSVDSLLEKDNDHSRPDIQVQAKRLAEKLRCDTVVSEISTGQRTVNFKINRELLTKTVLQQVIEDGSKYGLKSELFSGLPQKKIVVEFSSPNVAKKFHVGHLRSTIIGNFIANLKEALGHQVIRINYLGDWGMQFGLLGTGFQLFGYEEKLQSNPLQHLFEVYVQVNKEAADDKSVAKAAQEFFQRLELGDVQALSLWQKFRDLSIEEYIRVYKRLGVYFDEYSGESFYREKSQEVLKLLESKGLLLKTIKGTAVVDLSGNGDPSSICTVMRSDGTSLYATRDLAAAIDRMDKYNFDTMIYVTDKGQKKHFQQVFQMLKIMGYDWAERCQHVPFGVVQGMKTRRGDVTFLEDVLNEIQLRMLQNMASIKTTKELKNPQETAERVGLAALIIQDFKGLLLSDYKFSWDRVFQSRGDTGVFLQYTHARLHSLEETFGCGYLNDFNTACLQEPQSVSILQHLLRFDEVLYKSSQDFQPRHIVSYLLTLSHLAAVAHKTLQIKDSPPEVAGARLHLFKAVRSVLANGMKLLGITPVCRM

SEQ ID NO: 34245 - protein, 19 aa, Artificial Sequence
  Synthetic polypeptide
SAMLTFDYPQFQEYLFPEC

SEQ ID NO: 34246 - protein, 216 aa, Artificial Sequence
  Synthetic polypeptide
LLIIPSSRNTSFQSVESSTRKLDHINICSSNFPKRSFALVTQAGVQWHNLDSLQSPPPGFKRFPCLSLPSSWDCREVADFQLSVDSLLEKDNDHSRPDIQVQAKRLAEKLRCDTVVSEISTGQRTVNFKINRELLTKTVLQQVIEDGSKYGLKSELFSGLPQKKIVVEFSSPNVAKKFHVGHLRSTIIGNFIANLKEALGHQVIRINYLGDWGMQF

SEQ ID NO: 34247 - protein, 74 aa, Artificial Sequence
  Synthetic polypeptide
LSPVPGIPLSRVLNLPPENLITSISAVPISQKEVSLLSPRLECSGTILTRCSLHLQDSSDSPASVSQAAGIVEK

SEQ ID NO: 34248 - protein, 7 aa, Artificial Sequence
  Synthetic polypeptide
ENKFCTT

SEQ ID NO: 34249 - protein, 48 aa, Artificial Sequence
  Synthetic polypeptide
GEPRPGRNPVREVRSVSARPPCLRSEETLRLATAPSEKTNSVQHKTRV

SEQ ID NO: 34250 - protein, 139 aa, Artificial Sequence
  Synthetic polypeptide
EVRRPSAWQPPRLRKQILYNIKQEYKRMQKRRHLETSFQQTDPCCTSDAQPHAFLLSGPASPGTSSAASSPLKKEQPLFTLRQVGMICERLLKEREEKVREEYEEILNTKLAEQYDAFVKFTHDQIMRRYGEQPASYVS

SEQ ID NO: 34251 - protein, 18 aa, Artificial Sequence
  Synthetic polypeptide
RSNEVTSSECWPPVCWRL

SEQ ID NO: 34252 - protein, 138 aa, Artificial Sequence
  Synthetic polypeptide
QFHKPETCGPSLPPSPDDPMRLLPQNVGLLYVGGYERPFAQIKVTKELKQYDNKIIECKFENNSWVFMRQRTDKSFPNAYNTAMAVCNSISNPVTKEMLFEFIDRCTAASQGQKRKHHLDPDTELMPPPPPKRPRPLT

SEQ ID NO: 34253 - protein, 82 aa, Artificial Sequence
  Synthetic polypeptide
QFHKPETCGPSLPPSPDDPMRLLPQNVGLLYVGGYERPFAQIKVCLFIFSVLFLDVLLSRIHQNLANNNQHIKISCSSTLGG

SEQ ID NO: 34254 - protein, 157 aa, Artificial Sequence
  Synthetic polypeptide
DYWLFKKYKPGRCDDILKWKPPSLNSVDFRLKITRMGGEGLLPQNVGLLYVGGYERPFAQIKVTKELKQYDNKIIECKFENNSWVFMRQRTDKSFPNAYNTAMAVCNSISNPVTKEMLFEFIDRCTAASQGQKRKHHLDPDTELMPPPPPKRPRPLT

SEQ ID NO: 34255 - protein, 25 aa, Artificial Sequence
  Synthetic polypeptide
LISVFSNFRTTGYLRNTNLVDVMIF

SEQ ID NO: 34256 - protein, 101 aa, Artificial Sequence
  Synthetic polypeptide
DYWLFKKYKPGRCDDILKWKPPSLNSVDFRLKITRMGGEGLLPQNVGLLYVGGYERPFAQIKVCLFIFSVLFLDVLLSRIHQNLANNNQHIKISCSSTLGG

SEQ ID NO: 34257 - protein, 187 aa, Artificial Sequence
  Synthetic polypeptide
CTYNTSRANERLKLLEGNFAKEVSHEMDGLIFQPTGKYKPGRCDDILKWKPPSLNSVDFRLKITRMGGEGLLPQNVGLLYVGGYERPFAQIKVTKELKQYDNKIIECKFENNSWVFMRQRTDKSFPNAYNTAMAVCNSISNPVTKEMLFEFIDRCTAASQGQKRKHHLDPDTELMPPPPPKRPRPLT

SEQ ID NO: 34258 - protein, 5 aa, Artificial Sequence
  Synthetic polypeptide
KIKAT

SEQ ID NO: 34259 - protein, 131 aa, Artificial Sequence
  Synthetic polypeptide
CTYNTSRANERLKLLEGNFAKEVSHEMDGLIFQPTGKYKPGRCDDILKWKPPSLNSVDFRLKITRMGGEGLLPQNVGLLYVGGYERPFAQIKVCLFIFSVLFLDVLLSRIHQNLANNNQHIKISCSSTLGG

SEQ ID NO: 34260 - protein, 50 aa, Artificial Sequence
  Synthetic polypeptide
RGFDTDSLLSRWIKQLITLNFALYRSVTSFDQSFRWFMNGTKLKEVHDVD

SEQ ID NO: 34261 - protein, 300 aa, Artificial Sequence
  Synthetic polypeptide
RRYMMLIDGTNEVFMIDRDNSVFHVSNLEFPFRKDLRMHLSNTLLDGEMIIDRVNGQAVPRYLIYDIIKFNSQPVGDCDFNVRLQCIEREIISPRHEKMKTGLIDKTQEPFSVRNKPFFDICTSRKLLEGNFAKEVSHEMDGLIFQPTGKYKPGRCDDILKWKPPSLNSVDFRLKITRMGGEGLLPQNVGLLYVGGYERPFAQIKVTKELKQYDNKIIECKFENNSWVFMRQRTDKSFPNAYNTAMAVCNSISNPVTKEMLFEFIDRCTAASQGQKRKHHLDPDTELMPPPPPKRPRPLT

SEQ ID NO: 34262 - protein, 5 aa, Artificial Sequence
  Synthetic polypeptide
VKGGT

SEQ ID NO: 34263 - protein, 277 aa, Artificial Sequence
  Synthetic polypeptide
RRYMMLIDGTNEVFMIDRDNSVFHVSNLEFPFRKDLRMHLSNTLLDGEMIIDRVNGQAVPRYLIYDIIKFNSQPVGDCDFNVRLQCIEREIISPRHEKMKTGLIDKTQEPFSVRNKPFFDICTSRKKYKPGRCDDILKWKPPSLNSVDFRLKITRMGGEGLLPQNVGLLYVGGYERPFAQIKVTKELKQYDNKIIECKFENNSWVFMRQRTDKSFPNAYNTAMAVCNSISNPVTKEMLFEFIDRCTAASQGQKRKHHLDPDTELMPPPPPKRPRPLT

SEQ ID NO: 34264 - protein, 244 aa, Artificial Sequence
  Synthetic polypeptide
RRYMMLIDGTNEVFMIDRDNSVFHVSNLEFPFRKDLRMHLSNTLLDGEMIIDRVNGQAVPRYLIYDIIKFNSQPVGDCDFNVRLQCIEREIISPRHEKMKTGLIDKTQEPFSVRNKPFFDICTSRKLLEGNFAKEVSHEMDGLIFQPTGKYKPGRCDDILKWKPPSLNSVDFRLKITRMGGEGLLPQNVGLLYVGGYERPFAQIKVCLFIFSVLFLDVLLSRIHQNLANNNQHIKISCSSTLGG

SEQ ID NO: 34265 - protein, 258 aa, Artificial Sequence
  Synthetic polypeptide
EDLHLNPSSTTGCVDLWARPEDLRREFGRYGPIVDVYIPLDFYTRRPRGFAYVQFEDVRDAEDALYNLNRKWVCGRQIEIQFAQGDRKTPGQMKSKERHPCSPSDHRRSRSPSQRRTRSRSSSWGRNRRRSDSLKESRHRRFSYSQSKSRSKSLPRRSTSARQSRTPRRNFGSRGRSRSKSLQKRSKSIGKSQSSSPQKQTSSGTKSRSHGRHSDSIARSPCKSPKGYTNSETKVQTAKHSHFRSHSRSRSYRHKNSW

SEQ ID NO: 34266 - protein, 18 aa, Artificial Sequence
  Synthetic polypeptide
ISGQGLRTCAVSLVDMAL

SEQ ID NO: 34267 - protein, 12 aa, Artificial Sequence
  Synthetic polypeptide
LYYWLCRSLGKA

SEQ ID NO: 34268 - protein, 25 aa, Artificial Sequence
  Synthetic polypeptide
SQHLGTSRQESLLSPGVHDQPGQHV

SEQ ID NO: 34269 - protein, 41 aa, Artificial Sequence
  Synthetic polypeptide
AQEFMTSLGNMCDCEILWKSISFCFLSLGRIKCIRCCCAGL

SEQ ID NO: 34270 - protein, 237 aa, Artificial Sequence
  Synthetic polypeptide
PAWATCVTVKYYGKASHSASYPWEGLNALDAAVLAYNNLSVFRQQMKPTWRVHGIIKNGGVKPNIIPSYSELIYYFRAPSMKELQVLTKKAEDCFRAAALASGCTVEIKGGAHDYYNVLPNKSLWKAYMENGRKLGIEFISEDTMLNGPSGSTDFGNVSFVVPGIHPYFHIGSNALNHTEQYTEAAGSQEAQFYTLRTAKALAMTALDVIFKPELLEGIREDFKLKLQEEQFVNAVE

SEQ ID NO: 34271 - protein, 15 aa, Artificial Sequence
  Synthetic polypeptide
AQEVESSLANMLLNV

SEQ ID NO: 34272 - protein, 20 aa, Artificial Sequence
  Synthetic polypeptide
SQHFGRLEPRRWRAAWPTCC

SEQ ID NO: 34273 - protein, 335 aa, Artificial Sequence
  Synthetic polypeptide
PGTVAHACNPSTLGGLSPGGGEQPGQHAVKRLMKEAAELKDPTDHYHAQPLEDNLFEWHFTVRGPPDSDFDGGVYHGRIVLPPEYPMKPPSIILLTANGRFEVGKKICLSISGHHPETWQPSWSIRTALLAIIGFMPTKGEGAIGSLDYTPEERRALAKKSQDFCCEGCGSAMKDVLLPLKSGSDSSQADQEAKELARQISFKAEVNSSGKTISESDLNHSFSLTDLQDDIPTTFQGATASTSYGLQNSSAASFHQPTQPVAKNTSMSPRQRRAQQQSQRRLSTSPDVIQGHQPRDNHTDHGGSAVLIVILTLALAALIFRRIYLANEYIFDFEL

SEQ ID NO: 34274 - protein, 64 aa, Artificial Sequence
  Synthetic polypeptide
PLNTTGLSVQIRSTYTWSFSNQKWIENSAFEGCKTRVYGGPTFHVCGFSRAISGLEYKLHNSSW

SEQ ID NO: 34275 - protein, 64 aa, Artificial Sequence
  Synthetic polypeptide
IPQVCLYRSGLLTHGVFPTKSGLKIQHLRDAKPEYMEGQLFMYAGSPGPSLDLNINCTTPPGSL

SEQ ID NO: 34276 - protein, 17 aa, Artificial Sequence
  Synthetic polypeptide
HIKTHVNTPDMQNCKVY

SEQ ID NO: 34277 - protein, 41 aa, Artificial Sequence
  Synthetic polypeptide
SLQKGMSSSPIPGLDLSILRPMSTLLTCKTVRCTSPLLVPT

SEQ ID NO: 34278 - protein, 42 aa, Artificial Sequence
  Synthetic polypeptide
GRAWWLTPRIPALWEAKEYASTIVSGTSKGQCGPICTVFIIG

SEQ ID NO: 34279 - protein, 574 aa, Artificial Sequence
  Synthetic polypeptide
RLESQHFGRPRSMHQQLCQELQRDNVDLFVQSSLSAKERHLAAVASALWRHFFSFLKSQRMSQVVPFSQLADAAADFTLLAMDMPSTAPSDFQPQPVISIIQLFGWDDIICPQVVARYLSHVLQNSTLCEALSHSGYVSFQALTVRSWIRCVLQMYIKNLSGPDDLLIDKNLEEAVEKEYMKQLVKLTRLLFNLSEVKSIFSKAQVEYLSISEDPKKALVRFFEAVGVTYGNVQTLSDKSAMVTKSLEYLGEVLKYIKPYLGKKVFSAGLQLTYGMMGILVKSWAQIFATSKAQKLLFRIIDCLLLPHAVLQQEKELPAPMLSAIQKSLPLYLQGMCIVCCQSQNPNAYLNQLLGNVIEQYIGRFLPASPYVSDLGQHPVLLALRNTATIPPISSLKKCIVQVIRKSYLEYKGSSPPPRLASILAFILQLFKETNTDIYEVELLLPGILKCLVLVSEPQVKRLATENLQYMVKACQVGSEEEPSSQLTSVFRQFIQDYGMRYYYQVYSILETVATLDQQVVIHLISTLTQSLKDSEQKWGLGRNIAQREAYSKLLSHLGQMGQDEMQRLENDNT

SEQ ID NO: 34280 - protein, 53 aa, Artificial Sequence
  Synthetic polypeptide
NPSTLGGQGVCINNCVRNFKGTMWTYLYSLHYRLKSATLLQLPVHCGDISFHF

SEQ ID NO: 34281 - protein, 78 aa, Artificial Sequence
  Synthetic polypeptide
GLPGHAEPCSSVADSRYGDFFKHLHFVLVSASSELQLSQWQSQGFWYIILLMFFLWFLRLYLHYLGQWLFLQAISTPV

SEQ ID NO: 34282 - protein, 95 aa, Artificial Sequence
  Synthetic polypeptide
VSSHEIWWFSKGVPPSLSTHSFSFLPPCEEGCVCFPFCPDCKFPEASLAMLNPVLQLLIVDMETSSSISILCWYQRLQNFSYLNGKARASGTLYC

SEQ ID NO: 34283 - protein, 6 aa, Artificial Sequence
  Synthetic polypeptide
TLFFSC

SEQ ID NO: 34284 - protein, 21 aa, Artificial Sequence
  Synthetic polypeptide
GLPGHAEPCSSVADSRYGDFF

SEQ ID NO: 34285 - protein, 65 aa, Artificial Sequence
  Synthetic polypeptide
VSSHEIWWFSKGVPPSLSTHSFSFLPPCEEGCVCFPFCPDCKFPEASLAMLNPVLQLLIVDMETS

SEQ ID NO: 34286 - protein, 83 aa, Artificial Sequence
  Synthetic polypeptide
VSSHEIWWFSKGVPPSLSTHSFSFLPPCEEGCVCFPFCPDSVLQLLIVDMETSSSISILCWYQRLQNFSYLNGKARASGTLYC

SEQ ID NO: 34287 - protein, 28 aa, Artificial Sequence
  Synthetic polypeptide
VLIHSPFCHPVKKDVFASPSVLILFFSC

SEQ ID NO: 34288 - protein, 53 aa, Artificial Sequence
  Synthetic polypeptide
VSSHEIWWFSKGVPPSLSTHSFSFLPPCEEGCVCFPFCPDSVLQLLIVDMETS

SEQ ID NO: 34289 - protein, 951 aa, Artificial Sequence
  Synthetic polypeptide
FIMKVSKIVNYWMEEEDVVTCKSFWNWLNKLLKTLLEKSSDRRRSSMPVIQSRDPLGFSWWIITHVASFYKFDRHGVPDEMRKVESNWNFVEELLKKSISVQGVILEEQLRMYLHCCLTLCDFWEPNIAIVTILWEYYSKNLNSSFSISWLPFKGLANTMKSPLSMLEMVKTCCCDKQDQELYKSSSSYTIFLCILAKVVKKAMKSNGPHPWKQVKGRIYSKFHQKRMEELTEVGLQNFFSLFLLLAAVAEVEDVASHVLDLLNFLKPAFVTSQRALIWKGHMAFLLMYAQKNLDIGVLAEKFSCAFREKAKEFLVSKNEEMVQRQTIWTLLSIYIDGVQEVFETSYCLYPSHEKLLNDGFSMLLRACRESELRTVLSFLQAVLARIRSMHQQLCQELQRDNVDLFVQSSLSAKERHLAAVASALWRHFFSFLKSQRMSQVVPFSQLADAAADFTLLAMDMPSTAPSDFQPQPVISIIQLFGWDDIICPQVVARYLSHVLQNSTLCEALSHSGYVSFQALTVRSWIRCVLQMYIKNLSGPDDLLIDKNLEEAVEKEYMKQLVKLTRLLFNLSEVKSIFSKAQVEYLSISEDPKKALVRFFEAVGVTYGNVQTLSDKSAMVTKSLEYLGEVLKYIKPYLGKKVFSAGLQLTYGMMGILVKSWAQIFATSKAQKLLFRIIDCLLLPHAVLQQEKELPAPMLSAIQKSLPLYLQGMCIVCCQSQNPNAYLNQLLGNVIEQYIGRFLPASPYVSDLGQHPVLLALRNTATIPPISSLKKCIVQVIRKSYLEYKGSSPPPRLASILAFILQLFKETNTDIYEVELLLPGILKCLVLVSEPQVKRLATENLQYMVKACQVGSEEEPSSQLTSVFRQFIQDYGMRYYYQVYSILETVATLDQQVVIHLISTLTQSLKDSEQKWGLGRNIAQREAYSKLLSHLGQMGQDEMQRLENDNT

SEQ ID NO: 34290 - protein, 8 aa, Artificial Sequence
  Synthetic polypeptide
PVSHFGTG

SEQ ID NO: 34291 - protein, 911 aa, Artificial Sequence
  Synthetic polypeptide
FIMKVSKIVNYWMEEEDVVTCKSFWNWLNKLLKTLLEKSSDRRRSSMPVIQSRDPLGFSWWIITHVASFYKFDRHGVPDEMRKVESNWNFVEELLKKSISVQNSSFSISWLPFKGLANTMKSPLSMLEMVKTCCCDKQDQELYKSSSSYTIFLCILAKVVKKAMKSNGPHPWKQVKGRIYSKFHQKRMEELTEVGLQNFFSLFLLLAAVAEVEDVASHVLDLLNFLKPAFVTSQRALIWKGHMAFLLMYAQKNLDIGVLAEKFSCAFREKAKEFLVSKNEEMVQRQTIWTLLSIYIDGVQEVFETSYCLYPSHEKLLNDGFSMLLRACRESELRTVLSFLQAVLARIRSMHQQLCQELQRDNVDLFVQSSLSAKERHLAAVASALWRHFFSFLKSQRMSQVVPFSQLADAAADFTLLAMDMPSTAPSDFQPQPVISIIQLFGWDDIICPQVVARYLSHVLQNSTLCEALSHSGYVSFQALTVRSWIRCVLQMYIKNLSGPDDLLIDKNLEEAVEKEYMKQLVKLTRLLFNLSEVKSIFSKAQVEYLSISEDPKKALVRFFEAVGVTYGNVQTLSDKSAMVTKSLEYLGEVLKYIKPYLGKKVFSAGLQLTYGMMGILVKSWAQIFATSKAQKLLFRIIDCLLLPHAVLQQEKELPAPMLSAIQKSLPLYLQGMCIVCCQSQNPNAYLNQLLGNVIEQYIGRFLPASPYVSDLGQHPVLLALRNTATIPPISSLKKCIVQVIRKSYLEYKGSSPPPRLASILAFILQLFKETNTDIYEVELLLPGILKCLVLVSEPQVKRLATENLQYMVKACQVGSEEEPSSQLTSVFRQFIQDYGMRYYYQVYSILETVATLDQQVVIHLISTLTQSLKDSEQKWGLGRNIAQREAYSKLLSHLGQMGQDEMQRLENDNT

SEQ ID NO: 34292 - protein, 142 aa, Artificial Sequence
  Synthetic polypeptide
FIMKVSKIVNYWMEEEDVVTCKSFWNWLNKLLKTLLEKSSDRRRSSMPVIQSRDPLGFSWWIITHVASFYKFDRHGVPDEMRKVESNWNFVEELLKKSISVQGVILEEQLRMYLHCCLTLCDFWEPNIAIVTILWEYYSKNL

SEQ ID NO: 34293 - protein, 104 aa, Artificial Sequence
  Synthetic polypeptide
FIMKVSKIVNYWMEEEDVVTCKSFWNWLNKLLKTLLEKSSDRRRSSMPVIQSRDPLGFSWWIITHVASFYKFDRHGVPDEMRKVESNWNFVEELLKKSISVQSC

SEQ ID NO: 34294 - protein, 940 aa, Artificial Sequence
  Synthetic polypeptide
RNGTLVHCQKKSFWNWLNKLLKTLLEKSSDRRRSSMPVIQSRDPLGFSWWIITHVASFYKFDRHGVPDEMRKVESNWNFVEELLKKSISVQGVILEEQLRMYLHCCLTLCDFWEPNIAIVTILWEYYSKNLNSSFSISWLPFKGLANTMKSPLSMLEMVKTCCCDKQDQELYKSSSSYTIFLCILAKVVKKAMKSNGPHPWKQVKGRIYSKFHQKRMEELTEVGLQNFFSLFLLLAAVAEVEDVASHVLDLLNFLKPAFVTSQRALIWKGHMAFLLMYAQKNLDIGVLAEKFSCAFREKAKEFLVSKNEEMVQRQTIWTLLSIYIDGVQEVFETSYCLYPSHEKLLNDGFSMLLRACRESELRTVLSFLQAVLARIRSMHQQLCQELQRDNVDLFVQSSLSAKERHLAAVASALWRHFFSFLKSQRMSQVVPFSQLADAAADFTLLAMDMPSTAPSDFQPQPVISIIQLFGWDDIICPQVVARYLSHVLQNSTLCEALSHSGYVSFQALTVRSWIRCVLQMYIKNLSGPDDLLIDKNLEEAVEKEYMKQLVKLTRLLFNLSEVKSIFSKAQVEYLSISEDPKKALVRFFEAVGVTYGNVQTLSDKSAMVTKSLEYLGEVLKYIKPYLGKKVFSAGLQLTYGMMGILVKSWAQIFATSKAQKLLFRIIDCLLLPHAVLQQEKELPAPMLSAIQKSLPLYLQGMCIVCCQSQNPNAYLNQLLGNVIEQYIGRFLPASPYVSDLGQHPVLLALRNTATIPPISSLKKCIVQVIRKSYLEYKGSSPPPRLASILAFILQLFKETNTDIYEVELLLPGILKCLVLVSEPQVKRLATENLQYMVKACQVGSEEEPSSQLTSVFRQFIQDYGMRYYYQVYSILETVATLDQQVVIHLISTLTQSLKDSEQKWGLGRNIAQREAYSKLLSHLGQMGQDEMQRLENDNT

SEQ ID NO: 34295 - protein, 71 aa, Artificial Sequence
  Synthetic polypeptide
IMVPIGDWVVKGTRRESRKFRVLKHHHQKKNKSKDSYPLPPPKKKKKEKERKFSKEMGLWCIVKRSHFGTG

SEQ ID NO: 34296 - protein, 49 aa, Artificial Sequence
  Synthetic polypeptide
NTTTKKRINQRTHTLSHHQKKRRKKRKGNSVKKWDFGALSKEVILELVE

SEQ ID NO: 34297 - protein, 900 aa, Artificial Sequence
  Synthetic polypeptide
RNGTLVHCQKKSFWNWLNKLLKTLLEKSSDRRRSSMPVIQSRDPLGFSWWIITHVASFYKFDRHGVPDEMRKVESNWNFVEELLKKSISVQNSSFSISWLPFKGLANTMKSPLSMLEMVKTCCCDKQDQELYKSSSSYTIFLCILAKVVKKAMKSNGPHPWKQVKGRIYSKFHQKRMEELTEVGLQNFFSLFLLLAAVAEVEDVASHVLDLLNFLKPAFVTSQRALIWKGHMAFLLMYAQKNLDIGVLAEKFSCAFREKAKEFLVSKNEEMVQRQTIWTLLSIYIDGVQEVFETSYCLYPSHEKLLNDGFSMLLRACRESELRTVLSFLQAVLARIRSMHQQLCQELQRDNVDLFVQSSLSAKERHLAAVASALWRHFFSFLKSQRMSQVVPFSQLADAAADFTLLAMDMPSTAPSDFQPQPVISIIQLFGWDDIICPQVVARYLSHVLQNSTLCEALSHSGYVSFQALTVRSWIRCVLQMYIKNLSGPDDLLIDKNLEEAVEKEYMKQLVKLTRLLFNLSEVKSIFSKAQVEYLSISEDPKKALVRFFEAVGVTYGNVQTLSDKSAMVTKSLEYLGEVLKYIKPYLGKKVFSAGLQLTYGMMGILVKSWAQIFATSKAQKLLFRIIDCLLLPHAVLQQEKELPAPMLSAIQKSLPLYLQGMCIVCCQSQNPNAYLNQLLGNVIEQYIGRFLPASPYVSDLGQHPVLLALRNTATIPPISSLKKCIVQVIRKSYLEYKGSSPPPRLASILAFILQLFKETNTDIYEVELLLPGILKCLVLVSEPQVKRLATENLQYMVKACQVGSEEEPSSQLTSVFRQFIQDYGMRYYYQVYSILETVATLDQQVVIHLISTLTQSLKDSEQKWGLGRNIAQREAYSKLLSHLGQMGQDEMQRLENDNT

SEQ ID NO: 34298 - protein, 131 aa, Artificial Sequence
  Synthetic polypeptide
RNGTLVHCQKKSFWNWLNKLLKTLLEKSSDRRRSSMPVIQSRDPLGFSWWIITHVASFYKFDRHGVPDEMRKVESNWNFVEELLKKSISVQGVILEEQLRMYLHCCLTLCDFWEPNIAIVTILWEYYSKNL

SEQ ID NO: 34299 - protein, 93 aa, Artificial Sequence
  Synthetic polypeptide
RNGTLVHCQKKSFWNWLNKLLKTLLEKSSDRRRSSMPVIQSRDPLGFSWWIITHVASFYKFDRHGVPDEMRKVESNWNFVEELLKKSISVQSC

SEQ ID NO: 34300 - protein, 17 aa, Artificial Sequence
  Synthetic polypeptide
KYKNRISQNKLYMVISL

SEQ ID NO: 34301 - protein, 27 aa, Artificial Sequence
  Synthetic polypeptide
NPVSTKNTKTELARTSCIWSSVYESGK

SEQ ID NO: 34302 - protein, 1012 aa, Artificial Sequence
  Synthetic polypeptide
PEQVVYGHQFMNLASDNLTNISLFEEHCETLLCDLISLSLNRYDKVRSSESLMSDQCPCLCIKELWVLLIHLLDHRSKWFVSESFWNWLNKLLKTLLEKSSDRRRSSMPVIQSRDPLGFSWWIITHVASFYKFDRHGVPDEMRKVESNWNFVEELLKKSISVQGVILEEQLRMYLHCCLTLCDFWEPNIAIVTILWEYYSKNLNSSFSISWLPFKGLANTMKSPLSMLEMVKTCCCDKQDQELYKSSSSYTIFLCILAKVVKKAMKSNGPHPWKQVKGRIYSKFHQKRMEELTEVGLQNFFSLFLLLAAVAEVEDVASHVLDLLNFLKPAFVTSQRALIWKGHMAFLLMYAQKNLDIGVLAEKFSCAFREKAKEFLVSKNEEMVQRQTIWTLLSIYIDGVQEVFETSYCLYPSHEKLLNDGFSMLLRACRESELRTVLSFLQAVLARIRSMHQQLCQELQRDNVDLFVQSSLSAKERHLAAVASALWRHFFSFLKSQRMSQVVPFSQLADAAADFTLLAMDMPSTAPSDFQPQPVISIIQLFGWDDIICPQVVARYLSHVLQNSTLCEALSHSGYVSFQALTVRSWIRCVLQMYIKNLSGPDDLLIDKNLEEAVEKEYMKQLVKLTRLLFNLSEVKSIFSKAQVEYLSISEDPKKALVRFFEAVGVTYGNVQTLSDKSAMVTKSLEYLGEVLKYIKPYLGKKVFSAGLQLTYGMMGILVKSWAQIFATSKAQKLLFRIIDCLLLPHAVLQQEKELPAPMLSAIQKSLPLYLQGMCIVCCQSQNPNAYLNQLLGNVIEQYIGRFLPASPYVSDLGQHPVLLALRNTATIPPISSLKKCIVQVIRKSYLEYKGSSPPPRLASILAFILQLFKETNTDIYEVELLLPGILKCLVLVSEPQVKRLATENLQYMVKACQVGSEEEPSSQLTSVFRQFIQDYGMRYYYQVYSILETVATLDQQVVIHLISTLTQSLKDSEQKWGLGRNIAQREAYSKLLSHLGQMGQDEMQRLENDNT

SEQ ID NO: 34303 - protein, 972 aa, Artificial Sequence
  Synthetic polypeptide
PEQVVYGHQFMNLASDNLTNISLFEEHCETLLCDLISLSLNRYDKVRSSESLMSDQCPCLCIKELWVLLIHLLDHRSKWFVSESFWNWLNKLLKTLLEKSSDRRRSSMPVIQSRDPLGFSWWIITHVASFYKFDRHGVPDEMRKVESNWNFVEELLKKSISVQNSSFSISWLPFKGLANTMKSPLSMLEMVKTCCCDKQDQELYKSSSSYTIFLCILAKVVKKAMKSNGPHPWKQVKGRIYSKFHQKRMEELTEVGLQNFFSLFLLLAAVAEVEDVASHVLDLLNFLKPAFVTSQRALIWKGHMAFLLMYAQKNLDIGVLAEKFSCAFREKAKEFLVSKNEEMVQRQTIWTLLSIYIDGVQEVFETSYCLYPSHEKLLNDGFSMLLRACRESELRTVLSFLQAVLARIRSMHQQLCQELQRDNVDLFVQSSLSAKERHLAAVASALWRHFFSFLKSQRMSQVVPFSQLADAAADFTLLAMDMPSTAPSDFQPQPVISIIQLFGWDDIICPQVVARYLSHVLQNSTLCEALSHSGYVSFQALTVRSWIRCVLQMYIKNLSGPDDLLIDKNLEEAVEKEYMKQLVKLTRLLFNLSEVKSIFSKAQVEYLSISEDPKKALVRFFEAVGVTYGNVQTLSDKSAMVTKSLEYLGEVLKYIKPYLGKKVFSAGLQLTYGMMGILVKSWAQIFATSKAQKLLFRIIDCLLLPHAVLQQEKELPAPMLSAIQKSLPLYLQGMCIVCCQSQNPNAYLNQLLGNVIEQYIGRFLPASPYVSDLGQHPVLLALRNTATIPPISSLKKCIVQVIRKSYLEYKGSSPPPRLASILAFILQLFKETNTDIYEVELLLPGILKCLVLVSEPQVKRLATENLQYMVKACQVGSEEEPSSQLTSVFRQFIQDYGMRYYYQVYSILETVATLDQQVVIHLISTLTQSLKDSEQKWGLGRNIAQREAYSKLLSHLGQMGQDEMQRLENDNT

SEQ ID NO: 34304 - protein, 165 aa, Artificial Sequence
  Synthetic polypeptide
PEQVVYGHQFMNLASDNLTNISLFEEHCETLLCDLISLSLNRYDKSFWNWLNKLLKTLLEKSSDRRRSSMPVIQSRDPLGFSWWIITHVASFYKFDRHGVPDEMRKVESNWNFVEELLKKSISVQGVILEEQLRMYLHCCLTLCDFWEPNIAIVTILWEYYSKNL

SEQ ID NO: 34305 - protein, 48 aa, Artificial Sequence
  Synthetic polypeptide
GQAQWLTPVIPALWEAKAGGSPEVKSLRPACPTRMQVWEIKFSTVSMA

SEQ ID NO: 34306 - protein, 12 aa, Artificial Sequence
  Synthetic polypeptide
DQPVQQECKCGR

SEQ ID NO: 34307 - protein, 105 aa, Artificial Sequence
  Synthetic polypeptide
GQEFETSLSNKNASVGDKVLYGLYGIVEHSGSMREGHYTAYVKVRTPSRKLSEHNTKKKNVPGLKAADNESAGQWVHVSDTYLQVVPESRALSAQAYLLFYERVL

SEQ ID NO: 34308 - protein, 22 aa, Artificial Sequence
  Synthetic polypeptide
VLQRLLQINRLLKRVLHMEKKV

SEQ ID NO: 34309 - protein, 21 aa, Artificial Sequence
  Synthetic polypeptide
RECCIWKRRCENELHRSDLYW

SEQ ID NO: 34310 - protein, 496 aa, Artificial Sequence
  Synthetic polypeptide
TKCLSAPKTPANKPFIEESAAYGKEGVKMNFIDRIFIGELTSTVMCEECANISTVKDPFIDISLPIIEERVSKPLLWGRMNKYRSLRETDHDRYSGNVTIENIHQPRAAKKHSSSKDKSQLIHDRKCIRKLSSGETVTYQKNENLEMNGDSLMFASLMNSESRLNESPTDDSEKEASHSESNVDADSEPSESESASKQTGLFRSSSGSGVQPDGPLYPLSAGKLLYTKETDSGDKEMAEAISELRLSSTVTGDQDFDRENQPLNISNNLCFLEGKHLRSYSPQNAFQTLSQSYITTSKECSIQSCLYQFTSMELLMGNNKLLCENCTKNKQKYQEETSFAEKKVEGVYTNARKQLLISAVPAVLILHLKRFHQAGLSLRKVNRHVDFPLMLDLAPFCSATCKNASVGDKVLYGLYGIVEHSGSMREGHYTAYVKVRTPSRKLSEHNTKKKNVPGLKAADNESAGQWVHVSDTYLQVVPESRALSAQAYLLFYERVL

SEQ ID NO: 34311 - protein, 448 aa, Artificial Sequence
  Synthetic polypeptide
TKCLSAPKTPANKPFIEESAAYGKEGVKMNFIDRIFIGELTSTVMCEECANISTVKDPFIDISLPIIEERSQLIHDRKCIRKLSSGETVTYQKNENLEMNGDSLMFASLMNSESRLNESPTDDSEKEASHSESNVDADSEPSESESASKQTGLFRSSSGSGVQPDGPLYPLSAGKLLYTKETDSGDKEMAEAISELRLSSTVTGDQDFDRENQPLNISNNLCFLEGKHLRSYSPQNAFQTLSQSYITTSKECSIQSCLYQFTSMELLMGNNKLLCENCTKNKQKYQEETSFAEKKVEGVYTNARKQLLISAVPAVLILHLKRFHQAGLSLRKVNRHVDFPLMLDLAPFCSATCKNASVGDKVLYGLYGIVEHSGSMREGHYTAYVKVRTPSRKLSEHNTKKKNVPGLKAADNESAGQWVHVSDTYLQVVPESRALSAQAYLLFYERVL

SEQ ID NO: 34312 - protein, 119 aa, Artificial Sequence
  Synthetic polypeptide
TKCLSAPKTPANKPFIEESAAYGKEGVKMNFIDRIFIGELTSTVMCEECANISTVKDPFIDISLPIIEERVSKPLLWGRMNKYRSLRETDHDRYSGNVTIENIHQPRAAKKHSSSKDKR

SEQ ID NO: 34313 - protein, 504 aa, Artificial Sequence
  Synthetic polypeptide
QRIQASILKAFNNPTTKTADDETRKKVKAYGKEGVKMNFIDRIFIGELTSTVMCEECANISTVKDPFIDISLPIIEERVSKPLLWGRMNKYRSLRETDHDRYSGNVTIENIHQPRAAKKHSSSKDKSQLIHDRKCIRKLSSGETVTYQKNENLEMNGDSLMFASLMNSESRLNESPTDDSEKEASHSESNVDADSEPSESESASKQTGLFRSSSGSGVQPDGPLYPLSAGKLLYTKETDSGDKEMAEAISELRLSSTVTGDQDFDRENQPLNISNNLCFLEGKHLRSYSPQNAFQTLSQSYITTSKECSIQSCLYQFTSMELLMGNNKLLCENCTKNKQKYQEETSFAEKKVEGVYTNARKQLLISAVPAVLILHLKRFHQAGLSLRKVNRHVDFPLMLDLAPFCSATCKNASVGDKVLYGLYGIVEHSGSMREGHYTAYVKVRTPSRKLSEHNTKKKNVPGLKAADNESAGQWVHVSDTYLQVVPESRALSAQAYLLFYERVL

SEQ ID NO: 34314 - protein, 456 aa, Artificial Sequence
  Synthetic polypeptide
QRIQASILKAFNNPTTKTADDETRKKVKAYGKEGVKMNFIDRIFIGELTSTVMCEECANISTVKDPFIDISLPIIEERSQLIHDRKCIRKLSSGETVTYQKNENLEMNGDSLMFASLMNSESRLNESPTDDSEKEASHSESNVDADSEPSESESASKQTGLFRSSSGSGVQPDGPLYPLSAGKLLYTKETDSGDKEMAEAISELRLSSTVTGDQDFDRENQPLNISNNLCFLEGKHLRSYSPQNAFQTLSQSYITTSKECSIQSCLYQFTSMELLMGNNKLLCENCTKNKQKYQEETSFAEKKVEGVYTNARKQLLISAVPAVLILHLKRFHQAGLSLRKVNRHVDFPLMLDLAPFCSATCKNASVGDKVLYGLYGIVEHSGSMREGHYTAYVKVRTPSRKLSEHNTKKKNVPGLKAADNESAGQWVHVSDTYLQVVPESRALSAQAYLLFYERVL

SEQ ID NO: 34315 - protein, 35 aa, Artificial Sequence
  Synthetic polypeptide
QRIQASILKAFNNPTTKTADDETRKKVKDVTRQNV

SEQ ID NO: 34316 - protein, 127 aa, Artificial Sequence
  Synthetic polypeptide
QRIQASILKAFNNPTTKTADDETRKKVKAYGKEGVKMNFIDRIFIGELTSTVMCEECANISTVKDPFIDISLPIIEERVSKPLLWGRMNKYRSLRETDHDRYSGNVTIENIHQPRAAKKHSSSKDKR

SEQ ID NO: 34317 - protein, 37 aa, Artificial Sequence
  Synthetic polypeptide
QRIQASILKAFNNPTTKTADDETRKKVKDLHGERSIH

SEQ ID NO: 34318 - protein, 18 aa, Artificial Sequence
  Synthetic polypeptide
MEPLHSSLGDKLHLLRRE

SEQ ID NO: 34319 - protein, 242 aa, Artificial Sequence
  Synthetic polypeptide
SQQLAGLRQEDYLNPEGQGCSKPRWSHCTQAWETNSISSEGNELLVQFVSDLSVTADGFSASYKTLPRGTAKEGQGPGPKRGTEPKVKLPPKSQPPEKTEESPSAPDAPTCPKQCRRTGTLQSNFCASSLVVTATVKSMVREPGEGLAVTVSLIGAYKTGGLDLPSPPTGASLKFYVPCKQCPPMKKGVSYLLMGQVEENRGPVLPPESFVVLHRPNQDQILTNLSKRKCPSQPVRAAASQD

SEQ ID NO: 34320 - protein, 118 aa, Artificial Sequence
  Synthetic polypeptide
TQKVKAAVSLDGATALKPGRQTPSPPKGMNSSSSSSQISVSPLMASQPPTRPCRGALPKKGKGPAPNGELSLKSSCPPSPNLRRKQRNLLQPLMHPPAQSSAAGQAPCRATSVPAALW

SEQ ID NO: 34321 - protein, 1910 aa, Artificial Sequence
  Synthetic polypeptide
EQPGQHNVLTQCDFEDDAKPLCDWSQVSADDEDWVRASGPSPTGSTGAPGGYPNGEGSYLHMESNSFHRGGVARLLSPDLWEQGPLCVHFAHHMFGLSWGAQLRLLLLSGEEGRRPDVLWKHWNTQRPSWMLTTVTVPAGFTLPTRLMFEGTRGSTAYLDIALDALSIRRGSCNRVCMMQTCSFDIPNDLCDWTWIPTASGAKWTQKKGSSGKPGVGPDGDFSSPGSGCYMLLDPKNARPGQKAVLLSPVSLSSGCLSFSFHYILRGQSPGAALHIYASVLGSIRKHTLFSGQPGPNWQAVSVNYTAVGRIQFAVVGVFGKTPEPAVAVDATSIAPCGEGFPQCDFEDNAHPFCDWVQTSGDGGHWALGHKNGPVHGMGPAGGFPNAGGHYIYLEADEFSQAGQSVRLVSRPFCAPGDICVEFAYHMYGLGEGTMLELLLGSPAGSPPIPLWKRVGSQRPYWQNTSVTVPSGHQQPMQLIFKGIQGSNTASVVAMGFILINPGTCPVKVLPELPPVSPVSSTGPSETTGLTENPTISTKKPTVSIEKPSVTTEKPTVPKEKPTIPTEKPTISTEKPTIPSEKPNMPSEKPTIPSEKPTILTEKPTIPSEKPTIPSEKPTISTEKPTVPTEEPTTPTEETTTSMEEPVIPTEKPSIPTEKPSIPTEKPTISMEETIISTEKPTISPEKPTIPTEKPTIPTEKSTISPEKPTTPTEKPTIPTEKPTISPEKPTTPTEKPTISPEKLTIPTEKPTIPTEKPTIPTEKPTISTEEPTTPTEETTISTEKPSIPMEKPTLPTEETTTSVEETTISTEKLTIPMEKPTISTEKPTIPTEKPTISPEKLTIPTEKLTIPTEKPTIPIEETTISTEKLTIPTEKPTISPEKPTISTEKPTIPTEKPTIPTEETTISTEKLTIPTEKPTISPEKLTIPTEKPTISTEKPTIPTEKLTIPTEKPTIPTEKPTIPTEKLTALRPPHPSPTATGLAALVMSPHAPSTPMTSVILGTTTTSRSSTERCPPNARYESCACPASCKSPRPSCGPLCREGCVCNPGFLFSDNHCIQASSCNCFYNNDYYEPGAEWFSPNCTEHCRCWPGSRVECQISQCGTHTVCQLKNGQYGCHPYAGTATCLVYGDPHYVTFDGRHFGFMGKCTYILAQPCGNSTDPFFRVTAKNEEQGQEGVSCLSKVYVTLPESTVTLLKGRRTLVGGQQVTLPAIPSKGVFLGASGRFVELQTEFGLRVRWDGDQQLYVTVSSTYSGKLCGLCGNYDGNSDNDHLKLDGSPAGDKEELGNSWQTDQDEDQECQKYQVVNSPSCDSSLQSSMSGPGFCGRLVDTHGPFETCLLHVKAASFFDSCMLDMCGFQGLQHLLCTHMSTMTTTCQDAGHAVKPWREPHFCPMACPPNSKYSLCAKPCPDTCHSGFSGMFCSDRCVEACECNPGFVLSGLECIPRSQCGCLHPAGSYFKVGERWYKPGCKELCVCESNNRIRCQPWRCRAQEFCGQQDGIYGCHAQGAATCTASGDPHYLTFDGALHHFMGTCTYVLTRPCWSRSQDSYFVVSATNENRGGILEVSYIKAVHVTVFDLSISLLRGCKVMLNGHRVALPVWLAQGRVTIRLSSNLVLLYTNFGLQVRYDGSHLVEVTVPSSYGGQLCGLCGNYNNNSLDDNLRPDRKLAGDSMQLGAAWKLPESSEPGCFLVGGKPSSCQENSMADAWNKNCAILINPQGPFSQCHQVVPPQSSFASCVHGQCGTKGDTTALCRSLQAYASLCAQAGQAPAWRNRTFCPMRCPPGSSYSPCSSPCPDTCSSINNPRDCPKALPCAESCECQKGHILSGTSCVPLGQCGCTDPAGSYHPVGERWYTENTCTRLCTCSVHNNITCFQSTCKPNQICWALDGLLRFGPQVWECVSSQGSPTT

SEQ ID NO: 34322 - protein, 151 aa, Artificial Sequence
  Synthetic polypeptide
GQEFESSLGNIMSSPSVILRMTPNPSVTGPKCPQTMKTGFEPVGPLPPAPPGPPGGTLTERAAICIWNRTASTVGEWPACSAPTYGSKAPSVCTLPTTCSGCLGAPSSGCCCSRVKRAAAPMCSGNTGTPRDPPGCSPPSLCPQGSPCPPG

SEQ ID NO: 34323 - protein, 2594 aa, Artificial Sequence
  Synthetic polypeptide
EQPGQHNVLTQCDFEDDAKPLCDWSQVSADDEDWVRASGPSPTGSTGAPGGYPNGEGSYLHMESNSFHRGGVARLLSPDLWEQGPLCVHFAHHMFGLSWGAQLRLLLLSGEEGRRPDVLWKHWNTQRPSWMLTTVTVPAGFTLPTRLMFEGTRGSTAYLDIALDALSIRRGSCNRVCMMQTCSFDIPNDLCDWTWIPTASGAKWTQKKGSSGKPGVGPDGDFSSPGSGCYMLLDPKNARPGQKAVLLSPVSLSSGCLSFSFHYILRGQSPGAALHIYASVLGSIRKHTLFSGQPGPNWQAVSVNYTAVGRIQFAVVGVFGKTPEPAVAVDATSIAPCGEGFPQCDFEDNAHPFCDWVQTSGDGGHWALGHKNGPVHGMGPAGGFPNAGGHYIYLEADEFSQAGQSVRLVSRPFCAPGDICVEFAYHMYGLGEGTMLELLLGSPAGSPPIPLWKRVGSQRPYWQNTSVTVPSGHQQPMQLIFKGIQGSNTASVVAMGFILINPGTCPVKVLPELPPVSPVSSTGPSETTGLTENPTISTKKPTVSIEKPSVTTEKPTVPKEKPTIPTEKPTISTEKPTIPSEKPNMPSEKPTIPSEKPTILTEKPTIPSEKPTIPSEKPTISTEKPTVPTEEPTTPTEETTTSMEEPVIPTEKPSIPTEKPSIPTEKPTISMEETIISTEKPTISPEKPTIPTEKPTIPTEKSTISPEKPTTPTEKPTIPTEKPTISPEKPTTPTEKPTISPEKLTIPTEKPTIPTEKPTIPTEKPTISTEEPTTPTEETTISTEKPSIPMEKPTLPTEETTTSVEETTISTEKLTIPMEKPTISTEKPTIPTEKPTISPEKLTIPTEKLTIPTEKPTIPIEETTISTEKLTIPTEKPTISPEKPTISTEKPTIPTEKPTIPTEETTISTEKLTIPTEKPTISPEKLTIPTEKPTISTEKPTIPTEKLTIPTEKPTIPTEKPTIPTEKLTALRPPHPSPTATGLAALVMSPHAPSTPMTSVILGTTTTSRSSTERCPPNARYESCACPASCKSPRPSCGPLCREGCVCNPGFLFSDNHCIQASSCNCFYNNDYYEPGAEWFSPNCTEHCRCWPGSRVECQISQCGTHTVCQLKNGQYGCHPYAGTATCLVYGDPHYVTFDGRHFGFMGKCTYILAQPCGNSTDPFFRVTAKNEEQGQEGVSCLSKVYVTLPESTVTLLKGRRTLVGGQQVTLPAIPSKGVFLGASGRFVELQTEFGLRVRWDGDQQLYVTVSSTYSGKLCGLCGNYDGNSDNDHLKLDGSPAGDKEELGNSWQTDQDEDQECQKYQVVNSPSCDSSLQSSMSGPGFCGRLVDTHGPFETCLLHVKAASFFDSCMLDMCGFQGLQHLLCTHMSTMTTTCQDAGHAVKPWREPHFCPMACPPNSKYSLCAKPCPDTCHSGFSGMFCSDRCVEACECNPGFVLSGLECIPRSQCGCLHPAGSYFKVGERWYKPGCKELCVCESNNRIRCQPWRCRAQEFCGQQDGIYGCHAQGAATCTASGDPHYLTFDGALHHFMGTCTYVLTRPCWSRSQDSYFVVSATNENRGGILEVSYIKAVHVTVFDLSISLLRGCKVMLNGHRVALPVWLAQGRVTIRLSSNLVLLYTNFGLQVRYDGSHLVEVTVPSSYGGQLCGLCGNYNNNSLDDNLRPDRKLAGDSMQLGAAWKLPESSEPGCFLVGGKPSSCQENSMADAWNKNCAILINPQGPFSQCHQVVPPQSSFASCVHGQCGTKGDTTALCRSLQAYASLCAQAGQAPAWRNRTFCPMRCPPGSSYSPCSSPCPDTCSSINNPRDCPKALPCAESCECQKGHILSGTSCVPLGQCGCTDPAGSYHPVGERWYTENTCTRLCTCSVHNNITCFQSTCKPNQICWALDGLLRRASGVGVCQLPGESHYVSFDGSNHSIPDACTLVLVKVCHPAMALPFFKISAKHEKEEGGTEAFRLHEVYIDIYDAQVTLQKGHRVLINSKQVTLPAISQIPGVSVKSSSIYSIVNIKIGVQVKFDGNHLLEIEIPTTYYGKVCGMCGNFNDEEEDELMMPSDEVANSDSEFVNSWKDKDIDPSCQSLLVDEQQIPAEQQENPSGNCRAADLRRAREKCEAALRAPVWAQCASRIDLTPFLVDCANTLCEFGGLYQALCQALQAFGATCQSQGLKPPLWRNSSFCPLECPAYSSYTNCLPSCSPSCWDLDGRCEGAKVPSACAEGCICQPGYVLSEDKCVPRSQCGCKDAHGGSIPLGKSWVSSGCTEKCVCTGGAIQCGDFRCPSGSHCQLTSDNSNSNCVSDKSEQCSVYGDPRYLTFDGFSYRLQGRMTYVLIKTVDVLPEGVEPLLVEGRNKMDPPRSSIFLQEVITTVYGYKVQLQAGLELVVNNQKMAVPYRPNEHLRVTLWGQRLYLVTDFELVVSFGGRKNAVISLPSMYEGLVSGLCGNYDKNRKNDMMLPSGALTQNLNTFGNSWEVKTEDALLRFPRAIPAEEEGQGAELGLRTGLQVSECSPEQLASNSTQACRVLADPQGPFAACHQTVAPEPFQEHCVLDLCSAQDPREQEELRCQVLSGYAILCQEAGAALAGWRDRTLCAGQQLSD

SEQ ID NO: 34324 - protein, 2659 aa, Artificial Sequence
  Synthetic polypeptide
EQPGQHNVLTQCDFEDDAKPLCDWSQVSADDEDWVRASGPSPTGSTGAPGGYPNGEGSYLHMESNSFHRGGVARLLSPDLWEQGPLCVHFAHHMFGLSWGAQLRLLLLSGEEGRRPDVLWKHWNTQRPSWMLTTVTVPAGFTLPTRLMFEGTRGSTAYLDIALDALSIRRGSCNRVCMMQTCSFDIPNDLCDWTWIPTASGAKWTQKKGSSGKPGVGPDGDFSSPGSGCYMLLDPKNARPGQKAVLLSPVSLSSGCLSFSFHYILRGQSPGAALHIYASVLGSIRKHTLFSGQPGPNWQAVSVNYTAVGRIQFAVVGVFGKTPEPAVAVDATSIAPCGEGFPQCDFEDNAHPFCDWVQTSGDGGHWALGHKNGPVHGMGPAGGFPNAGGHYIYLEADEFSQAGQSVRLVSRPFCAPGDICVEFAYHMYGLGEGTMLELLLGSPAGSPPIPLWKRVGSQRPYWQNTSVTVPSGHQQPMQLIFKGIQGSNTASVVAMGFILINPGTCPVKVLPELPPVSPVSSTGPSETTGLTENPTISTKKPTVSIEKPSVTTEKPTVPKEKPTIPTEKPTISTEKPTIPSEKPNMPSEKPTIPSEKPTILTEKPTIPSEKPTIPSEKPTISTEKPTVPTEEPTTPTEETTTSMEEPVIPTEKPSIPTEKPSIPTEKPTISMEETIISTEKPTISPEKPTIPTEKPTIPTEKSTISPEKPTTPTEKPTIPTEKPTISPEKPTTPTEKPTISPEKLTIPTEKPTIPTEKPTIPTEKPTISTEEPTTPTEETTISTEKPSIPMEKPTLPTEETTTSVEETTISTEKLTIPMEKPTISTEKPTIPTEKPTISPEKLTIPTEKLTIPTEKPTIPIEETTISTEKLTIPTEKPTISPEKPTISTEKPTIPTEKPTIPTEETTISTEKLTIPTEKPTISPEKLTIPTEKPTISTEKPTIPTEKLTIPTEKPTIPTEKPTIPTEKLTALRPPHPSPTATGLAALVMSPHAPSTPMTSVILGTTTTSRSSTERCPPNARYESCACPASCKSPRPSCGPLCREGCVCNPGFLFSDNHCIQASSCNCFYNNDYYEPGAEWFSPNCTEHCRCWPGSRVECQISQCGTHTVCQLKNGQYGCHPYAGTATCLVYGDPHYVTFDGRHFGFMGKCTYILAQPCGNSTDPFFRVTAKNEEQGQEGVSCLSKVYVTLPESTVTLLKGRRTLVGGQQVTLPAIPSKGVFLGASGRFVELQTEFGLRVRWDGDQQLYVTVSSTYSGKLCGLCGNYDGNSDNDHLKLDGSPAGDKEELGNSWQTDQDEDQECQKYQVVNSPSCDSSLQSSMSGPGFCGRLVDTHGPFETCLLHVKAASFFDSCMLDMCGFQGLQHLLCTHMSTMTTTCQDAGHAVKPWREPHFCPMACPPNSKYSLCAKPCPDTCHSGFSGMFCSDRCVEACECNPGFVLSGLECIPRSQCGCLHPAGSYFKVGERWYKPGCKELCVCESNNRIRCQPWRCRAQEFCGQQDGIYGCHAQGAATCTASGDPHYLTFDGALHHFMGTCTYVLTRPCWSRSQDSYFVVSATNENRGGILEVSYIKAVHVTVFDLSISLLRGCKVMLNGHRVALPVWLAQGRVTIRLSSNLVLLYTNFGLQVRYDGSHLVEVTVPSSYGGQLCGLCGNYNNNSLDDNLRPDRKLAGDSMQLGAAWKLPESSEPGCFLVGGKPSSCQENSMADAWNKNCAILINPQGPFSQCHQVVPPQSSFASCVHGQCGTKGDTTALCRSLQAYASLCAQAGQAPAWRNRTFCPMRCPPGSSYSPCSSPCPDTCSSINNPRDCPKALPCAESCECQKGHILSGTSCVPLGQCGCTDPAGSYHPVGERWYTENTCTRLCTCSVHNNITCFQSTCKPNQICWALDGLLRRASGVGVCQLPGESHYVSFDGSNHSIPDACTLVLVKVCHPAMALPFFKISAKHEKEEGGTEAFRLHEVYIDIYDAQVTLQKGHRVLINSKQVTLPAISQIPGVSVKSSSIYSIVNIKIGVQVKFDGNHLLEIEIPTTYYGKVCGMCGNFNDEEEDELMMPSDEVANSDSEFVNSWKDKDIDPSCQSLLVDEQQIPAEQQENPSGNCRAADLRRAREKCEAALRAPVWAQCASRIDLTPFLVDCANTLCEFGGLYQALCQALQAFGATCQSQGLKPPLWRNSSFCPLECPAYSSYTNCLPSCSPSCWDLDGRCEGAKVPSACAEGCICQPGYVLSEDKCVPRSQCGCKDAHGGSIPLGKSWVSSGCTEKCVCTGGAIQCGDFRCPSGSHCQLTSDNSNSNCVSDKSEQCSVYGDPRYLTFDGFSYRLQGRMTYVLIKTVDVLPEGVEPLLVEGRNKMDPPRSSIFLQEVITTVYGYKVQLQAGLELVVNNQKMAVPYRPNEHLRVTLWGQRLYLVTDFELVVSFGGRKNAVISLPSMYEGLVSGLCGNYDKNRKNDMMLPSGALTQNLNTFGNSWEVKTEDALLRFPRAIPAEEEGQGAELGLRTGLQVSECSPEQLASNSTQACRVLADPQGPFAACHQTVAPEPFQEHCVLDLCSAQDPREQEELRCQVLSGYAILCQEAGAALAGWRDRTLCAMECPAGTIYQSCMTPCPASCANLADPGDCEGPCVEGCASIPGYAYSGTQSLPWLTVAAPAMASTTSWAAAF

SEQ ID NO: 34325 - protein, 2691 aa, Artificial Sequence
  Synthetic polypeptide
EQPGQHNVLTQCDFEDDAKPLCDWSQVSADDEDWVRASGPSPTGSTGAPGGYPNGEGSYLHMESNSFHRGGVARLLSPDLWEQGPLCVHFAHHMFGLSWGAQLRLLLLSGEEGRRPDVLWKHWNTQRPSWMLTTVTVPAGFTLPTRLMFEGTRGSTAYLDIALDALSIRRGSCNRVCMMQTCSFDIPNDLCDWTWIPTASGAKWTQKKGSSGKPGVGPDGDFSSPGSGCYMLLDPKNARPGQKAVLLSPVSLSSGCLSFSFHYILRGQSPGAALHIYASVLGSIRKHTLFSGQPGPNWQAVSVNYTAVGRIQFAVVGVFGKTPEPAVAVDATSIAPCGEGFPQCDFEDNAHPFCDWVQTSGDGGHWALGHKNGPVHGMGPAGGFPNAGGHYIYLEADEFSQAGQSVRLVSRPFCAPGDICVEFAYHMYGLGEGTMLELLLGSPAGSPPIPLWKRVGSQRPYWQNTSVTVPSGHQQPMQLIFKGIQGSNTASVVAMGFILINPGTCPVKVLPELPPVSPVSSTGPSETTGLTENPTISTKKPTVSIEKPSVTTEKPTVPKEKPTIPTEKPTISTEKPTIPSEKPNMPSEKPTIPSEKPTILTEKPTIPSEKPTIPSEKPTISTEKPTVPTEEPTTPTEETTTSMEEPVIPTEKPSIPTEKPSIPTEKPTISMEETIISTEKPTISPEKPTIPTEKPTIPTEKSTISPEKPTTPTEKPTIPTEKPTISPEKPTTPTEKPTISPEKLTIPTEKPTIPTEKPTIPTEKPTISTEEPTTPTEETTISTEKPSIPMEKPTLPTEETTTSVEETTISTEKLTIPMEKPTISTEKPTIPTEKPTISPEKLTIPTEKLTIPTEKPTIPIEETTISTEKLTIPTEKPTISPEKPTISTEKPTIPTEKPTIPTEETTISTEKLTIPTEKPTISPEKLTIPTEKPTISTEKPTIPTEKLTIPTEKPTIPTEKPTIPTEKLTALRPPHPSPTATGLAALVMSPHAPSTPMTSVILGTTTTSRSSTERCPPNARYESCACPASCKSPRPSCGPLCREGCVCNPGFLFSDNHCIQASSCNCFYNNDYYEPGAEWFSPNCTEHCRCWPGSRVECQISQCGTHTVCQLKNGQYGCHPYAGTATCLVYGDPHYVTFDGRHFGFMGKCTYILAQPCGNSTDPFFRVTAKNEEQGQEGVSCLSKVYVTLPESTVTLLKGRRTLVGGQQVTLPAIPSKGVFLGASGRFVELQTEFGLRVRWDGDQQLYVTVSSTYSGKLCGLCGNYDGNSDNDHLKLDGSPAGDKEELGNSWQTDQDEDQECQKYQVVNSPSCDSSLQSSMSGPGFCGRLVDTHGPFETCLLHVKAASFFDSCMLDMCGFQGLQHLLCTHMSTMTTTCQDAGHAVKPWREPHFCPMACPPNSKYSLCAKPCPDTCHSGFSGMFCSDRCVEACECNPGFVLSGLECIPRSQCGCLHPAGSYFKVGERWYKPGCKELCVCESNNRIRCQPWRCRAQEFCGQQDGIYGCHAQGAATCTASGDPHYLTFDGALHHFMGTCTYVLTRPCWSRSQDSYFVVSATNENRGGILEVSYIKAVHVTVFDLSISLLRGCKVMLNGHRVALPVWLAQGRVTIRLSSNLVLLYTNFGLQVRYDGSHLVEVTVPSSYGGQLCGLCGNYNNNSLDDNLRPDRKLAGDSMQLGAAWKLPESSEPGCFLVGGKPSSCQENSMADAWNKNCAILINPQGPFSQCHQVVPPQSSFASCVHGQCGTKGDTTALCRSLQAYASLCAQAGQAPAWRNRTFCPMRCPPGSSYSPCSSPCPDTCSSINNPRDCPKALPCAESCECQKGHILSGTSCVPLGQCGCTDPAGSYHPVGERWYTENTCTRLCTCSVHNNITCFQSTCKPNQICWALDGLLRRASGVGVCQLPGESHYVSFDGSNHSIPDACTLVLVKVCHPAMALPFFKISAKHEKEEGGTEAFRLHEVYIDIYDAQVTLQKGHRVLINSKQVTLPAISQIPGVSVKSSSIYSIVNIKIGVQVKFDGNHLLEIEIPTTYYGKVCGMCGNFNDEEEDELMMPSDEVANSDSEFVNSWKDKDIDPSCQSLLVDEQQIPAEQQENPSGNCRAADLRRAREKCEAALRAPVWAQCASRIDLTPFLVDCANTLCEFGGLYQALCQALQAFGATCQSQGLKPPLWRNSSFCPLECPAYSSYTNCLPSCSPSCWDLDGRCEGAKVPSACAEGCICQPGYVLSEDKCVPRSQCGCKDAHGGSIPLGKSWVSSGCTEKCVCTGGAIQCGDFRCPSGSHCQLTSDNSNSNCVSDKSEQCSVYGDPRYLTFDGFSYRLQGRMTYVLIKTVDVLPEGVEPLLVEGRNKMDPPRSSIFLQEVITTVYGYKVQLQAGLELVVNNQKMAVPYRPNEHLRVTLWGQRLYLVTDFELVVSFGGRKNAVISLPSMYEGLVSGLCGNYDKNRKNDMMLPSGALTQNLNTFGNSWEVKTEDALLRFPRAIPAEEEGQGAELGLRTGLQVSECSPEQLASNSTQACRVLADPQGPFAACHQTVAPEPFQEHCVLDLCSAQDPREQEELRCQVLSGYAILCQEAGAALAGWRDRTLCESPCLQNPCQNDGQCREQGATFTCECEVGYGGGLCMEPRDAPPPRKPASNLVGVLLGLLVPVVVVLLAVTRECIYRTRRKREKTQEGDRLARLVDTDTVLDCAC

SEQ ID NO: 34326 - protein, 842 aa, Artificial Sequence
  Synthetic polypeptide
SQHFGRRREWDRGRERRSRGEYRDYDRNRRERFSPPRHELSPPQKRMRRDWDEHSSDPYHSGYEMPYAGGGGGPTYGPPQPWGHPDVHIMQHHVLPIQARLGSIAEIDLGVPPPVMKTFKEFLLSLDDSVDETEAVKRYNDYKLDFRRQQMQDFFLAHKDEEWFRSKYHPDEVGKRRQEARGALQNRLRVFLSLMETGWFDNLLLDIDKADAIVKMLDAAVIKMEGGTENDLRILEQEEEEEQAGKPGEPSKKEEGRAGAGLGDGERKTNDKDEKKEDGKQAENDSSNDDKTKKSEGDGDKEEKKEDSEKEAKKSSKKRNRKHSGDDSFDEGSVSESESESESGQAEEEKEEAEALKEKEKPKEEEWEKPKDAAGLECKPRPLHKTCSLFMRNIAPNISRAEIISLCKRYPGFMRVALSEPQPERRFFRRGWVTFDRSVNIKEICWNLQNIRLRECELSPGVNRDLTRRVRNINGITQHKQIVRNDIKLAAKLIHTLDDRTQLWASEPGTPPLPTSLPSQNPILKNITDYLIEEVSAEEEELLGSSGGAPPEEPPKEGNPAEINVERDEKLIKVLDKLLLYLRIVHSLDYYNTCEYPNEDEMPNRCGIIHVRGPMPPNRISHGEVLEWQKTFEEKLTPLLSVRESLSEEEAQKMGRKDPEQEVEKFVTSNTQELGKDKWLCPLSGKKFKGPEFVRKHIFNKHAEKIEEVKKEVAFFNNFLTDAKRPALPEIKPAQPPGPAQILPPGLTPGLPYPHQTPQGLMPYGQPRPPILGYGAGAVRPAVPTGGPPYPHAPYGAGRGNYDAFRGQGGYPGKPRNRMVRGDPRAIVEYRDLDAPDDVDFF

SEQ ID NO: 34327 - protein, 55 aa, Artificial Sequence
  Synthetic polypeptide
AGAVAHACNPNTLGGEESGTVAVSAVVGVNIGTMTGIGESASRHLATNSARHRSA

SEQ ID NO: 34328 - protein, 22 aa, Artificial Sequence
  Synthetic polypeptide
PAQWLMPVIPTLWEAKRVGPWP

SEQ ID NO: 34329 - protein, 839 aa, Artificial Sequence
  Synthetic polypeptide
SQHFGRRREWDRGRERRSRGEYRDYDRNRRERFSPPRHELSPPQKRMRRDWDEHSSDPYHSGYEMPYAGGGGGPTYGPPQPWGHPDVHIMQHHVLPIQARLGSIAEIDLGVPPPVMKTFKEFLLSLDDSVDETEAVKRYNDYKLDFRRQQMQDFFLAHKDEEWFRSKYHPDEVGKRRQEARGALQNRLRVFLSLMETGWFDNLLLDIDKADAIVKMLDAAVIKMEGGTENDLRILEQEEEEEQAGKPGEPSKKEEGRAGAGLGDGERKTNDKDEKKEDGKQAENDSSNDDKTKKSEGDGDKEEKKEDSEKEAKKSSKKRNRKHSGDDSFDEGSVSESESESESGQAEEEKEEAEEALKEKEKPKEEEWEKPKDAAGLECKPRPLHKTCSLFMRNIAPNISRAEIISLCKRYPGFMRVALSEPQPERRFFRRGWVTFDRSVNIKEICWNLQNIRLRECELSPGVNRDLTRRVRNINGITQHKQIVRNDIKLAAKLIHTLDDRTQLWASEPGTPPLPTSLPSQNPILKNITDYLIEEVSAEEEELLGSSGGAPPEEPPKEGNPAEINVERDEKLIKVLDKLLLYLRIVHSLDYYNTCEYPNEDEMPNRCGIIHVRGPMPPNRISHGEVLEWQKTFEEKLTPLLSVRESLSEEEAQKMGRKDPEQEVEKFVTSNTQELGKDKWLCPLSGKKFKGPEFVRKHIFNKHAEKIEEVKKEVAFFNNFLTDAKRPALPEIKPAQPPGPAQSLTPGLPYPHQTPQGLMPYGQPRPPILGYGAGAVRPAVPTGGPPYPHAPYGAGRGNYDAFRGQGGYPGKPRNRMVRGDPRAIVEYRDLDAPDDVDFF

SEQ ID NO: 34330 - protein, 838 aa, Artificial Sequence
  Synthetic polypeptide
SQHFGRRREWDRGRERRSRGEYRDYDRNRRERFSPPRHELSPPQKRMRRDWDEHSSDPYHSGYEMPYAGGGGGPTYGPPQPWGHPDVHIMQHHVLPIQARLGSIAEIDLGVPPPVMKTFKEFLLSLDDSVDETEAVKRYNDYKLDFRRQQMQDFFLAHKDEEWFRSKYHPDEVGKRRQEARGALQNRLRVFLSLMETGWFDNLLLDIDKADAIVKMLDAAVIKMEGGTENDLRILEQEEEEEQAGKPGEPSKKEEGRAGAGLGDGERKTNDKDEKKEDGKQAENDSSNDDKTKKSEGDGDKEEKKEDSEKEAKKSSKKRNRKHSGDDSFDEGSVSESESESESGQAEEEKEEAEALKEKEKPKEEEWEKPKDAAGLECKPRPLHKTCSLFMRNIAPNISRAEIISLCKRYPGFMRVALSEPQPERRFFRRGWVTFDRSVNIKEICWNLQNIRLRECELSPGVNRDLTRRVRNINGITQHKQIVRNDIKLAAKLIHTLDDRTQLWASEPGTPPLPTSLPSQNPILKNITDYLIEEVSAEEEELLGSSGGAPPEEPPKEGNPAEINVERDEKLIKVLDKLLLYLRIVHSLDYYNTCEYPNEDEMPNRCGIIHVRGPMPPNRISHGEVLEWQKTFEEKLTPLLSVRESLSEEEAQKMGRKDPEQEVEKFVTSNTQELGKDKWLCPLSGKKFKGPEFVRKHIFNKHAEKIEEVKKEVAFFNNFLTDAKRPALPEIKPAQPPGPAQSLTPGLPYPHQTPQGLMPYGQPRPPILGYGAGAVRPAVPTGGPPYPHAPYGAGRGNYDAFRGQGGYPGKPRNRMVRGDPRAIVEYRDLDAPDDVDFF

SEQ ID NO: 34331 - protein, 843 aa, Artificial Sequence
  Synthetic polypeptide
SQHFGRRREWDRGRERRSRGEYRDYDRNRRERFSPPRHELSPPQKRMRRDWDEHSSDPYHSGYEMPYAGGGGGPTYGPPQPWGHPDVHIMQHHVLPIQARLGSIAEIDLGVPPPVMKTFKEFLLSLDDSVDETEAVKRYNDYKLDFRRQQMQDFFLAHKDEEWFRSKYHPDEVGKRRQEARGALQNRLRVFLSLMETGWFDNLLLDIDKADAIVKMLDAAVIKMEGGTENDLRILEQEEEEEQAGKPGEPSKKEEGRAGAGLGDGERKTNDKDEKKEDGKQAENDSSNDDKTKKSEGDGDKEEKKEDSEKEAKKSSKKRNRKHSGDDSFDEGSVSESESESESGQAEEEKEEAEEALKEKEKPKEEEWEKPKDAAGLECKPRPLHKTCSLFMRNIAPNISRAEIISLCKRYPGFMRVALSEPQPERRFFRRGWVTFDRSVNIKEICWNLQNIRLRECELSPGVNRDLTRRVRNINGITQHKQIVRNDIKLAAKLIHTLDDRTQLWASEPGTPPLPTSLPSQNPILKNITDYLIEEVSAEEEELLGSSGGAPPEEPPKEGNPAEINVERDEKLIKVLDKLLLYLRIVHSLDYYNTCEYPNEDEMPNRCGIIHVRGPMPPNRISHGEVLEWQKTFEEKLTPLLSVRESLSEEEAQKMGRKDPEQEVEKFVTSNTQELGKDKWLCPLSGKKFKGPEFVRKHIFNKHAEKIEEVKKEVAFFNNFLTDAKRPALPEIKPAQPPGPAQILPPGLTPGLPYPHQTPQGLMPYGQPRPPILGYGAGAVRPAVPTGGPPYPHAPYGAGRGNYDAFRGQGGYPGKPRNRMVRGDPRAIVEYRDLDAPDDVDFF

SEQ ID NO: 34332 - protein, 72 aa, Artificial Sequence
  Synthetic polypeptide
SQHFGRRREWDRGRERRSRGEYRDYDRNRRERFSPPRHELSPPQKRMRRDWDEHSSDPYHSGYEMPYAGGGG

SEQ ID NO: 34333 - protein, 235 aa, Artificial Sequence
  Synthetic polypeptide
PGMISNLLGKGAVDQLTRLVLVNALYFNGQWKTPFPDSSTHRRLFHKSDGSTVSVPMMAQTNKFNYTEFTTPDGHYYDILELPYHGDTLSMFIAAPYEKEVPLSALTNILSAQLISHWKGNMTRLPRLLVLPKFSLETEVDLRKPLENLGMTDMFRQFQADFTSLSDQEPLHVAQALQKVKIEVNESGTVASSSTAVIVSARMAPEEIIMDRPFLFVVRHNPTGTVLFMGQVMEP

SEQ ID NO: 34334 - protein, 37 aa, Artificial Sequence
  Synthetic polypeptide
HFERPRRADCLSTGVRDQPGQHGETLSLSKIQKISQV

SEQ ID NO: 34335 - protein, 90 aa, Artificial Sequence
  Synthetic polypeptide
AQEFETSLANMVKPCLCQKYKKLARYDQQLAWERSRGPADTAGAGECPLLQRPVEDSLPRLQHPPPPLPQIRRQHCLCAHDGSDQQVQLY

SEQ ID NO: 34336 - protein, 28 aa, Artificial Sequence
  Synthetic polypeptide
GWVWWLMPVISAFGEAKAGGSLEVLPGD

SEQ ID NO: 34337 - protein, 116 aa, Artificial Sequence
  Synthetic polypeptide
SQHLGRPRRADHLRFSLETEVDLRKPLENLGMTDMFRQFQADFTSLSDQEPLHVAQALQKVKIEVNESGTVASSSTAVIVSARMAPEEIIMDRPFLFVVRHNPTGTVLFMGQVMEP

SEQ ID NO: 34338 - protein, 28 aa, Artificial Sequence
  Synthetic polypeptide
GKARWLTPVIPAFWEAEAGVRAGHHLQL

SEQ ID NO: 34339 - protein, 70 aa, Artificial Sequence
  Synthetic polypeptide
SQHFGKLRQVCELDIIFNFEKAYFILDEFLMGGDVQDTSKKSVLKAIEQADLLQEEDESPRSVLEEMGLA

SEQ ID NO: 34340 - protein, 22 aa, Artificial Sequence
  Synthetic polypeptide
GRCASWTSSSTLRRPTSSWMSF

SEQ ID NO: 34341 - protein, 61 aa, Artificial Sequence
  Synthetic polypeptide
SQHFGKLRQVCELDIIFNFEKAYFILDEFLMGGDVQDTSKKSVLKAIEQADLLQEEDESPR

SEQ ID NO: 34342 - protein, 131 aa, Artificial Sequence
  Synthetic polypeptide
VSLLAKRADTYLATMLLLQRPNEKMTMRRPTTQLCLKKWRPWCPCTPLGRMTSLDLRLLPQAPGSIGASSPSRSSWASLLASSGVAVSSQPPPGACCPLLCPSPLWWAAPSPSPSASTPPRRKSITITPST

SEQ ID NO: 34343 - protein, 23 aa, Artificial Sequence
  Synthetic polypeptide
EGPLHNCVSRNGVPGARVLLWGE

SEQ ID NO: 34344 - protein, 134 aa, Artificial Sequence
  Synthetic polypeptide
ENDYEKAHYTTVSQEMASLVPVYSFGENDIFRLKAFATGSWQHWCQLTFKKLMGFSPCIFWGRGLFSATSWGLLPFAVPITTVVGRPIPVPQRLHPTEEEVNHYHALYMTALEQLFEEHKESCGVPASTCLTFI

SEQ ID NO: 34345 - protein, 160 aa, Artificial Sequence
  Synthetic polypeptide
VSLLAKRADTYLATMLLLQRPNEKMTMRRPTTQLCLKKWRPWCPCTPLGRMTSLDLRLLPQAPGSIGASSPSRSSWASLLASSGVAVSSQPPPGACCPLLCPSPLWVSAHLRGDGHQQLRGHQGSLAHLSPSPCSGPPHPRPPAPPPHRGGSQSLSRPLH

SEQ ID NO: 34346 - protein, 137 aa, Artificial Sequence
  Synthetic polypeptide
ENDYEKAHYTTVSQEMASLVPVYSFGENDIFRLKAFATGSWQHWCQLTFKKLMGFSPCIFWGRGLFSATSWGLLPFAVPITTVGECPPPGGRPPAAAWASGIPRPPVSLSLQWAAPSPSPSASTPPRRKSITITPST

SEQ ID NO: 34347 - protein, 33 aa, Artificial Sequence
  Synthetic polypeptide
GWLQWLTLLMPPLWEAEGCVECTIHLPGLCDPG

SEQ ID NO: 34348 - protein, 244 aa, Artificial Sequence
  Synthetic polypeptide
CHHFGRLRGVWNVPYISQAYVIRGDTLRMELPQRDVFSGSDTDPDMAFCKSFRDKGIFLHLSNQHEFGRLLATSRYDTEHLHPDLWQIFDNPVDWKEQYIHENYSRALEGEGIVEQPCPDVYWFPLLSEQMCDELVAEMEHYGQWSGGRHEARAVMNFVVRYRPDEQPSLRPHHDSSTFTLNVALNHKGLDYEGGGCRFLRYDCVISSPRKGWALLHPGRLTHYHEGLPTTWGTRYIMVSFVDP

SEQ ID NO: 34349 - protein, 293 aa, Artificial Sequence
  Synthetic polypeptide
CHHFGRLRGVWNVPYISQAYVIRGDTLRMELPQRDVFSGSDTDPDMAFCKSFRDKGIFLHLSNQHEFGRLLATSRYDTEHLHPDLWQIFDNPVDWKEQYIHENYSRALEGEGIVEQPCPDVYWFPLLSEQMCDELVAEMEHYGQWSGGRHEDSRLAGGYENVPTVDIHMKQVGYEDQWLQLLRTYVGPMTESLFPGYHTKARAVMNFVVRYRPDEQPSLRPHHDSSTFTLNVALNHKGLDYEGGGCRFLRYDCVISSPRKGWALLHPGRLTHYHEGLPTTWGTRYIMVSFVDP

SEQ ID NO: 34350 - protein, 34 aa, Artificial Sequence
  Synthetic polypeptide
CHHFGRLRGVWNVPYISQAYVIRGDTLRMELPQR

SEQ ID NO: 34351 - protein, 124 aa, Artificial Sequence
  Synthetic polypeptide
FQHFGRPRFESCWPALMKDAHGVVIVFNADIPSHRKEMEMWYSCFVQQPSLQDTQCMLIAHHKPGSGDDKGSLSLSPPLNKLKLVHSNLEDDPEEIRMEFIKYLKSIINSMSESRDREEMSIMT

SEQ ID NO: 34352 - protein, 24 aa, Artificial Sequence
  Synthetic polypeptide
PGAVAHTCNSSTLGGQGLSPAGRP

SEQ ID NO: 34353 - protein, 17 aa, Artificial Sequence
  Synthetic polypeptide
QGRWLTPVIPALWEAKV

SEQ ID NO: 34354 - protein, 2 aa, Artificial Sequence
  Synthetic polypeptide
QR

SEQ ID NO: 34355 - protein, 46 aa, Artificial Sequence
  Synthetic polypeptide
VWWYASAVPATLKAETEELLEPGGRGCSEPGSRHCTAAWVTEVNLA

SEQ ID NO: 34356 - protein, 81 aa, Artificial Sequence
  Synthetic polypeptide
TRRQRLQRARITPLHCSLGDRGEPGVKGEEGEKAATAEGEGVQQLREALKILAERVLILEHMIGIHDPLASPEEVLARMLP

SEQ ID NO: 34357 - protein, 118 aa, Artificial Sequence
  Synthetic polypeptide
TRRQRLQRARITPLHCSLGDRGEPGVKGEEGEKAATAEGEGVQQLREALKILAERVLILEHMIGIHDPLASPEGSGQDAALRANLKMKRGGAQPDGVLAALLGPDPGQKSVDQASSRK

SEQ ID NO: 34358 - protein, 30 aa, Artificial Sequence
  Synthetic polypeptide
SMHLRGDLGHVHSETERTRCHRNGIGEPAG

SEQ ID NO: 34359 - protein, 694 aa, Artificial Sequence
  Synthetic polypeptide
AEWPLESHLVEVPAAQRAASFPDEACILEATLGTCTVRQRELDATATVLANRQDESEQSRKRLIEQSREFKKNTPEDLRKQVAPLLKSFQGEIDALSKRSKEAEAAFLNVYKRLIDVPDPVPALDLGQQLQLKVQRLHDIETENQKLRETLEEYNKEFAEVKNQEVTIKALKEKIREYEQTLKNQAETIALEKEQKLQNDFAEKERKLQETQMSTTSKLEEAEHKVQSLQTALEKTRTELFDLKTKYDEETTAKADEIEMIMTDLERANQRAEVAQREAETLREQLSSANHSLQLASQIQKAPDVAIEVLTRSSLEVELAAKEREIAQLVEDVQRLQASLTKLRENSASQISQLEQQLSAKNSTLKQLEEKLKGQADYEEVKKELNILKSMEFAPSEGAGTQDAAKPLEVLLLEKNRSLQSENAALRISNSDLSGRCAELQVRITEAVATATEQRELIARLEQDLSIIQSIQRPDAEGAAEHRLEKIPEPIKEATALFYGPAAPASGALPEGQVDSLLSIISSQRERFRARNQELEAENRLAQHTLQALQSELDSLRADNIKLFEKIKFLQSYPGRGSGSDDTELRYSSQYEERLDPFSSFSKRERQRKYLSLSPWDKATLSMGRLVLSNKMARTIGFFYTLFLHCLVFLVLYKLAWSESMERDCATFCAKKFADHLHKFHENDNGAAAGDLWQ

SEQ ID NO: 34360 - protein, 44 aa, Artificial Sequence
  Synthetic polypeptide
DRENSMPPQRYWRTGRMKVSSPESGLSNRAGSSRRTLQRICASR

SEQ ID NO: 34361 - protein, 696 aa, Artificial Sequence
  Synthetic polypeptide
AEWPLESHLVEVPAAQRAASFPDEACILEATLGTCTVRQRELDATATVLANRQDESEQSRKRLIEQSREFKKNTPEDLRKQVAPLLKSFQGEIDALSKRSKEAEAAFLNVYKRLIDVPDPVPALDLGQQLQLKVQRLHDIETENQKLRETLEEYNKEFAEVKNQEVTIKALKEKIREYEQTLKNQAETIALEKEQKLQNDFAEKERKLQETQMSTTSKLEEAEHKVQSLQTALEKTRTELFDLKTKYDEETTAKADEIEMIMTDLERANQRAEVAQREAETLREQLSSANHSLQLASQIQKAPDVEQAIEVLTRSSLEVELAAKEREIAQLVEDVQRLQASLTKLRENSASQISQLEQQLSAKNSTLKQLEEKLKGQADYEEVKKELNILKSMEFAPSEGAGTQDAAKPLEVLLLEKNRSLQSENAALRISNSDLSGRCAELQVRITEAVATATEQRELIARLEQDLSIIQSIQRPDAEGAAEHRLEKIPEPIKEATALFYGPAAPASGALPEGQVDSLLSIISSQRERFRARNQELEAENRLAQHTLQALQSELDSLRADNIKLFEKIKFLQSYPGRGSGSDDTELRYSSQYEERLDPFSSFSKRERQRKYLSLSPWDKATLSMGRLVLSNKMARTIGFFYTLFLHCLVFLVLYKLAWSESMERDCATFCAKKFADHLHKFHENDNGAAAGDLWQ

SEQ ID NO: 34362 - protein, 680 aa, Artificial Sequence
  Synthetic polypeptide
AEWPLESHLVEVPAAQRAASFPDEACILEATLGTCTVRQRELDATATVLANRQDESEQSRKRLIEQSREFKKNTPEIDALSKRSKEAEAAFLNVYKRLIDVPDPVPALDLGQQLQLKVQRLHDIETENQKLRETLEEYNKEFAEVKNQEVTIKALKEKIREYEQTLKNQAETIALEKEQKLQNDFAEKERKLQETQMSTTSKLEEAEHKVQSLQTALEKTRTELFDLKTKYDEETTAKADEIEMIMTDLERANQRAEVAQREAETLREQLSSANHSLQLASQIQKAPDVEQAIEVLTRSSLEVELAAKEREIAQLVEDVQRLQASLTKLRENSASQISQLEQQLSAKNSTLKQLEEKLKGQADYEEVKKELNILKSMEFAPSEGAGTQDAAKPLEVLLLEKNRSLQSENAALRISNSDLSGRCAELQVRITEAVATATEQRELIARLEQDLSIIQSIQRPDAEGAAEHRLEKIPEPIKEATALFYGPAAPASGALPEGQVDSLLSIISSQRERFRARNQELEAENRLAQHTLQALQSELDSLRADNIKLFEKIKFLQSYPGRGSGSDDTELRYSSQYEERLDPFSSFSKRERQRKYLSLSPWDKATLSMGRLVLSNKMARTIGFFYTLFLHCLVFLVLYKLAWSESMERDCATFCAKKFADHLHKFHENDNGAAAGDLWQ

SEQ ID NO: 34363 - protein, 42 aa, Artificial Sequence
  Synthetic polypeptide
DRENSMPPQRYWRTGRMKVSSPESGLSNRAGSSRRTLQRLMH

SEQ ID NO: 34364 - protein, 1534 aa, Artificial Sequence
  Synthetic polypeptide
AEWPLESHLVEVPAAQRAASFPDEACILEATLGTCTVRQRELDATATVLANRQDESEQSRKRLIEQSREFKKNTPEDLRKQVAPLLKSFQGEIDALSKRSKEAEAAFLNVYKRLIDVPDPVPALDLGQQLQLKVQRLHDIETENQKLRETLEEYNKEFAEVKNQEVTIKALKEKIREYEQTLKNQAETIALEKEQKLQNDFAEKERKLQETQMSTTSKLEEAEHKVQSLQTALEKTRTELFDLKTKYDEETTAKADEIEMIMTDLERANQRAEVAQREAETLREQLSSANHSLQLASQIQKAPDVEQAIEVLTRSSLEVELAAKEREIAQLVEDVQRLQASLTKLRENSASQISQLEQQLSAKNSTLKQLEEKLKGQADYEEVKKELNILKSMEFAPSEGAGTQDAAKPLEVLLLEKNRSLQSENAALRISNSDLSGSARRKGKDQPESRRPGSLPAPPPSQLPRNPGEQASNTNGTHQFSPAGLSQDFFSSSLASPSLPLASTGKFALNSLLQRQLMQSFYSKAMQEAGSTSMIFSTGPYSTNSISSQSPLQQSPDVNGMAPSPSQSESAGSVSEGEEMDTAEIARQVKEQLIKHNIGQRIFGHYVLGLSQGSVSEILARPKPWNKLTVRGKEPFHKMKQFLSDEQNILALRSIQGRQRENPGQSLNRLFQEVPKRRNGSEGNITTRIRASETGSDEAIKSILEQAKRELQVQKTAEPAQPSSASGSGNSDDAIRSILQQARREMEAQQAALDPALKQAPLSQSDITILTPKLLSTSPMPTVSSYPPLAISLKKPSAAPEAGASALPNPPALKKEAQDAPGLDPQGAADCAQGVLRQVKNEVGRSGAWKDHWWSAVQPERRNAASSEEAKAEETGGGKEKGSGGSGGGSQPRAERSQLQGPSSSEYWKEWPSAESPYSQSSELSLTGASRSETPQNSPLPSSPIVPMSKPTKPSVPPLTPEQYEVYMYQEVDTIELTRQVKEKLAKNGICQRIFGEKVLGLSQGSVSDMLSRPKPWSKLTQKGREPFIRMQLWLNGELGQGVLPVQGQQQGPVLHSVTSLQDPLQQGCVSSESTPKTSASCSPAPESPMSSSESVKSLTELVQQPCPPIEASKDSKPPEPSDPPASDSQPTTPLPLSGHSALSIQELVAMSPELDTYGITKRVKEVLTDNNLGQRLFGETILGLTQGSVSDLLARPKPWHKLSLKGREPFVRMQLWLNDPNNVEKLMDMKRMEKKAYMKRRHSSVSDSQPCEPPSVGTEYSQGASPQPQHQLKKPRVVLAPEEKEALKRAYQQKPYPSPKTIEDLATQLNLKTSTVINWFHNYRSRIRRELFIEEIQAGSQGQAGASDSPSARSGRAAPSSEGDSCDGVEATEGPGSADTEEPKSQGEAEREEVPRPAEQTEPPPSGTPGPDDARDDDHEGGPVEGPGPLPSPASATATAAPAAPEDAATSAAAAPGEGPAAPSSAPPPSNSSSSSAPRRPSSLQSLFGLPEAAGARDSRDNPLRKKKAANLNSIIHRLEKAASREEPIEWEF

SEQ ID NO: 34365 - protein, 650 aa, Artificial Sequence
  Synthetic polypeptide
AEWPLESHLVEVPAAQRAASFPDEACILEATLGTCTVRQRELDATATVLANRQDESEQSRKRLIEQSREFKKNTPEDLRKQVAPLLKSFQGEIDALSKRSKEAEAAFLNVYKRLIDVPEVTIKALKEKIREYEQTLKNQAETIALEKEQKLQNDFAEKERKLQETQMSTTSKLEEAEHKVQSLQTALEKTRTELFDLKTKYDEETTAKADEIEMIMTDLERANQRAEVAQREAETLREQLSSANHSLQLASQIQKAPDVEQAIEVLTRSSLEVELAAKEREIAQLVEDVQRLQASLTKLRENSASQISQLEQQLSAKNSTLKQLEEKLKGQADYEEVKKELNILKSMEFAPSEGAGTQDAAKPLEVLLLEKNRSLQSENAALRISNSDLSGRCAELQVRITEAVATATEQRELIARLEQDLSIIQSIQRPDAEGAAEHRLEKIPEPIKEATALFYGPAAPASGALPEGQVDSLLSIISSQRERFRARNQELEAENRLAQHTLQALQSELDSLRADNIKLFEKIKFLQSYPGRGSGSDDTELRYSSQYEERLDPFSSFSKRERQRKYLSLSPWDKATLSMGRLVLSNKMARTIGFFYTLFLHCLVFLVLYKLAWSESMERDCATFCAKKFADHLHKFHENDNGAAAGDLWQ

SEQ ID NO: 34366 - protein, 1432 aa, Artificial Sequence
  Synthetic polypeptide
AEWPLESHLVEVPAAQRAASFPDEACILEATLGTCTVRQRELDATATVLANRQDESEQSRKRLIEQSREFKKNTPEDLRKQVAPLLKSFQGEIDALSKRSKEAEAAFLNVYKRLIDVPDPVPALDLGQQLQLKVQRLHDIETENQKLRETLEEYNKEFAEVKNQEVTIKALKEKIREYEQTLKNQAETIALEKEQKLQNDFAEKERKLQETQMSTTSKLEEAEHKVQSLQTALEKTRTELFDLKTKYDEETTAKADEIEMIMTDLERANQRAEVAQREAETLREQLSSANHSLQLASQIQKAPDVEQAIEVLTRSSLEVELAAKEREIAQLVEDVQRLQASLTKLRENSASQISQLEQQLSAKNSTLKQLEEKLKGQADYEEVKKELNILKSMEFAPSEGAGTQDAAKPLEVLLLEKNRSLQSENAALRISNSDLSGPYSTNSISSQSPLQQSPDVNGMAPSPSQSESAGSVSEGEEMDTAEIARQVKEQLIKHNIGQRIFGHYVLGLSQGSVSEILARPKPWNKLTVRGKEPFHKMKQFLSDEQNILALRSIQGRQRENPGQSLNRLFQEVPKRRNGSEGNITTRIRASETGSDEAIKSILEQAKRELQVQKTAEPAQPSSASGSGNSDDAIRSILQQARREMEAQQAALDPALKQAPLSQSDITILTPKLLSTSPMPTVSSYPPLAISLKKPSAAPEAGASALPNPPALKKEAQDAPGLDPQGAADCAQGVLRQVKNEVGRSGAWKDHWWSAVQPERRNAASSEEAKAEETGGGKEKGSGGSGGGSQPRAERSQLQGPSSSEYWKEWPSAESPYSQSSELSLTGASRSETPQNSPLPSSPIVPMSKPTKPSVPPLTPEQYEVYMYQEVDTIELTRQVKEKLAKNGICQRIFGEKVLGLSQGSVSDMLSRPKPWSKLTQKGREPFIRMQLWLNGELGQGVLPVQGQQQGPVLHSVTSLQDPLQQGCVSSESTPKTSASCSPAPESPMSSSESVKSLTELVQQPCPPIEASKDSKPPEPSDPPASDSQPTTPLPLSGHSALSIQELVAMSPELDTYGITKRVKEVLTDNNLGQRLFGETILGLTQGSVSDLLARPKPWHKLSLKGREPFVRMQLWLNDPNNVEKLMDMKRMEKKAYMKRRHSSVSDSQPCEPPSVGTEYSQGASPQPQHQLKKPRVVLAPEEKEALKRAYQQKPYPSPKTIEDLATQLNLKTSTVINWFHNYRSRIRRELFIEEIQAGSQGQAGASDSPSARSGRAAPSSEGDSCDGVEATEGPGSADTEEPKSQGEAEREEVPRPAEQTEPPPSGTPGPDDARDDDHEGGPVEGPGPLPSPASATATAAPAAPEDAATSAAAAPGEGPAAPSSAPPPSNSSSSSAPRRPSSLQSLFGLPEAAGARDSRDNPLRKKKAANLNSIIHRLEKAASREEPIEWEF

SEQ ID NO: 34367 - protein, 1512 aa, Artificial Sequence
  Synthetic polypeptide
AEWPLESHLVEVPAAQRAASFPDEACILEATLGTCTVRQRELDATATVLANRQDESEQSRKRLIEQSREFKKNTPEDLRKQVAPLLKSFQGEIDALSKRSKEAEAAFLNVYKRLIDVPDPVPALDLGQQLQLKVQRLHDIETENQKLRETLEEYNKEFAEVKNQEVTIKALKEKIREYEQTLKNQAETIALEKEQKLQNDFAEKERKLQETQMSTTSKLEEAEHKVQSLQTALEKTRTELFDLKTKYDEETTAKADEIEMIMTDLERANQRAEVAQREAETLREQLSSANHSLQLASQIQKAPDVEQAIEVLTRSSLEVELAAKEREIAQLVEDVQRLQASLTKLRENSASQISQLEQQLSAKNSTLKQLEEKLKGQADYEEVKKELNILKSMEFAPSEGAGTQDAAKPLEVLLLEKNRSLQSENAALRISNSDLSGSARRKGKDQPESRRPGSLPAPPPSQLPRNPGEQASNTNGTHQFSPAGLSQDFFSSSLASPSLPLASTGKFALNSLLQRQLMQSFYSKAMQEAGSTSMIFSTGPYSTNSISSQSPLQQSPDVNGMAPSPSQSESAGSVSEGEEMDTAEIARQVKEQLIKHNIGQRIFGHYVLGLSQGSVSEILARPKPWNKLTVRGKEPFHKMKQFLSDEQNILALRSIQGRQRGNITTRIRASETGSDEAIKSILEQAKRELQVQKTAEPAQPSSASGSGNSDDAIRSILQQARREMEAQQAALDPALKQAPLSQSDITILTPKLLSTSPMPTVSSYPPLAISLKKPSAAPEAGASALPNPPALKKEAQDAPGLDPQGAADCAQGVLRQVKNEVGRSGAWKDHWWSAVQPERRNAASSEEAKAEETGGGKEKGSGGSGGGSQPRAERSQLQGPSSSEYWKEWPSAESPYSQSSELSLTGASRSETPQNSPLPSSPIVPMSKPTKPSVPPLTPEQYEVYMYQEVDTIELTRQVKEKLAKNGICQRIFGEKVLGLSQGSVSDMLSRPKPWSKLTQKGREPFIRMQLWLNGELGQGVLPVQGQQQGPVLHSVTSLQDPLQQGCVSSESTPKTSASCSPAPESPMSSSESVKSLTELVQQPCPPIEASKDSKPPEPSDPPASDSQPTTPLPLSGHSALSIQELVAMSPELDTYGITKRVKEVLTDNNLGQRLFGETILGLTQGSVSDLLARPKPWHKLSLKGREPFVRMQLWLNDPNNVEKLMDMKRMEKKAYMKRRHSSVSDSQPCEPPSVGTEYSQGASPQPQHQLKKPRVVLAPEEKEALKRAYQQKPYPSPKTIEDLATQLNLKTSTVINWFHNYRSRIRRELFIEEIQAGSQGQAGASDSPSARSGRAAPSSEGDSCDGVEATEGPGSADTEEPKSQGEAEREEVPRPAEQTEPPPSGTPGPDDARDDDHEGGPVEGPGPLPSPASATATAAPAAPEDAATSAAAAPGEGPAAPSSAPPPSNSSSSSAPRRPSSLQSLFGLPEAAGARDSRDNPLRKKKAANLNSIIHRLEKAASREEPIEWEF

SEQ ID NO: 34368 - protein, 1478 aa, Artificial Sequence
  Synthetic polypeptide
AEWPLESHLVEVPAAQRAASFPDEACILEATLGTCTVRQRELDATATVLANRQDESEQSRKRLIEQSREFKKNTPEDLRKQVAPLLKSFQGEIDALSKRSKEAEAAFLNVYKRLIDVPDPVPALDLGQQLQLKVQRLHDIETENQKLRETLEEYNKEFAEVKNQEVTIKALKEKIREYEQTLKNQAETIALEKEQKLQNDFAEKERKLQETQMSTTSKLEEAEHKVQSLQTALEKTRTELFDLKTKYDEETTAKADEIEMIMTDLERANQRAEVAQREAETLREQLSSANHSLQLASQIQKAPDVEQAIEVLTRSSLEVELAAKEREIAQLVEDVQRLQASLTKLRENSASQISQLEQQLSAKNSTLKQLEEKLKGQADYEEVKKELNILKSMEFAPSEGAGTQDAAKPLEVLLLEKNRSLQSENAALRISNSDLSGSARRKGKDQPESRRPGSLPAPPPSQLPRNPGEQASNTNGTHQFSPAGLSQDFFSSSLASPSLPLASTGKFALNSLLQRQLMQSFYSKAMQEAGSTSMIFSTGPYSTNSISSQSPLQQSPDVNGMAPSPSQSESAGSVSEGEEMDTAEIARQVKEQLIKHNIGQRIFGHYVLGLSQGSVSEILARPKPWNKLTVRGKEPFHKMKQFLSDEQNILALRSIQGRQRAEPAQPSSASGSGNSDDAIRSILQQARREMEAQQAALDPALKQAPLSQSDITILTPKLLSTSPMPTVSSYPPLAISLKKPSAAPEAGASALPNPPALKKEAQDAPGLDPQGAADCAQGVLRQVKNEVGRSGAWKDHWWSAVQPERRNAASSEEAKAEETGGGKEKGSGGSGGGSQPRAERSQLQGPSSSEYWKEWPSAESPYSQSSELSLTGASRSETPQNSPLPSSPIVPMSKPTKPSVPPLTPEQYEVYMYQEVDTIELTRQVKEKLAKNGICQRIFGEKVLGLSQGSVSDMLSRPKPWSKLTQKGREPFIRMQLWLNGELGQGVLPVQGQQQGPVLHSVTSLQDPLQQGCVSSESTPKTSASCSPAPESPMSSSESVKSLTELVQQPCPPIEASKDSKPPEPSDPPASDSQPTTPLPLSGHSALSIQELVAMSPELDTYGITKRVKEVLTDNNLGQRLFGETILGLTQGSVSDLLARPKPWHKLSLKGREPFVRMQLWLNDPNNVEKLMDMKRMEKKAYMKRRHSSVSDSQPCEPPSVGTEYSQGASPQPQHQLKKPRVVLAPEEKEALKRAYQQKPYPSPKTIEDLATQLNLKTSTVINWFHNYRSRIRRELFIEEIQAGSQGQAGASDSPSARSGRAAPSSEGDSCDGVEATEGPGSADTEEPKSQGEAEREEVPRPAEQTEPPPSGTPGPDDARDDDHEGGPVEGPGPLPSPASATATAAPAAPEDAATSAAAAPGEGPAAPSSAPPPSNSSSSSAPRRPSSLQSLFGLPEAAGARDSRDNPLRKKKAANLNSIIHRLEKAASREEPIEWEF

SEQ ID NO: 34369 - protein, 1376 aa, Artificial Sequence
  Synthetic polypeptide
AEWPLESHLVEVPAAQRAASFPDEACILEATLGTCTVRQRELDATATVLANRQDESEQSRKRLIEQSREFKKNTPEDLRKQVAPLLKSFQGEIDALSKRSKEAEAAFLNVYKRLIDVPDPVPALDLGQQLQLKVQRLHDIETENQKLRETLEEYNKEFAEVKNQEVTIKALKEKIREYEQTLKNQAETIALEKEQKLQNDFAEKERKLQETQMSTTSKLEEAEHKVQSLQTALEKTRTELFDLKTKYDEETTAKADEIEMIMTDLERANQRAEVAQREAETLREQLSSANHSLQLASQIQKAPDVEQAIEVLTRSSLEVELAAKEREIAQLVEDVQRLQASLTKLRENSASQISQLEQQLSAKNSTLKQLEEKLKGQADYEEVKKELNILKSMEFAPSEGAGTQDAAKPLEVLLLEKNRSLQSENAALRISNSDLSGPYSTNSISSQSPLQQSPDVNGMAPSPSQSESAGSVSEGEEMDTAEIARQVKEQLIKHNIGQRIFGHYVLGLSQGSVSEILARPKPWNKLTVRGKEPFHKMKQFLSDEQNILALRSIQGRQRAEPAQPSSASGSGNSDDAIRSILQQARREMEAQQAALDPALKQAPLSQSDITILTPKLLSTSPMPTVSSYPPLAISLKKPSAAPEAGASALPNPPALKKEAQDAPGLDPQGAADCAQGVLRQVKNEVGRSGAWKDHWWSAVQPERRNAASSEEAKAEETGGGKEKGSGGSGGGSQPRAERSQLQGPSSSEYWKEWPSAESPYSQSSELSLTGASRSETPQNSPLPSSPIVPMSKPTKPSVPPLTPEQYEVYMYQEVDTIELTRQVKEKLAKNGICQRIFGEKVLGLSQGSVSDMLSRPKPWSKLTQKGREPFIRMQLWLNGELGQGVLPVQGQQQGPVLHSVTSLQDPLQQGCVSSESTPKTSASCSPAPESPMSSSESVKSLTELVQQPCPPIEASKDSKPPEPSDPPASDSQPTTPLPLSGHSALSIQELVAMSPELDTYGITKRVKEVLTDNNLGQRLFGETILGLTQGSVSDLLARPKPWHKLSLKGREPFVRMQLWLNDPNNVEKLMDMKRMEKKAYMKRRHSSVSDSQPCEPPSVGTEYSQGASPQPQHQLKKPRVVLAPEEKEALKRAYQQKPYPSPKTIEDLATQLNLKTSTVINWFHNYRSRIRRELFIEEIQAGSQGQAGASDSPSARSGRAAPSSEGDSCDGVEATEGPGSADTEEPKSQGEAEREEVPRPAEQTEPPPSGTPGPDDARDDDHEGGPVEGPGPLPSPASATATAAPAAPEDAATSAAAAPGEGPAAPSSAPPPSNSSSSSAPRRPSSLQSLFGLPEAAGARDSRDNPLRKKKAANLNSIIHRLEKAASREEPIEWEF

SEQ ID NO: 34370 - protein, 19 aa, Artificial Sequence
  Synthetic polypeptide
SLEPGILRPAWTTWICASR

SEQ ID NO: 34371 - protein, 23 aa, Artificial Sequence
  Synthetic polypeptide
DQPGQHGFAQAGSAAAEEFPRRD

SEQ ID NO: 34372 - protein, 629 aa, Artificial Sequence
  Synthetic polypeptide
TRDFETSLDNMDLRKQVAPLLKSFQGEIDALSKRSKEAEAAFLNVYKRLIDVPDPVPALDLGQQLQLKVQRLHDIETENQKLRETLEEYNKEFAEVKNQEVTIKALKEKIREYEQTLKNQAETIALEKEQKLQNDFAEKERKLQETQMSTTSKLEEAEHKVQSLQTALEKTRTELFDLKTKYDEETTAKADEIEMIMTDLERANQRAEVAQREAETLREQLSSANHSLQLASQIQKAPDVAIEVLTRSSLEVELAAKEREIAQLVEDVQRLQASLTKLRENSASQISQLEQQLSAKNSTLKQLEEKLKGQADYEEVKKELNILKSMEFAPSEGAGTQDAAKPLEVLLLEKNRSLQSENAALRISNSDLSGRCAELQVRITEAVATATEQRELIARLEQDLSIIQSIQRPDAEGAAEHRLEKIPEPIKEATALFYGPAAPASGALPEGQVDSLLSIISSQRERFRARNQELEAENRLAQHTLQALQSELDSLRADNIKLFEKIKFLQSYPGRGSGSDDTELRYSSQYEERLDPFSSFSKRERQRKYLSLSPWDKATLSMGRLVLSNKMARTIGFFYTLFLHCLVFLVLYKLAWSESMERDCATFCAKKFADHLHKFHENDNGAAAGDLWQ

SEQ ID NO: 34373 - protein, 631 aa, Artificial Sequence
  Synthetic polypeptide
TRDFETSLDNMDLRKQVAPLLKSFQGEIDALSKRSKEAEAAFLNVYKRLIDVPDPVPALDLGQQLQLKVQRLHDIETENQKLRETLEEYNKEFAEVKNQEVTIKALKEKIREYEQTLKNQAETIALEKEQKLQNDFAEKERKLQETQMSTTSKLEEAEHKVQSLQTALEKTRTELFDLKTKYDEETTAKADEIEMIMTDLERANQRAEVAQREAETLREQLSSANHSLQLASQIQKAPDVEQAIEVLTRSSLEVELAAKEREIAQLVEDVQRLQASLTKLRENSASQISQLEQQLSAKNSTLKQLEEKLKGQADYEEVKKELNILKSMEFAPSEGAGTQDAAKPLEVLLLEKNRSLQSENAALRISNSDLSGRCAELQVRITEAVATATEQRELIARLEQDLSIIQSIQRPDAEGAAEHRLEKIPEPIKEATALFYGPAAPASGALPEGQVDSLLSIISSQRERFRARNQELEAENRLAQHTLQALQSELDSLRADNIKLFEKIKFLQSYPGRGSGSDDTELRYSSQYEERLDPFSSFSKRERQRKYLSLSPWDKATLSMGRLVLSNKMARTIGFFYTLFLHCLVFLVLYKLAWSESMERDCATFCAKKFADHLHKFHENDNGAAAGDLWQ

SEQ ID NO: 34374 - protein, 1469 aa, Artificial Sequence
  Synthetic polypeptide
TRDFETSLDNMDLRKQVAPLLKSFQGEIDALSKRSKEAEAAFLNVYKRLIDVPDPVPALDLGQQLQLKVQRLHDIETENQKLRETLEEYNKEFAEVKNQEVTIKALKEKIREYEQTLKNQAETIALEKEQKLQNDFAEKERKLQETQMSTTSKLEEAEHKVQSLQTALEKTRTELFDLKTKYDEETTAKADEIEMIMTDLERANQRAEVAQREAETLREQLSSANHSLQLASQIQKAPDVEQAIEVLTRSSLEVELAAKEREIAQLVEDVQRLQASLTKLRENSASQISQLEQQLSAKNSTLKQLEEKLKGQADYEEVKKELNILKSMEFAPSEGAGTQDAAKPLEVLLLEKNRSLQSENAALRISNSDLSGSARRKGKDQPESRRPGSLPAPPPSQLPRNPGEQASNTNGTHQFSPAGLSQDFFSSSLASPSLPLASTGKFALNSLLQRQLMQSFYSKAMQEAGSTSMIFSTGPYSTNSISSQSPLQQSPDVNGMAPSPSQSESAGSVSEGEEMDTAEIARQVKEQLIKHNIGQRIFGHYVLGLSQGSVSEILARPKPWNKLTVRGKEPFHKMKQFLSDEQNILALRSIQGRQRENPGQSLNRLFQEVPKRRNGSEGNITTRIRASETGSDEAIKSILEQAKRELQVQKTAEPAQPSSASGSGNSDDAIRSILQQARREMEAQQAALDPALKQAPLSQSDITILTPKLLSTSPMPTVSSYPPLAISLKKPSAAPEAGASALPNPPALKKEAQDAPGLDPQGAADCAQGVLRQVKNEVGRSGAWKDHWWSAVQPERRNAASSEEAKAEETGGGKEKGSGGSGGGSQPRAERSQLQGPSSSEYWKEWPSAESPYSQSSELSLTGASRSETPQNSPLPSSPIVPMSKPTKPSVPPLTPEQYEVYMYQEVDTIELTRQVKEKLAKNGICQRIFGEKVLGLSQGSVSDMLSRPKPWSKLTQKGREPFIRMQLWLNGELGQGVLPVQGQQQGPVLHSVTSLQDPLQQGCVSSESTPKTSASCSPAPESPMSSSESVKSLTELVQQPCPPIEASKDSKPPEPSDPPASDSQPTTPLPLSGHSALSIQELVAMSPELDTYGITKRVKEVLTDNNLGQRLFGETILGLTQGSVSDLLARPKPWHKLSLKGREPFVRMQLWLNDPNNVEKLMDMKRMEKKAYMKRRHSSVSDSQPCEPPSVGTEYSQGASPQPQHQLKKPRVVLAPEEKEALKRAYQQKPYPSPKTIEDLATQLNLKTSTVINWFHNYRSRIRRELFIEEIQAGSQGQAGASDSPSARSGRAAPSSEGDSCDGVEATEGPGSADTEEPKSQGEAEREEVPRPAEQTEPPPSGTPGPDDARDDDHEGGPVEGPGPLPSPASATATAAPAAPEDAATSAAAAPGEGPAAPSSAPPPSNSSSSSAPRRPSSLQSLFGLPEAAGARDSRDNPLRKKKAANLNSIIHRLEKAASREEPIEWEF

SEQ ID NO: 34375 - protein, 585 aa, Artificial Sequence
  Synthetic polypeptide
TRDFETSLDNMDLRKQVAPLLKSFQGEIDALSKRSKEAEAAFLNVYKRLIDVPEVTIKALKEKIREYEQTLKNQAETIALEKEQKLQNDFAEKERKLQETQMSTTSKLEEAEHKVQSLQTALEKTRTELFDLKTKYDEETTAKADEIEMIMTDLERANQRAEVAQREAETLREQLSSANHSLQLASQIQKAPDVEQAIEVLTRSSLEVELAAKEREIAQLVEDVQRLQASLTKLRENSASQISQLEQQLSAKNSTLKQLEEKLKGQADYEEVKKELNILKSMEFAPSEGAGTQDAAKPLEVLLLEKNRSLQSENAALRISNSDLSGRCAELQVRITEAVATATEQRELIARLEQDLSIIQSIQRPDAEGAAEHRLEKIPEPIKEATALFYGPAAPASGALPEGQVDSLLSIISSQRERFRARNQELEAENRLAQHTLQALQSELDSLRADNIKLFEKIKFLQSYPGRGSGSDDTELRYSSQYEERLDPFSSFSKRERQRKYLSLSPWDKATLSMGRLVLSNKMARTIGFFYTLFLHCLVFLVLYKLAWSESMERDCATFCAKKFADHLHKFHENDNGAAAGDLWQ

SEQ ID NO: 34376 - protein, 1367 aa, Artificial Sequence
  Synthetic polypeptide
TRDFETSLDNMDLRKQVAPLLKSFQGEIDALSKRSKEAEAAFLNVYKRLIDVPDPVPALDLGQQLQLKVQRLHDIETENQKLRETLEEYNKEFAEVKNQEVTIKALKEKIREYEQTLKNQAETIALEKEQKLQNDFAEKERKLQETQMSTTSKLEEAEHKVQSLQTALEKTRTELFDLKTKYDEETTAKADEIEMIMTDLERANQRAEVAQREAETLREQLSSANHSLQLASQIQKAPDVEQAIEVLTRSSLEVELAAKEREIAQLVEDVQRLQASLTKLRENSASQISQLEQQLSAKNSTLKQLEEKLKGQADYEEVKKELNILKSMEFAPSEGAGTQDAAKPLEVLLLEKNRSLQSENAALRISNSDLSGPYSTNSISSQSPLQQSPDVNGMAPSPSQSESAGSVSEGEEMDTAEIARQVKEQLIKHNIGQRIFGHYVLGLSQGSVSEILARPKPWNKLTVRGKEPFHKMKQFLSDEQNILALRSIQGRQRENPGQSLNRLFQEVPKRRNGSEGNITTRIRASETGSDEAIKSILEQAKRELQVQKTAEPAQPSSASGSGNSDDAIRSILQQARREMEAQQAALDPALKQAPLSQSDITILTPKLLSTSPMPTVSSYPPLAISLKKPSAAPEAGASALPNPPALKKEAQDAPGLDPQGAADCAQGVLRQVKNEVGRSGAWKDHWWSAVQPERRNAASSEEAKAEETGGGKEKGSGGSGGGSQPRAERSQLQGPSSSEYWKEWPSAESPYSQSSELSLTGASRSETPQNSPLPSSPIVPMSKPTKPSVPPLTPEQYEVYMYQEVDTIELTRQVKEKLAKNGICQRIFGEKVLGLSQGSVSDMLSRPKPWSKLTQKGREPFIRMQLWLNGELGQGVLPVQGQQQGPVLHSVTSLQDPLQQGCVSSESTPKTSASCSPAPESPMSSSESVKSLTELVQQPCPPIEASKDSKPPEPSDPPASDSQPTTPLPLSGHSALSIQELVAMSPELDTYGITKRVKEVLTDNNLGQRLFGETILGLTQGSVSDLLARPKPWHKLSLKGREPFVRMQLWLNDPNNVEKLMDMKRMEKKAYMKRRHSSVSDSQPCEPPSVGTEYSQGASPQPQHQLKKPRVVLAPEEKEALKRAYQQKPYPSPKTIEDLATQLNLKTSTVINWFHNYRSRIRRELFIEEIQAGSQGQAGASDSPSARSGRAAPSSEGDSCDGVEATEGPGSADTEEPKSQGEAEREEVPRPAEQTEPPPSGTPGPDDARDDDHEGGPVEGPGPLPSPASATATAAPAAPEDAATSAAAAPGEGPAAPSSAPPPSNSSSSSAPRRPSSLQSLFGLPEAAGARDSRDNPLRKKKAANLNSIIHRLEKAASREEPIEWEF

SEQ ID NO: 34377 - protein, 1447 aa, Artificial Sequence
  Synthetic polypeptide
TRDFETSLDNMDLRKQVAPLLKSFQGEIDALSKRSKEAEAAFLNVYKRLIDVPDPVPALDLGQQLQLKVQRLHDIETENQKLRETLEEYNKEFAEVKNQEVTIKALKEKIREYEQTLKNQAETIALEKEQKLQNDFAEKERKLQETQMSTTSKLEEAEHKVQSLQTALEKTRTELFDLKTKYDEETTAKADEIEMIMTDLERANQRAEVAQREAETLREQLSSANHSLQLASQIQKAPDVEQAIEVLTRSSLEVELAAKEREIAQLVEDVQRLQASLTKLRENSASQISQLEQQLSAKNSTLKQLEEKLKGQADYEEVKKELNILKSMEFAPSEGAGTQDAAKPLEVLLLEKNRSLQSENAALRISNSDLSGSARRKGKDQPESRRPGSLPAPPPSQLPRNPGEQASNTNGTHQFSPAGLSQDFFSSSLASPSLPLASTGKFALNSLLQRQLMQSFYSKAMQEAGSTSMIFSTGPYSTNSISSQSPLQQSPDVNGMAPSPSQSESAGSVSEGEEMDTAEIARQVKEQLIKHNIGQRIFGHYVLGLSQGSVSEILARPKPWNKLTVRGKEPFHKMKQFLSDEQNILALRSIQGRQRGNITTRIRASETGSDEAIKSILEQAKRELQVQKTAEPAQPSSASGSGNSDDAIRSILQQARREMEAQQAALDPALKQAPLSQSDITILTPKLLSTSPMPTVSSYPPLAISLKKPSAAPEAGASALPNPPALKKEAQDAPGLDPQGAADCAQGVLRQVKNEVGRSGAWKDHWWSAVQPERRNAASSEEAKAEETGGGKEKGSGGSGGGSQPRAERSQLQGPSSSEYWKEWPSAESPYSQSSELSLTGASRSETPQNSPLPSSPIVPMSKPTKPSVPPLTPEQYEVYMYQEVDTIELTRQVKEKLAKNGICQRIFGEKVLGLSQGSVSDMLSRPKPWSKLTQKGREPFIRMQLWLNGELGQGVLPVQGQQQGPVLHSVTSLQDPLQQGCVSSESTPKTSASCSPAPESPMSSSESVKSLTELVQQPCPPIEASKDSKPPEPSDPPASDSQPTTPLPLSGHSALSIQELVAMSPELDTYGITKRVKEVLTDNNLGQRLFGETILGLTQGSVSDLLARPKPWHKLSLKGREPFVRMQLWLNDPNNVEKLMDMKRMEKKAYMKRRHSSVSDSQPCEPPSVGTEYSQGASPQPQHQLKKPRVVLAPEEKEALKRAYQQKPYPSPKTIEDLATQLNLKTSTVINWFHNYRSRIRRELFIEEIQAGSQGQAGASDSPSARSGRAAPSSEGDSCDGVEATEGPGSADTEEPKSQGEAEREEVPRPAEQTEPPPSGTPGPDDARDDDHEGGPVEGPGPLPSPASATATAAPAAPEDAATSAAAAPGEGPAAPSSAPPPSNSSSSSAPRRPSSLQSLFGLPEAAGARDSRDNPLRKKKAANLNSIIHRLEKAASREEPIEWEF

SEQ ID NO: 34378 - protein, 1413 aa, Artificial Sequence
  Synthetic polypeptide
TRDFETSLDNMDLRKQVAPLLKSFQGEIDALSKRSKEAEAAFLNVYKRLIDVPDPVPALDLGQQLQLKVQRLHDIETENQKLRETLEEYNKEFAEVKNQEVTIKALKEKIREYEQTLKNQAETIALEKEQKLQNDFAEKERKLQETQMSTTSKLEEAEHKVQSLQTALEKTRTELFDLKTKYDEETTAKADEIEMIMTDLERANQRAEVAQREAETLREQLSSANHSLQLASQIQKAPDVEQAIEVLTRSSLEVELAAKEREIAQLVEDVQRLQASLTKLRENSASQISQLEQQLSAKNSTLKQLEEKLKGQADYEEVKKELNILKSMEFAPSEGAGTQDAAKPLEVLLLEKNRSLQSENAALRISNSDLSGSARRKGKDQPESRRPGSLPAPPPSQLPRNPGEQASNTNGTHQFSPAGLSQDFFSSSLASPSLPLASTGKFALNSLLQRQLMQSFYSKAMQEAGSTSMIFSTGPYSTNSISSQSPLQQSPDVNGMAPSPSQSESAGSVSEGEEMDTAEIARQVKEQLIKHNIGQRIFGHYVLGLSQGSVSEILARPKPWNKLTVRGKEPFHKMKQFLSDEQNILALRSIQGRQRAEPAQPSSASGSGNSDDAIRSILQQARREMEAQQAALDPALKQAPLSQSDITILTPKLLSTSPMPTVSSYPPLAISLKKPSAAPEAGASALPNPPALKKEAQDAPGLDPQGAADCAQGVLRQVKNEVGRSGAWKDHWWSAVQPERRNAASSEEAKAEETGGGKEKGSGGSGGGSQPRAERSQLQGPSSSEYWKEWPSAESPYSQSSELSLTGASRSETPQNSPLPSSPIVPMSKPTKPSVPPLTPEQYEVYMYQEVDTIELTRQVKEKLAKNGICQRIFGEKVLGLSQGSVSDMLSRPKPWSKLTQKGREPFIRMQLWLNGELGQGVLPVQGQQQGPVLHSVTSLQDPLQQGCVSSESTPKTSASCSPAPESPMSSSESVKSLTELVQQPCPPIEASKDSKPPEPSDPPASDSQPTTPLPLSGHSALSIQELVAMSPELDTYGITKRVKEVLTDNNLGQRLFGETILGLTQGSVSDLLARPKPWHKLSLKGREPFVRMQLWLNDPNNVEKLMDMKRMEKKAYMKRRHSSVSDSQPCEPPSVGTEYSQGASPQPQHQLKKPRVVLAPEEKEALKRAYQQKPYPSPKTIEDLATQLNLKTSTVINWFHNYRSRIRRELFIEEIQAGSQGQAGASDSPSARSGRAAPSSEGDSCDGVEATEGPGSADTEEPKSQGEAEREEVPRPAEQTEPPPSGTPGPDDARDDDHEGGPVEGPGPLPSPASATATAAPAAPEDAATSAAAAPGEGPAAPSSAPPPSNSSSSSAPRRPSSLQSLFGLPEAAGARDSRDNPLRKKKAANLNSIIHRLEKAASREEPIEWEF

SEQ ID NO: 34379 - protein, 1311 aa, Artificial Sequence
  Synthetic polypeptide
TRDFETSLDNMDLRKQVAPLLKSFQGEIDALSKRSKEAEAAFLNVYKRLIDVPDPVPALDLGQQLQLKVQRLHDIETENQKLRETLEEYNKEFAEVKNQEVTIKALKEKIREYEQTLKNQAETIALEKEQKLQNDFAEKERKLQETQMSTTSKLEEAEHKVQSLQTALEKTRTELFDLKTKYDEETTAKADEIEMIMTDLERANQRAEVAQREAETLREQLSSANHSLQLASQIQKAPDVEQAIEVLTRSSLEVELAAKEREIAQLVEDVQRLQASLTKLRENSASQISQLEQQLSAKNSTLKQLEEKLKGQADYEEVKKELNILKSMEFAPSEGAGTQDAAKPLEVLLLEKNRSLQSENAALRISNSDLSGPYSTNSISSQSPLQQSPDVNGMAPSPSQSESAGSVSEGEEMDTAEIARQVKEQLIKHNIGQRIFGHYVLGLSQGSVSEILARPKPWNKLTVRGKEPFHKMKQFLSDEQNILALRSIQGRQRAEPAQPSSASGSGNSDDAIRSILQQARREMEAQQAALDPALKQAPLSQSDITILTPKLLSTSPMPTVSSYPPLAISLKKPSAAPEAGASALPNPPALKKEAQDAPGLDPQGAADCAQGVLRQVKNEVGRSGAWKDHWWSAVQPERRNAASSEEAKAEETGGGKEKGSGGSGGGSQPRAERSQLQGPSSSEYWKEWPSAESPYSQSSELSLTGASRSETPQNSPLPSSPIVPMSKPTKPSVPPLTPEQYEVYMYQEVDTIELTRQVKEKLAKNGICQRIFGEKVLGLSQGSVSDMLSRPKPWSKLTQKGREPFIRMQLWLNGELGQGVLPVQGQQQGPVLHSVTSLQDPLQQGCVSSESTPKTSASCSPAPESPMSSSESVKSLTELVQQPCPPIEASKDSKPPEPSDPPASDSQPTTPLPLSGHSALSIQELVAMSPELDTYGITKRVKEVLTDNNLGQRLFGETILGLTQGSVSDLLARPKPWHKLSLKGREPFVRMQLWLNDPNNVEKLMDMKRMEKKAYMKRRHSSVSDSQPCEPPSVGTEYSQGASPQPQHQLKKPRVVLAPEEKEALKRAYQQKPYPSPKTIEDLATQLNLKTSTVINWFHNYRSRIRRELFIEEIQAGSQGQAGASDSPSARSGRAAPSSEGDSCDGVEATEGPGSADTEEPKSQGEAEREEVPRPAEQTEPPPSGTPGPDDARDDDHEGGPVEGPGPLPSPASATATAAPAAPEDAATSAAAAPGEGPAAPSSAPPPSNSSSSSAPRRPSSLQSLFGLPEAAGARDSRDNPLRKKKAANLNSIIHRLEKAASREEPIEWEF

SEQ ID NO: 34380 - protein, 23 aa, Artificial Sequence
  Synthetic polypeptide
ARCGGSRLSSQPFGRLKWADHLR

SEQ ID NO: 34381 - protein, 32 aa, Artificial Sequence
  Synthetic polypeptide
QVRRLTPVIPALWEAEVGGSLKVNVKALKRNS

SEQ ID NO: 34382 - protein, 447 aa, Artificial Sequence
  Synthetic polypeptide
GRARWLTPVIPALWEAEAGGLLERAEVAQREAETLREQLSSANHSLQLASQIQKAPDVAIEVLTRSSLEVELAAKEREIAQLVEDVQRLQASLTKLRENSASQISQLEQQLSAKNSTLKQLEEKLKGQADYEEVKKELNILKSMEFAPSEGAGTQDAAKPLEVLLLEKNRSLQSENAALRISNSDLSGRCAELQVRITEAVATATEQRELIARLEQDLSIIQSIQRPDAEGAAEHRLEKIPEPIKEATALFYGPAAPASGALPEGQVDSLLSIISSQRERFRARNQELEAENRLAQHTLQALQSELDSLRADNIKLFEKIKFLQSYPGRGSGSDDTELRYSSQYEERLDPFSSFSKRERQRKYLSLSPWDKATLSMGRLVLSNKMARTIGFFYTLFLHCLVFLVLYKLAWSESMERDCATFCAKKFADHLHKFHENDNGAAAGDLWQ

SEQ ID NO: 34383 - protein, 25 aa, Artificial Sequence
  Synthetic polypeptide
SQHFGRPRQVDYLRGQRWLRERRRP

SEQ ID NO: 34384 - protein, 449 aa, Artificial Sequence
  Synthetic polypeptide
GRARWLTPVIPALWEAEAGGLLERAEVAQREAETLREQLSSANHSLQLASQIQKAPDVEQAIEVLTRSSLEVELAAKEREIAQLVEDVQRLQASLTKLRENSASQISQLEQQLSAKNSTLKQLEEKLKGQADYEEVKKELNILKSMEFAPSEGAGTQDAAKPLEVLLLEKNRSLQSENAALRISNSDLSGRCAELQVRITEAVATATEQRELIARLEQDLSIIQSIQRPDAEGAAEHRLEKIPEPIKEATALFYGPAAPASGALPEGQVDSLLSIISSQRERFRARNQELEAENRLAQHTLQALQSELDSLRADNIKLFEKIKFLQSYPGRGSGSDDTELRYSSQYEERLDPFSSFSKRERQRKYLSLSPWDKATLSMGRLVLSNKMARTIGFFYTLFLHCLVFLVLYKLAWSESMERDCATFCAKKFADHLHKFHENDNGAAAGDLWQ

SEQ ID NO: 34385 - protein, 1287 aa, Artificial Sequence
  Synthetic polypeptide
GRARWLTPVIPALWEAEAGGLLERAEVAQREAETLREQLSSANHSLQLASQIQKAPDVEQAIEVLTRSSLEVELAAKEREIAQLVEDVQRLQASLTKLRENSASQISQLEQQLSAKNSTLKQLEEKLKGQADYEEVKKELNILKSMEFAPSEGAGTQDAAKPLEVLLLEKNRSLQSENAALRISNSDLSGSARRKGKDQPESRRPGSLPAPPPSQLPRNPGEQASNTNGTHQFSPAGLSQDFFSSSLASPSLPLASTGKFALNSLLQRQLMQSFYSKAMQEAGSTSMIFSTGPYSTNSISSQSPLQQSPDVNGMAPSPSQSESAGSVSEGEEMDTAEIARQVKEQLIKHNIGQRIFGHYVLGLSQGSVSEILARPKPWNKLTVRGKEPFHKMKQFLSDEQNILALRSIQGRQRENPGQSLNRLFQEVPKRRNGSEGNITTRIRASETGSDEAIKSILEQAKRELQVQKTAEPAQPSSASGSGNSDDAIRSILQQARREMEAQQAALDPALKQAPLSQSDITILTPKLLSTSPMPTVSSYPPLAISLKKPSAAPEAGASALPNPPALKKEAQDAPGLDPQGAADCAQGVLRQVKNEVGRSGAWKDHWWSAVQPERRNAASSEEAKAEETGGGKEKGSGGSGGGSQPRAERSQLQGPSSSEYWKEWPSAESPYSQSSELSLTGASRSETPQNSPLPSSPIVPMSKPTKPSVPPLTPEQYEVYMYQEVDTIELTRQVKEKLAKNGICQRIFGEKVLGLSQGSVSDMLSRPKPWSKLTQKGREPFIRMQLWLNGELGQGVLPVQGQQQGPVLHSVTSLQDPLQQGCVSSESTPKTSASCSPAPESPMSSSESVKSLTELVQQPCPPIEASKDSKPPEPSDPPASDSQPTTPLPLSGHSALSIQELVAMSPELDTYGITKRVKEVLTDNNLGQRLFGETILGLTQGSVSDLLARPKPWHKLSLKGREPFVRMQLWLNDPNNVEKLMDMKRMEKKAYMKRRHSSVSDSQPCEPPSVGTEYSQGASPQPQHQLKKPRVVLAPEEKEALKRAYQQKPYPSPKTIEDLATQLNLKTSTVINWFHNYRSRIRRELFIEEIQAGSQGQAGASDSPSARSGRAAPSSEGDSCDGVEATEGPGSADTEEPKSQGEAEREEVPRPAEQTEPPPSGTPGPDDARDDDHEGGPVEGPGPLPSPASATATAAPAAPEDAATSAAAAPGEGPAAPSSAPPPSNSSSSSAPRRPSSLQSLFGLPEAAGARDSRDNPLRKKKAANLNSIIHRLEKAASREEPIEWEF

SEQ ID NO: 34386 - protein, 1185 aa, Artificial Sequence
  Synthetic polypeptide
GRARWLTPVIPALWEAEAGGLLERAEVAQREAETLREQLSSANHSLQLASQIQKAPDVEQAIEVLTRSSLEVELAAKEREIAQLVEDVQRLQASLTKLRENSASQISQLEQQLSAKNSTLKQLEEKLKGQADYEEVKKELNILKSMEFAPSEGAGTQDAAKPLEVLLLEKNRSLQSENAALRISNSDLSGPYSTNSISSQSPLQQSPDVNGMAPSPSQSESAGSVSEGEEMDTAEIARQVKEQLIKHNIGQRIFGHYVLGLSQGSVSEILARPKPWNKLTVRGKEPFHKMKQFLSDEQNILALRSIQGRQRENPGQSLNRLFQEVPKRRNGSEGNITTRIRASETGSDEAIKSILEQAKRELQVQKTAEPAQPSSASGSGNSDDAIRSILQQARREMEAQQAALDPALKQAPLSQSDITILTPKLLSTSPMPTVSSYPPLAISLKKPSAAPEAGASALPNPPALKKEAQDAPGLDPQGAADCAQGVLRQVKNEVGRSGAWKDHWWSAVQPERRNAASSEEAKAEETGGGKEKGSGGSGGGSQPRAERSQLQGPSSSEYWKEWPSAESPYSQSSELSLTGASRSETPQNSPLPSSPIVPMSKPTKPSVPPLTPEQYEVYMYQEVDTIELTRQVKEKLAKNGICQRIFGEKVLGLSQGSVSDMLSRPKPWSKLTQKGREPFIRMQLWLNGELGQGVLPVQGQQQGPVLHSVTSLQDPLQQGCVSSESTPKTSASCSPAPESPMSSSESVKSLTELVQQPCPPIEASKDSKPPEPSDPPASDSQPTTPLPLSGHSALSIQELVAMSPELDTYGITKRVKEVLTDNNLGQRLFGETILGLTQGSVSDLLARPKPWHKLSLKGREPFVRMQLWLNDPNNVEKLMDMKRMEKKAYMKRRHSSVSDSQPCEPPSVGTEYSQGASPQPQHQLKKPRVVLAPEEKEALKRAYQQKPYPSPKTIEDLATQLNLKTSTVINWFHNYRSRIRRELFIEEIQAGSQGQAGASDSPSARSGRAAPSSEGDSCDGVEATEGPGSADTEEPKSQGEAEREEVPRPAEQTEPPPSGTPGPDDARDDDHEGGPVEGPGPLPSPASATATAAPAAPEDAATSAAAAPGEGPAAPSSAPPPSNSSSSSAPRRPSSLQSLFGLPEAAGARDSRDNPLRKKKAANLNSIIHRLEKAASREEPIEWEF

SEQ ID NO: 34387 - protein, 1265 aa, Artificial Sequence
  Synthetic polypeptide
GRARWLTPVIPALWEAEAGGLLERAEVAQREAETLREQLSSANHSLQLASQIQKAPDVEQAIEVLTRSSLEVELAAKEREIAQLVEDVQRLQASLTKLRENSASQISQLEQQLSAKNSTLKQLEEKLKGQADYEEVKKELNILKSMEFAPSEGAGTQDAAKPLEVLLLEKNRSLQSENAALRISNSDLSGSARRKGKDQPESRRPGSLPAPPPSQLPRNPGEQASNTNGTHQFSPAGLSQDFFSSSLASPSLPLASTGKFALNSLLQRQLMQSFYSKAMQEAGSTSMIFSTGPYSTNSISSQSPLQQSPDVNGMAPSPSQSESAGSVSEGEEMDTAEIARQVKEQLIKHNIGQRIFGHYVLGLSQGSVSEILARPKPWNKLTVRGKEPFHKMKQFLSDEQNILALRSIQGRQRGNITTRIRASETGSDEAIKSILEQAKRELQVQKTAEPAQPSSASGSGNSDDAIRSILQQARREMEAQQAALDPALKQAPLSQSDITILTPKLLSTSPMPTVSSYPPLAISLKKPSAAPEAGASALPNPPALKKEAQDAPGLDPQGAADCAQGVLRQVKNEVGRSGAWKDHWWSAVQPERRNAASSEEAKAEETGGGKEKGSGGSGGGSQPRAERSQLQGPSSSEYWKEWPSAESPYSQSSELSLTGASRSETPQNSPLPSSPIVPMSKPTKPSVPPLTPEQYEVYMYQEVDTIELTRQVKEKLAKNGICQRIFGEKVLGLSQGSVSDMLSRPKPWSKLTQKGREPFIRMQLWLNGELGQGVLPVQGQQQGPVLHSVTSLQDPLQQGCVSSESTPKTSASCSPAPESPMSSSESVKSLTELVQQPCPPIEASKDSKPPEPSDPPASDSQPTTPLPLSGHSALSIQELVAMSPELDTYGITKRVKEVLTDNNLGQRLFGETILGLTQGSVSDLLARPKPWHKLSLKGREPFVRMQLWLNDPNNVEKLMDMKRMEKKAYMKRRHSSVSDSQPCEPPSVGTEYSQGASPQPQHQLKKPRVVLAPEEKEALKRAYQQKPYPSPKTIEDLATQLNLKTSTVINWFHNYRSRIRRELFIEEIQAGSQGQAGASDSPSARSGRAAPSSEGDSCDGVEATEGPGSADTEEPKSQGEAEREEVPRPAEQTEPPPSGTPGPDDARDDDHEGGPVEGPGPLPSPASATATAAPAAPEDAATSAAAAPGEGPAAPSSAPPPSNSSSSSAPRRPSSLQSLFGLPEAAGARDSRDNPLRKKKAANLNSIIHRLEKAASREEPIEWEF

SEQ ID NO: 34388 - protein, 1231 aa, Artificial Sequence
  Synthetic polypeptide
GRARWLTPVIPALWEAEAGGLLERAEVAQREAETLREQLSSANHSLQLASQIQKAPDVEQAIEVLTRSSLEVELAAKEREIAQLVEDVQRLQASLTKLRENSASQISQLEQQLSAKNSTLKQLEEKLKGQADYEEVKKELNILKSMEFAPSEGAGTQDAAKPLEVLLLEKNRSLQSENAALRISNSDLSGSARRKGKDQPESRRPGSLPAPPPSQLPRNPGEQASNTNGTHQFSPAGLSQDFFSSSLASPSLPLASTGKFALNSLLQRQLMQSFYSKAMQEAGSTSMIFSTGPYSTNSISSQSPLQQSPDVNGMAPSPSQSESAGSVSEGEEMDTAEIARQVKEQLIKHNIGQRIFGHYVLGLSQGSVSEILARPKPWNKLTVRGKEPFHKMKQFLSDEQNILALRSIQGRQRAEPAQPSSASGSGNSDDAIRSILQQARREMEAQQAALDPALKQAPLSQSDITILTPKLLSTSPMPTVSSYPPLAISLKKPSAAPEAGASALPNPPALKKEAQDAPGLDPQGAADCAQGVLRQVKNEVGRSGAWKDHWWSAVQPERRNAASSEEAKAEETGGGKEKGSGGSGGGSQPRAERSQLQGPSSSEYWKEWPSAESPYSQSSELSLTGASRSETPQNSPLPSSPIVPMSKPTKPSVPPLTPEQYEVYMYQEVDTIELTRQVKEKLAKNGICQRIFGEKVLGLSQGSVSDMLSRPKPWSKLTQKGREPFIRMQLWLNGELGQGVLPVQGQQQGPVLHSVTSLQDPLQQGCVSSESTPKTSASCSPAPESPMSSSESVKSLTELVQQPCPPIEASKDSKPPEPSDPPASDSQPTTPLPLSGHSALSIQELVAMSPELDTYGITKRVKEVLTDNNLGQRLFGETILGLTQGSVSDLLARPKPWHKLSLKGREPFVRMQLWLNDPNNVEKLMDMKRMEKKAYMKRRHSSVSDSQPCEPPSVGTEYSQGASPQPQHQLKKPRVVLAPEEKEALKRAYQQKPYPSPKTIEDLATQLNLKTSTVINWFHNYRSRIRRELFIEEIQAGSQGQAGASDSPSARSGRAAPSSEGDSCDGVEATEGPGSADTEEPKSQGEAEREEVPRPAEQTEPPPSGTPGPDDARDDDHEGGPVEGPGPLPSPASATATAAPAAPEDAATSAAAAPGEGPAAPSSAPPPSNSSSSSAPRRPSSLQSLFGLPEAAGARDSRDNPLRKKKAANLNSIIHRLEKAASREEPIEWEF

SEQ ID NO: 34389 - protein, 1129 aa, Artificial Sequence
  Synthetic polypeptide
GRARWLTPVIPALWEAEAGGLLERAEVAQREAETLREQLSSANHSLQLASQIQKAPDVEQAIEVLTRSSLEVELAAKEREIAQLVEDVQRLQASLTKLRENSASQISQLEQQLSAKNSTLKQLEEKLKGQADYEEVKKELNILKSMEFAPSEGAGTQDAAKPLEVLLLEKNRSLQSENAALRISNSDLSGPYSTNSISSQSPLQQSPDVNGMAPSPSQSESAGSVSEGEEMDTAEIARQVKEQLIKHNIGQRIFGHYVLGLSQGSVSEILARPKPWNKLTVRGKEPFHKMKQFLSDEQNILALRSIQGRQRAEPAQPSSASGSGNSDDAIRSILQQARREMEAQQAALDPALKQAPLSQSDITILTPKLLSTSPMPTVSSYPPLAISLKKPSAAPEAGASALPNPPALKKEAQDAPGLDPQGAADCAQGVLRQVKNEVGRSGAWKDHWWSAVQPERRNAASSEEAKAEETGGGKEKGSGGSGGGSQPRAERSQLQGPSSSEYWKEWPSAESPYSQSSELSLTGASRSETPQNSPLPSSPIVPMSKPTKPSVPPLTPEQYEVYMYQEVDTIELTRQVKEKLAKNGICQRIFGEKVLGLSQGSVSDMLSRPKPWSKLTQKGREPFIRMQLWLNGELGQGVLPVQGQQQGPVLHSVTSLQDPLQQGCVSSESTPKTSASCSPAPESPMSSSESVKSLTELVQQPCPPIEASKDSKPPEPSDPPASDSQPTTPLPLSGHSALSIQELVAMSPELDTYGITKRVKEVLTDNNLGQRLFGETILGLTQGSVSDLLARPKPWHKLSLKGREPFVRMQLWLNDPNNVEKLMDMKRMEKKAYMKRRHSSVSDSQPCEPPSVGTEYSQGASPQPQHQLKKPRVVLAPEEKEALKRAYQQKPYPSPKTIEDLATQLNLKTSTVINWFHNYRSRIRRELFIEEIQAGSQGQAGASDSPSARSGRAAPSSEGDSCDGVEATEGPGSADTEEPKSQGEAEREEVPRPAEQTEPPPSGTPGPDDARDDDHEGGPVEGPGPLPSPASATATAAPAAPEDAATSAAAAPGEGPAAPSSAPPPSNSSSSSAPRRPSSLQSLFGLPEAAGARDSRDNPLRKKKAANLNSIIHRLEKAASREEPIEWEF

SEQ ID NO: 34390 - protein, 41 aa, Artificial Sequence
  Synthetic polypeptide
VDPPVRSGANPAQASWNVSTKPCPSASASSRVNVKALKRNS

SEQ ID NO: 34391 - protein, 43 aa, Artificial Sequence
  Synthetic polypeptide
AHLPASHVCHREWILQSEVELTRPRPRGMSPPSPAQVQVQVHG

SEQ ID NO: 34392 - protein, 116 aa, Artificial Sequence
  Synthetic polypeptide
PGPGLVECLHQALPKCKCKFTGECKSFKEKFMKCLHNNNFENALCRKESKEYLECRMERSRLGLLHSGRLHLPELLGNPPEYPPGQQGEVRPPGRLGGGPSGVHGLPRERRRESQV

SEQ ID NO: 34393 - protein, 84 aa, Artificial Sequence
  Synthetic polypeptide
PGPGLVECLHQALPKCKCKFTGECKSFKEKFMKCLHNNNFENALCRKESKEYLECRMERKLMLQEPLEKLGFGDLTSGKSEAKK

SEQ ID NO: 34394 - protein, 18 aa, Artificial Sequence
  Synthetic polypeptide
IFKHAKIGCRVSEKTGKE

SEQ ID NO: 34395 - protein, 107 aa, Artificial Sequence
  Synthetic polypeptide
NIVIFSHKKEQTTDLYSNWDESLNMQKLDAEFQKRLEKNKIAAEEQTAKRRKKRQKLKEKKLLAKKMKLEQKKQEGPGQPKEQGSSSSAEASGTEEEEEVPSFTMGR

SEQ ID NO: 34396 - protein, 33 aa, Artificial Sequence
  Synthetic polypeptide
TCKNWMQSFRKDWKRIKLLQRSRPQSAGRSARS

SEQ ID NO: 34397 - protein, 118 aa, Artificial Sequence
  Synthetic polypeptide
NIVIFSHKKEQTTDLYSNWDESLNMQKLDAEFQKRLEKNKIAAEEQTAKRRKKRTRSAQGAGVQQLCGGIWNRGGGGSAQFHHGAMTMFATASAWNLARAVTRRERRLFGSFSPARTR

SEQ ID NO: 34398 - protein, 62 aa, Artificial Sequence
  Synthetic polypeptide
TCKNWMQSFRKDWKRIKLLQRSRPQSAGRSGPGQPKEQGSSSSAEASGTEEEEEVPSFTMGR

SEQ ID NO: 34399 - protein, 171 aa, Artificial Sequence
  Synthetic polypeptide
GQACWLTPVILTLWEAEVAMVEVQLETQYQYPRPLLIAFSACTTVLVAVHLFALLISTCILPNVEAVSNIHNLNSISESPHERMHPYIELAWGFSTVLGILLFLAEVVLLCWIKFLPVDARRQPGPPPGPGSHTGWQAALVSTIIMVPVGLIFVVFTIHFYRSLVRHKTER

SEQ ID NO: 34400 - protein, 24 aa, Artificial Sequence
  Synthetic polypeptide
HFGRPRWPWWRCSWRRSTSTRGRC

SEQ ID NO: 34401 - protein, 80 aa, Artificial Sequence
  Synthetic polypeptide
PGVLAHTCNPNTLGGRGGHGGGAAGDAVPVPAAAADCLQRLHHGAGGRAPVRPPHQHLHPAQCGGREQHPQPELHQRVPA

SEQ ID NO: 34402 - protein, 196 aa, Artificial Sequence
  Synthetic polypeptide
GQACWLTPVILTLWEAEVAMVEVQLETQYQYPRPLLIAFSACTTVLVAVHLFALLISTCILPNVEAVSNIHNLNSISESPHERMHPYIELAWGFSTVLGILLFLAEVVLLCWIKFLPVDARRQPGPPPGPGSHTGWQAALVSTIIMVPVGLIFVVFTIHFYRSLVRHKTERHNREIEELHKLKVQLDGHERSLQVL

SEQ ID NO: 34403 - protein, 154 aa, Artificial Sequence
  Synthetic polypeptide
GQACWLTPVILTLWEAEVAMVEVQLETQYQYPRPLLIAFSACTTVLVAVHLFALLISTCILPNVEAVSNIHNLNSISESPHERMHPYIELAWGFSTVLGILLFLAEVVLLCWIKFLPVDARRQPGPPPGPGSHTGWQAALVSTIIMVPVGLIFV

SEQ ID NO: 34404 - protein, 39 aa, Artificial Sequence
  Synthetic polypeptide
GQACWLTPVILTLWEAEVAMVEVQLETQYQYPRPLLIAF

SEQ ID NO: 34405 - protein, 38 aa, Artificial Sequence
  Synthetic polypeptide
PGVLAHTCNPNTLGGRGGHGGGAAGDAVPVPAAAADCL

SEQ ID NO: 34406 - protein, 32 aa, Artificial Sequence
  Synthetic polypeptide
HPVSKNKPVRIGAAFRAPGPQTPVPPDAAAGA

SEQ ID NO: 34407 - protein, 637 aa, Artificial Sequence
  Synthetic polypeptide
AMIAPRRLSDTPSLKINLSGLELLSEHLDPKLLCRLTQLQELDLSNNHLETLPDNLGLSHLRVLRCANNQLGDVTALCQFPKLEELSLEGNPFLTVNDNLKVSFLLPTLRKVNGKDASSTYSQVENLNRELTSRVTAHWEKFMATLGPEEEAEKAQADFVKSAVRDVRYGPESLSEFTQWRVRMISEELVAASRTQVQKANSPEKPPEAGAAHKPRARLAALKRPDDVPLSLSPSKRACASPSAQVEGSPVAGSDGSQPAVKLEPLHFLQCHSKNNSPQDLETQLWACAFEPAWEEGATSQTVATCGGEAVCVIDCQTGIVLHKYKAPGEEFFSVAWTALMVVTQAGHKKRWSVLAAAGLRGLVRLLHVRAGFCCGVIRAHKKAIATLCFSPAHETHLFTASYDKRIILWDIGVPNQDYEFQASQLLTLDTTSIPLRLCPVASCPDARLLAGCEGGCCCWDVRLDQPQKRRVCEVEFVFSEGSEASGRRVDGLAFVNEDIVASKGSGLGTICLWSWRQTWGGRGSQSTVAVVVLARLQWSSTELAYFSLSACPDKGIVLCGDEEGNVWLYDVSNILKQPPLLPAALQAPTQILKWPQPWALGQVVTKTMVNTVVANASFTYLTALTDSNIVAIWGRM

SEQ ID NO: 34408 - protein, 192 aa, Artificial Sequence
  Synthetic polypeptide
AMIAPRRLSDTPSLKINLSGLELLSEHLDPKLLCRLTQLQELDLSNNHLETLPDNLGLSHLRVLRCANNQLGDVTALCQFPKLEELSLEGNPFLTVNDNLKVSFLLPTLRKVNGKDASSTYSQVENLNRELTSRVTAHWEKFMATLGPEEEAEKAQADFVKSAVRDVRYGPESLSEFTQWRGWGHLGLCPAS

SEQ ID NO: 34409 - protein, 10 aa, Artificial Sequence
  Synthetic polypeptide
TWEVEVEDHH

SEQ ID NO: 34410 - protein, 133 aa, Artificial Sequence
  Synthetic polypeptide
KYKISRAWWQMPVIPATQKAEAGESLEPGKWRLRITINKDTKVPNACLFTINKEDHTLGNIIKSQLLKDPQVLFAGYKVPHPLEHKIIIRVQTTPDYSPQEAFTNAITDLISELSLLEERFRVAIKDKQEGIE

SEQ ID NO: 34411 - protein, 143 aa, Artificial Sequence
  Synthetic polypeptide
KYKISRAWWQMPVIPATQKAEAGESLEPGKWRLRITINKDTKVPNACLFTINKEDHTLGNIIKSQLLKDPQVLFAGYKVPHPLEHKIIIRVQTTPDYSPQEAFTNAITDLISELSLLEERFRVRAGPGGADGVAIKDKQEGIE

SEQ ID NO: 34412 - protein, 74 aa, Artificial Sequence
  Synthetic polypeptide
GRTWWLTPGIPELQEAEVGGSLEPRNLRPAWATHCPRAHQLCAPALKRHLGGEAHPVHLHAGAASRPVQQPQHL

SEQ ID NO: 34413 - protein, 232 aa, Artificial Sequence
  Synthetic polypeptide
DQPGQHTAPEHISYVPQLSNDTLAGRLTLSTFTLEQPLGQFSSHNISDLDTIWLVVALSNATQSFTAPRTNQDIPAPANFSQRGYYLTLRANRVLYQTRGQLHVLRVGNDTHCQPTKIGCNHPLPGPGPYRVKFLVMNDEGPVAETKWSSDTRLQQAQALRAVPGPQSPGTVVIIAILSILLAVLLTVLLAVLIYTCFNSCRSTSLSGPEEAGSVRRYTTHLAFSTPAEGAS

SEQ ID NO: 34414 - protein, 42 aa, Artificial Sequence
  Synthetic polypeptide
AQEFETSLGNTLPQSTSAMCPSSQTTPWRGGSPCPPSRWSSL

SEQ ID NO: 34415 - protein, 47 aa, Artificial Sequence
  Synthetic polypeptide
DQPGQHTAPEHISYVPQLSNDTLAGRLTLSTFTLEQPLGQFSSHNIS

SEQ ID NO: 34416 - protein, 153 aa, Artificial Sequence
  Synthetic polypeptide
DQPGQHTAPEHISYVPQLSNDTLAGRLTLSTFTLEQPLGQFSSHNISDLDTIWLVVALSNATQSFTAPRTNQDIPAPANFSQRGYYLTLRANRVLYQTRGQLHVLRVGNDTHCQPTKIGCNHPLPGPGPYRVKFLVMNDEGPVAETKWSSDTR

SEQ ID NO: 34417 - protein, 60 aa, Artificial Sequence
  Synthetic polypeptide
DQPGQHTAPEHISYVPQLSNDTLAGRLTLSTFTLEQPLGQFSSHNISDLDTIWLVVALSN

SEQ ID NO: 34418 - protein, 34 aa, Artificial Sequence
  Synthetic polypeptide
GRTWWLTPGIPELQEAEVGGSLEPRNLRPAWATQ

SEQ ID NO: 34419 - protein, 7 aa, Artificial Sequence
  Synthetic polypeptide
DQPGQHN

SEQ ID NO: 34420 - protein, 12 aa, Artificial Sequence
  Synthetic polypeptide
AQEFETSLGNTM

SEQ ID NO: 34421 - protein, 48 aa, Artificial Sequence
  Synthetic polypeptide
GRTWWLTPGIPELQEAELPQSTSAMCPSSQTTPWRGGSPCPPSRWSSL

SEQ ID NO: 34422 - protein, 57 aa, Artificial Sequence
  Synthetic polypeptide
AGHGGSHLESQNFRRLSCPRAHQLCAPALKRHLGGEAHPVHLHAGAASRPVQQPQHL

SEQ ID NO: 34423 - protein, 18 aa, Artificial Sequence
  Synthetic polypeptide
GRTWWLTPGIPELQEAEM

SEQ ID NO: 34424 - protein, 17 aa, Artificial Sequence
  Synthetic polypeptide
AGHGGSHLESQNFRRLR

SEQ ID NO: 34425 - protein, 6 aa, Artificial Sequence
  Synthetic polypeptide
MDEDHH

SEQ ID NO: 34426 - protein, 144 aa, Artificial Sequence
  Synthetic polypeptide
WMRITINKDTKVPNACLFTINKEDHTLGNIIKSQLLKDPQVLFAGYKVPHPLEHKIIIRVQTTPDYSPQEAFTNAITDLISELSLLEERFRVRAGPGGADGVGWTLARVPRPGTALACFFGGPQGEAAVMEEQGLPPQAPGHVD

SEQ ID NO: 34427 - protein, 101 aa, Artificial Sequence
  Synthetic polypeptide
WMRITINKDTKVPNACLFTINKEDHTLGNIIKSQLLKDPQVLFAGYKVPHPLEHKIIIRVQTTPDYSPQEAFTNAITDLISELSLLEERFRTCLLPLRLLP

SEQ ID NO: 34428 - protein, 102 aa, Artificial Sequence
  Synthetic polypeptide
WMRITINKDTKVPNACLFTINKEDHTLGNIIKSRACFPFAFCRDCQFPEASPATLPVQPAELCPRAHQLCAPALKRHLGGEAHPVHLHAGAASRPVQQPQHL

SEQ ID NO: 34429 - protein, 260 aa, Artificial Sequence
  Synthetic polypeptide
WMRITINKDTKVPNACLFTINKEDHTLGNIIKSRACFPFAFCRDCQFPEASPATLPVQPAELLAWKSPCATGKDINKHQEVSKSTRSHRHHVDIHLPVFPGKILLNCAALAKRAAPEHISYVPQLSNDTLAGRLTLSTFTLEQPLGQFSSHNISDLDTIWLVVALSNATQSFTAPRTNQDIPAPANFSQRGYYLTLRANRVLYQTRGQLHVLRVGNDTHCQPTKIGCNHPLPGPGPYRVKFLVMNDEGPVAETKWSSDTR

SEQ ID NO: 34430 - protein, 167 aa, Artificial Sequence
  Synthetic polypeptide
WMRITINKDTKVPNACLFTINKEDHTLGNIIKSRACFPFAFCRDCQFPEASPATLPVQPAELLAWKSPCATGKDINKHQEVSKSTRSHRHHVDIHLPVFPGKILLNCAALAKRAAPEHISYVPQLSNDTLAGRLTLSTFTLEQPLGQFSSHNISDLDTIWLVVALSN

SEQ ID NO: 34431 - protein, 62 aa, Artificial Sequence
  Synthetic polypeptide
WMRITINKDTKVPNACLFTINKEDHTLGNIIKSRACFPFAFCRDCQFPEASPATLPVQPAEL

SEQ ID NO: 34432 - protein, 59 aa, Artificial Sequence
  Synthetic polypeptide
WMRITINKDTKVPNACLFTINKEDHTLGNIIKSLECNGTILLTATSASRVQVILLLQPS

SEQ ID NO: 34433 - protein, 101 aa, Artificial Sequence
  Synthetic polypeptide
ARITINKDTKVPNACLFTINKEDHTLGNIIKSQLLKDPQVLFAGYKVPHPLEHKIIIRVQTTPDYSPQEAFTNAITDLISELSLLEERFRVAIKDKQEGIE

SEQ ID NO: 34434 - protein, 34 aa, Artificial Sequence
  Synthetic polypeptide
PGSPLTRTPRYPMPVYSPSTKKTTHWETSLNHNS

SEQ ID NO: 34435 - protein, 4 aa, Artificial Sequence
  Synthetic polypeptide
QDHH

SEQ ID NO: 34436 - protein, 111 aa, Artificial Sequence
  Synthetic polypeptide
ARITINKDTKVPNACLFTINKEDHTLGNIIKSQLLKDPQVLFAGYKVPHPLEHKIIIRVQTTPDYSPQEAFTNAITDLISELSLLEERFRVRAGPGGADGVAIKDKQEGIE

SEQ ID NO: 34437 - protein, 76 aa, Artificial Sequence
  Synthetic polypeptide
PGAVAHACNLSTLGGRGGWIMRSGVQDQPGQHGATWAPCSWRCGCGTRRCCPPATTSHWCTCCATRSSWACRAQGS

SEQ ID NO: 34438 - protein, 101 aa, Artificial Sequence
  Synthetic polypeptide
DQEFKTSLANMGQPGLLAAGGAAAGRDGAALQLLPATGAPAVPRGQAGHAGPRAADPTHRGDNQHRVSPGRGHEPAQALPGAGAGQGLPGPALPAGAESHQ

SEQ ID NO: 34439 - protein, 581 aa, Artificial Sequence
  Synthetic polypeptide
SQHFGWPRRVDHEIRSSRPAWPTWGNLGSLQLEVRLRDETVLPSSYYQPLVHLLCHEVKLGMQGPGQLIPLIEETTSTECRQDVATNLLKLFLGQGLAKDFLDLLFQLELSRTSETNTLFRSNSLASKSMESFLKVAGMQYLHGVLGPIINKVFEEKKYVELDPSKVEVKDVGCSGLHRPQTEAEVLEQSAQTLRAHLGALLSALSRSVRACPAVVRATFRQLFRRVRERFPGAQHENVPFIAVTSFLCLRFFSPAIMSPKLFHLRERHADARTSRTLLLLAKAVQNVGNMDTPASRAKEAWMEPLQPTVRQGVAQLKDFITKLVDIEEKDELDLQRTLSLQAPPVKEGPLFIHRTKGKGPLMSSSFKKLYFSLTTEALSFAKTPSSKKSALIKLANIRAAEKVEEKSFGGSHVMQVIYTDDAGRPQTAYLQCKCVNELNQWLSALRKVSINNTGLLGSYHPGVFRGDKWSCCHQKEKTGQGCDKTRSRVTLQEWNDPLDHDLEAQLIYRHLLGVEAMLWERHRELSGGAEAGTVPTSPGKVPEDSLARLLRVLQDLREAHSSSPAGSPPSEPNCLLELQT

SEQ ID NO: 34440 - protein, 535 aa, Artificial Sequence
  Synthetic polypeptide
SQHFGWPRRVDHEIRSSRPAWPTWGNLGSLQLEVRLRDETVLPSSYYQPLVHLLCHEVKLGMQGPGQLIPLIEETTSTECRQDVATNLLKLFLGQGLAKDFLDLLFQLELSRTSETNTLFRSNSLASKSMESFLKVAGMQYLHGVLGPIINKVFEEKKYVELDPSKVEVKDVGCSGLHRPQTEAEVLEQSAQTLRAHLGALLSALSRSVRACPAVVRATFRQLFRRVRERFPGAQHENVPFIAVTSFLCLRFFSPAIMSPKLFHLRERHADARTSRTLLLLAKAVQNVGNMDTPASRAKEAWMEPLQPTVRQGVAQLKDFITKLVDIEEKDELDLQRTLSLQAPPVKEGPLFIHRTKGKGPLMSSSFKKLYFSLTTEALSFAKTPSSKCVNELNQWLSALRKVSINNTGLLGSYHPGVFRGDKWSCCHQKEKTGQGCDKTRSRVTLQEWNDPLDHDLEAQLIYRHLLGVEAMLWERHRELSGGAEAGTVPTSPGKVPEDSLARLLRVLQDLREAHSSSPAGSPPSEPNCLLELQT

SEQ ID NO: 34441 - protein, 103 aa, Artificial Sequence
  Synthetic polypeptide
SQHFGWPRRVDHEIRSSRPAWPTWGNLGSLQLEVRLRDETVLPSSYYQPLVHLLCHEVKLGMQGPGQLIPLIEETTSTECRQDVATNLLKLFLGQGLAKDFLD

SEQ ID NO: 34442 - protein, 90 aa, Artificial Sequence
  Synthetic polypeptide
DQEFKTSLANMGQPGLLAAGGAAAGRDGAALQLLPATGAPAVPRGQAGHAGPRAADPTHRGDNQHRVSPGRGHEPAQALPGAGAGQGLPG

SEQ ID NO: 34443 - protein, 53 aa, Artificial Sequence
  Synthetic polypeptide
SQHFGRPRQVVHLRPGVQDQPDHHGIWPQRTAMAHLTPSSECATRAGHGRPRS

SEQ ID NO: 34444 - protein, 22 aa, Artificial Sequence
  Synthetic polypeptide
GQEFKTSLTTMGSGPKGPQWHI

SEQ ID NO: 34445 - protein, 617 aa, Artificial Sequence
  Synthetic polypeptide
PPWDLAPKDRNGTSDPFVRVRYKGRTRETSIVKKSCYPRWNETFEFELQEGAMEALCVEAWDWDLVSRNDFLGKVVIDVQRLRVVQQEEGWFRLQPDQSKSRRHDEGNLGSLQLEVRLRDETVLPSSYYQPLVHLLCHEVKLGMQGPGQLIPLIEETTSTECRQDVATNLLKLFLGQGLAKDFLDLLFQLELSRTSETNTLFRSNSLASKSVESFLKVAGMQYLHGVLGPIINKVFEEKKYVELDPSKVEVKDVGCSGLHRPQTEAEVLEQSAQTLRAHLGALLSALSRSVRACPAVVRATFRQLFRRVRERFPGAQHENVPFIAVTSFLCLRFFSPAIMSPKLFHLRERHADARTSRTLLLLAKAVQNVGNMDTPASRAKEAWMEPLQPTVHQGVAQLKDFITKLVDIEEKDELDLQRTLSLQAPPVKEGPLFIHRTKGKGPLMSSSFKKLYFSLTTEALSFAKTPSSKCVNELNQWLSALRKVSINNTGLLGSYHPGVFRGDKWSCCHQKEKTGQGCDKTRSRVTLQEWNDPLDHDLEAQLIYRHLLGVEAMLWERHRELSGGAEAGTVPTSPGKVPEDSLARLLRVLQDLREAHSSSPAGSPPSEPNCLLELQT

SEQ ID NO: 34446 - protein, 663 aa, Artificial Sequence
  Synthetic polypeptide
PPWDLAPKDRNGTSDPFVRVRYKGRTRETSIVKKSCYPRWNETFEFELQEGAMEALCVEAWDWDLVSRNDFLGKVVIDVQRLRVVQQEEGWFRLQPDQSKSRRHDEGNLGSLQLEVRLRDETVLPSSYYQPLVHLLCHEVKLGMQGPGQLIPLIEETTSTECRQDVATNLLKLFLGQGLAKDFLDLLFQLELSRTSETNTLFRSNSLASKSVESFLKVAGMQYLHGVLGPIINKVFEEKKYVELDPSKVEVKDVGCSGLHRPQTEAEVLEQSAQTLRAHLGALLSALSRSVRACPAVVRATFRQLFRRVRERFPGAQHENVPFIAVTSFLCLRFFSPAIMSPKLFHLRERHADARTSRTLLLLAKAVQNVGNMDTPASRAKEAWMEPLQPTVHQGVAQLKDFITKLVDIEEKDELDLQRTLSLQAPPVKEGPLFIHRTKGKGPLMSSSFKKLYFSLTTEALSFAKTPSSKKSALIKLANIRAAEKVEEKSFGGSHVMQVIYTDDAGRPQTAYLQCKCVNELNQWLSALRKVSINNTGLLGSYHPGVFRGDKWSCCHQKEKTGQGCDKTRSRVTLQEWNDPLDHDLEAQLIYRHLLGVEAMLWERHRELSGGAEAGTVPTSPGKVPEDSLARLLRVLQDLREAHSSSPAGSPPSEPNCLLELQT

SEQ ID NO: 34447 - protein, 74 aa, Artificial Sequence; identical to SEQ ID NO: 34412
  Synthetic polypeptide

SEQ ID NO: 34448 - protein, 232 aa, Artificial Sequence; identical to SEQ ID NO: 34413
  Synthetic polypeptide

SEQ ID NO: 34449 - protein, 42 aa, Artificial Sequence; identical to SEQ ID NO: 34414
  Synthetic polypeptide

SEQ ID NO: 34450 - protein, 47 aa, Artificial Sequence; identical to SEQ ID NO: 34415
  Synthetic polypeptide

SEQ ID NO: 34451 - protein, 153 aa, Artificial Sequence; identical to SEQ ID NO: 34416
  Synthetic polypeptide

SEQ ID NO: 34452 - protein, 60 aa, Artificial Sequence; identical to SEQ ID NO: 34417
  Synthetic polypeptide

SEQ ID NO: 34453 - protein, 34 aa, Artificial Sequence; identical to SEQ ID NO: 34418
  Synthetic polypeptide

SEQ ID NO: 34454 - protein, 7 aa, Artificial Sequence
  Synthetic polypeptide
DQPGQHN

SEQ ID NO: 34455 - protein, 12 aa, Artificial Sequence
  Synthetic polypeptide
AQEFETSLGNTM

SEQ ID NO: 34456 - protein, 74 aa, Artificial Sequence; identical to SEQ ID NO: 34412
  Synthetic polypeptide

SEQ ID NO: 34457 - protein, 232 aa, Artificial Sequence; identical to SEQ ID NO: 34413
  Synthetic polypeptide

SEQ ID NO: 34458 - protein, 42 aa, Artificial Sequence; identical to SEQ ID NO: 34414
  Synthetic polypeptide

SEQ ID NO: 34459 - protein, 47 aa, Artificial Sequence; identical to SEQ ID NO: 34415
  Synthetic polypeptide

SEQ ID NO: 34460 - protein, 265 aa, Artificial Sequence
  Synthetic polypeptide
DQPGQHTAPEHISYVPQLSNDTLAGRLTLSTFTLEQPLGQFSSHNISDLDTIWLVVALSNATQSFTAPRTNQDIPAPANFSQRGYYLTLRANRVLYQTRGQLHVLRVGNDTHCQPTKIGCNHPLPGPGPYRVKFLVMNDEGPVAETKWSSDTRLQQAQALRAVPGPQSPGTVVIIAILSILLAVLLTVLLAVLIYTCPSSSPSSPAQVPPLPGSPLGPSPVSVGAVCPWLLPESIAEIWTQDSGLPALGWQHWQQRPLLHREGGQ

SEQ ID NO: 34461 - protein, 100 aa, Artificial Sequence
  Synthetic polypeptide
GRTWWLTPGIPELQEAEVGGSLEPRNLRPAWATQALCGTVPAASVAVAATDPCPAWDRRGCPRAHQLCAPALKRHLGGEAHPVHLHAGAASRPVQQPQHL

SEQ ID NO: 34462 - protein, 258 aa, Artificial Sequence
  Synthetic polypeptide
DQPGQHRLSAGQSQLLVSLLLLLTRVQPGTDVAAPEHISYVPQLSNDTLAGRLTLSTFTLEQPLGQFSSHNISDLDTIWLVVALSNATQSFTAPRTNQDIPAPANFSQRGYYLTLRANRVLYQTRGQLHVLRVGNDTHCQPTKIGCNHPLPGPGPYRVKFLVMNDEGPVAETKWSSDTRLQQAQALRAVPGPQSPGTVVIIAILSILLAVLLTVLLAVLIYTCFNSCRSTSLSGPEEAGSVRRYTTHLAFSTPAEGAS

SEQ ID NO: 34463 - protein, 20 aa, Artificial Sequence
  Synthetic polypeptide
AQEFETSLGNTGSLRDSPSC

SEQ ID NO: 34464 - protein, 291 aa, Artificial Sequence
  Synthetic polypeptide
DQPGQHRLSAGQSQLLVSLLLLLTRVQPGTDVAAPEHISYVPQLSNDTLAGRLTLSTFTLEQPLGQFSSHNISDLDTIWLVVALSNATQSFTAPRTNQDIPAPANFSQRGYYLTLRANRVLYQTRGQLHVLRVGNDTHCQPTKIGCNHPLPGPGPYRVKFLVMNDEGPVAETKWSSDTRLQQAQALRAVPGPQSPGTVVIIAILSILLAVLLTVLLAVLIYTCPSSSPSSPAQVPPLPGSPLGPSPVSVGAVCPWLLPESIAEIWTQDSGLPALGWQHWQQRPLLHREGGQ

SEQ ID NO: 34465 - protein, 18 aa, Artificial Sequence
  Synthetic polypeptide
GRTWWLTPGIPELQEAEM

SEQ ID NO: 34466 - protein, 17 aa, Artificial Sequence
  Synthetic polypeptide
AGHGGSHLESQNFRRLR

SEQ ID NO: 34467 - protein, 48 aa, Artificial Sequence; identical to SEQ ID NO: 34421
  Synthetic polypeptide

SEQ ID NO: 34468 - protein, 57 aa, Artificial Sequence; identical to SEQ ID NO: 34422
  Synthetic polypeptide

SEQ ID NO: 34469 - protein, 101 aa, Artificial Sequence; identical to SEQ ID NO: 34433
  Synthetic polypeptide

SEQ ID NO: 34470 - protein, 34 aa, Artificial Sequence; identical to SEQ ID NO: 34434
  Synthetic polypeptide

SEQ ID NO: 34471 - protein, 4 aa, Artificial Sequence
  Synthetic polypeptide
QDHH

SEQ ID NO: 34472 - protein, 111 aa, Artificial Sequence; identical to SEQ ID NO: 34436
  Synthetic polypeptide

SEQ ID NO: 34473 - protein, 34 aa, Artificial Sequence; identical to SEQ ID NO: 34434
  Synthetic polypeptide

SEQ ID NO: 34474 - protein, 4 aa, Artificial Sequence
  Synthetic polypeptide
QDHH

SEQ ID NO: 34475 - protein, 143 aa, Artificial Sequence
  Synthetic polypeptide
ARITINKDTKVPNACLFTINKEDHTLGNIIKSQLLKDPQVLFAGYKVPHPLEHKIIIRVQTTPDYSPQEAFTNAITDLISELSLLEERFRVRAGPGGADGVGWTLARVPRPGTALACFFGGPQGEAAVMEEQGLPPQAPGHVD

SEQ ID NO: 34476 - protein, 100 aa, Artificial Sequence
  Synthetic polypeptide
ARITINKDTKVPNACLFTINKEDHTLGNIIKSQLLKDPQVLFAGYKVPHPLEHKIIIRVQTTPDYSPQEAFTNAITDLISELSLLEERFRTCLLPLRLLP

SEQ ID NO: 34477 - protein, 101 aa, Artificial Sequence
  Synthetic polypeptide
ARITINKDTKVPNACLFTINKEDHTLGNIIKSRACFPFAFCRDCQFPEASPATLPVQPAELCPRAHQLCAPALKRHLGGEAHPVHLHAGAASRPVQQPQHL

SEQ ID NO: 34478 - protein, 101 aa, Artificial Sequence
  Synthetic polypeptide
PGSPLTRTPRYPMPVYSPSTKKTTHWETSLNHVPASPSPSAVIVSFLRPPQPRFLYSLQNSAPEHISYVPQLSNDTLAGRLTLSTFTLEQPLGQFSSHNIS

SEQ ID NO: 34479 - protein, 259 aa, Artificial Sequence
  Synthetic polypeptide
ARITINKDTKVPNACLFTINKEDHTLGNIIKSRACFPFAFCRDCQFPEASPATLPVQPAELLAWKSPCATGKDINKHQEVSKSTRSHRHHVDIHLPVFPGKILLNCAALAKRAAPEHISYVPQLSNDTLAGRLTLSTFTLEQPLGQFSSHNISDLDTIWLVVALSNATQSFTAPRTNQDIPAPANFSQRGYYLTLRANRVLYQTRGQLHVLRVGNDTHCQPTKIGCNHPLPGPGPYRVKFLVMNDEGPVAETKWSSDTR

SEQ ID NO: 34480 - protein, 103 aa, Artificial Sequence
  Synthetic polypeptide
PGSPLTRTPRYPMPVYSPSTKKTTHWETSLNHVPASPSPSAVIVSFLRPPQPRFLYSLQNFWHGKAPVQLVKISISTRRYLNPPGAIGITLTSIYQSSLARFF

SEQ ID NO: 34481 - protein, 166 aa, Artificial Sequence
  Synthetic polypeptide
ARITINKDTKVPNACLFTINKEDHTLGNIIKSRACFPFAFCRDCQFPEASPATLPVQPAELLAWKSPCATGKDINKHQEVSKSTRSHRHHVDIHLPVFPGKILLNCAALAKRAAPEHISYVPQLSNDTLAGRLTLSTFTLEQPLGQFSSHNISDLDTIWLVVALSN

SEQ ID NO: 34482 - protein, 61 aa, Artificial Sequence
  Synthetic polypeptide
ARITINKDTKVPNACLFTINKEDHTLGNIIKSRACFPFAFCRDCQFPEASPATLPVQPAEL

SEQ ID NO: 34483 - protein, 61 aa, Artificial Sequence
  Synthetic polypeptide
PGSPLTRTPRYPMPVYSPSTKKTTHWETSLNHVPASPSPSAVIVSFLRPPQPRFLYSLQNY

SEQ ID NO: 34484 - protein, 61 aa, Artificial Sequence
  Synthetic polypeptide
PGSPLTRTPRYPMPVYSPSTKKTTHWETSLNHVPASPSPSAVIVSFLRPPQPRFLYSLQNC

SEQ ID NO: 34485 - protein, 58 aa, Artificial Sequence
  Synthetic polypeptide
ARITINKDTKVPNACLFTINKEDHTLGNIIKSLECNGTILLTATSASRVQVILLLQPS

SEQ ID NO: 34486 - protein, 50 aa, Artificial Sequence
  Synthetic polypeptide
PGSPLTRTPRYPMPVYSPSTKKTTHWETSLNRWSAMARSCSLQPPPPGFK

SEQ ID NO: 34487 - protein, 4 aa, Artificial Sequence
  Synthetic polypeptide
QDHH

SEQ ID NO: 34488 - protein, 100 aa, Artificial Sequence
  Synthetic polypeptide
ARITINKDTKVPKACLFTINKEDHTLGNIIKSQLLKDPQVLFAGYKVPHPLEHKIIIRVQTTPDYSPQEAFTNAITDLISELSLLEERFRTCLLPLRLLP

SEQ ID NO: 34489 - protein, 34 aa, Artificial Sequence
  Synthetic polypeptide
PGSPLTRTPRYPRPAYSPSTKKTTHWETSLNHNS

SEQ ID NO: 34490 - protein, 101 aa, Artificial Sequence
  Synthetic polypeptide
ARITINKDTKVPKACLFTINKEDHTLGNIIKSRACFPFAFCRDCQFPEASPATLPVQPAELCPRAHQLCAPALKRHLGGEAHPVHLHAGAASRPVQQPQHL

SEQ ID NO: 34491 - protein, 101 aa, Artificial Sequence
  Synthetic polypeptide
PGSPLTRTPRYPRPAYSPSTKKTTHWETSLNHVPASPSPSAVIVSFLRPPQPRFLYSLQNSAPEHISYVPQLSNDTLAGRLTLSTFTLEQPLGQFSSHNIS

SEQ ID NO: 34492 - protein, 143 aa, Artificial Sequence
  Synthetic polypeptide
ARITINKDTKVPKACLFTINKEDHTLGNIIKSQLLKDPQVLFAGYKVPHPLEHKIIIRVQTTPDYSPQEAFTNAITDLISELSLLEERFRVRAGPGGADGVGWTLARVPRPGTALACFFGGPQGEAAVMEEQGLPPQAPGHVD

SEQ ID NO: 34493 - protein, 56 aa, Artificial Sequence
  Synthetic polypeptide
TLDNYGHKDGNSRNWSLLDGGWRDGARVEKLLGTMPSTWVMGSFVPQTSTSHNIPR

SEQ ID NO: 34494 - protein, 143 aa, Artificial Sequence
  Synthetic polypeptide
WDHLYPRLQHHTIYPGNITLQSKMGNITVDSSSGCLKASTNQGAIDVYVSQLGKVELKSHKGSIIVKVPSSLQAHLQLSGKEVDVNSEVHVQEMAEVRKDDVVTVTGLMNQASKREKWIKADAPKGTVSFRRQSWFQSLKLQD

SEQ ID NO: 34495 - protein, 21 aa, Artificial Sequence
  Synthetic polypeptide
YLGDGIICTPDFNITQYTQVI

SEQ ID NO: 34496 - protein, 45 aa, Artificial Sequence
  Synthetic polypeptide
GWSQDAEYEQLQSTAASVSDAEDRFYYCQGPIFTSSSFTVIRERG

SEQ ID NO: 34497 - protein, 87 aa, Artificial Sequence
  Synthetic polypeptide
ATQKTGSIIVKVPSSLQAHLQLSGKEVDVNSEVHVQEMAEVRKDDVVTVTGLMNQASKREKWIKADAPKGTVSFRRQSWFQSLKLQD

SEQ ID NO: 34498 - protein, 40 aa, Artificial Sequence
  Synthetic polypeptide
IRTAPVYSCQRERRRRQVLLLSRSHLHFKLIYSYQGKRLM

SEQ ID NO: 34499 - protein, 28 aa, Artificial Sequence
  Synthetic polypeptide
KNPKDSTKKLLEPLTSSRCSHYILERTD

SEQ ID NO: 34500 - protein, 28 aa, Artificial Sequence
  Synthetic polypeptide
LHRDAVIIFWREQIKKYTGCYPSCSECS

SEQ ID NO: 34501 - protein, 495 aa, Artificial Sequence
  Synthetic polypeptide
YIYWKVKLLLITDCIIMCIEKSKGFYKKATRTTDFIEMQSLYFGENRLRSTQAATQVVLNVPETRVTCLESGLRVASEDSGLSTCTVGLWIDAGSRYENEKNNGTAHFLEHMAFKGTKKRSQLDLELEIENMGAHLNAYTSREQTVYYAKAFSKDLPRAVEILADIIQNSTLGEAEIERERGVILREMQEVETNLQEVVFDYLHATAYQNTALGRTILGPTENIKSISRKDLVDYITTHYKGPRIVLAAAGGVSHDELLDLAKFHFGDSLCTHKGEIPALPPCKFTGSEIRVRDDKMPLAHLAIAVEAVGWAHPDTICLMVANTLIGNWDRSFGGGMNLSSKLAQLTCHGNLCHSFQSFNTSYTDTGLWGLYMVCESSTVADMLHVVQKEWMRLCTSVTESEVARARNLLKTNMLLQLDGSTPICEDIGRQMLCYNRRIPIPELEARIDAVNAETIREVCTKYIYNRSPAIAAVGPIKQLPDFKQIRSNMCWLRD

SEQ ID NO: 34502 - protein, 496 aa, Artificial Sequence
  Synthetic polypeptide
YIYWKVKLLLITDCIIMCIEKSKGFYKKATRTTDFIEMQSLYFGENRLRSTQAATQVVLNVPETRVTCLESGLRVASEDSGLSTCTVGLWIDAGSRYENEKNNGTAHFLEHMAFKGTKKRSQLDLELEIENMGAHLNAYTSREQTVYYAKAFSKDLPRAVEILADIIQNSTLGEAEIERERGVILREMQEVETNLQEVVFDYLHATAYQNTALGRTILGPTENIKSISRKDLVDYITTHYKGPRIVLAAAGGVSHDELLDLAKFHFGDSLCTHKGEIPALPPCKFTGSEIRVRDDKMPLAHLAIAVEAVGWAHPDTICLMVANTLIGNWDRSFGGGMNLSSKLAQLTCHGNLCHSFQSFNTSYTDTGLWGLYMVCESSTVADMLHVVQKEWMRLCTSVTESEVARARNLLKTNMLLQLDGSTPICEDIGRQMLCYNRRIPIPELEARIDAVNAETIREVCTKYIYNRSPAIAAVGKPGFFSSMQKVGQVLLINSSF

SEQ ID NO: 34503 - protein, 208 aa, Artificial Sequence
  Synthetic polypeptide
YIYWKVKLLLITDCIIMCIEKSKGFYKKATRTTDFIEMQSLYFGENRLRSTQAATQVVLNVPETRVTCLESGLRVASEDSGLSTCTVGLWIDAGSRYENEKNNGTAHFLEHMAFKGTKKRSQLDLELEIENMGAHLNAYTSREQTVYYAKAFSKDLPRAYQNTALGRTILGPTENIKSISRKDLVDYITTHYKGPRIVLAAAGDSCEG

SEQ ID NO: 34504 - protein, 128 aa, Artificial Sequence
  Synthetic polypeptide
YIYWKVKLLLITDCIIMCIEKSKGFYKKATRTTDFIEMQSLYFGENRLRSTQAATQVVLNVPETRVTCLESGLRVASEDSGLSTCTVGLWIDAGSRYENEKNNGTAHFLEHMAFKARHQEEIPVRSGT

SEQ ID NO: 34505 - protein, 125 aa, Artificial Sequence
  Synthetic polypeptide
YIYWKVKLLLITDCIIMCIEKSKGFYKKATRTTDFIEMQSLYFGENRLRSTQAATQVVLNVPETRVTCLESGLRVASEDSGLSTCTVGLWIDAGSRYENEKNNGTAHFLEHMAFKAKEIPVRSGT

SEQ ID NO: 34506 - protein, 161 aa, Artificial Sequence
  Synthetic polypeptide
YTKNLSSKLAQLTCHGNLCHSFQSFNTSYTDTGLWGLYMVCESSTVADMLHVVQKEWMRLCTSVTESEVARARNLLKTNMLLQLDGSTPICEDIGRQMLCYNRRIPIPELEARIDAVNAETIREVCTKYIYNRSPAIAAVGPIKQLPDFKQIRSNMCWLRD

SEQ ID NO: 34507 - protein, 75 aa, Artificial Sequence
  Synthetic polypeptide
IPRIYLASWPSSLVMAIFAIAFSLSTLPTQIQDYGDCIWFVNHPLLQTCYMLFKKNGCDSVQVSQKVRLHEPEIF

SEQ ID NO: 34508 - protein, 5 aa, Artificial Sequence
  Synthetic polypeptide
YQEFI

SEQ ID NO: 34509 - protein, 162 aa, Artificial Sequence
  Synthetic polypeptide
YTKNLSSKLAQLTCHGNLCHSFQSFNTSYTDTGLWGLYMVCESSTVADMLHVVQKEWMRLCTSVTESEVARARNLLKTNMLLQLDGSTPICEDIGRQMLCYNRRIPIPELEARIDAVNAETIREVCTKYIYNRSPAIAAVGKPGFFSSMQKVGQVLLINSSF

SEQ ID NO: 34510 - protein, 180 aa, Artificial Sequence
  Synthetic polypeptide
YTKNLSSKLAQLTCHGNLCHSFQSFNTSYTDTGLWGLYMVCESSTVADMLHVVQKEWMRLCTSVTESEVARARNLLKTNMLLQLDGSTPICEDIGRQMLCYNRRIPIPELEARIDAVNAETIREVCTKYIYNRSPAIAAVGYNHRSELHEWKWNKLFSKRQTISYSYVNILLPQPQPQYV

SEQ ID NO: 34511 - protein, 5 aa, Artificial Sequence
  Synthetic polypeptide
PGLPL

SEQ ID NO: 34512 - protein, 25 aa, Artificial Sequence
  Synthetic polypeptide
TVIKPCHSSLDYLSSDPSAVNPGWP

SEQ ID NO: 34513 - protein, 60 aa, Artificial Sequence
  Synthetic polypeptide
SSHATLAWITSLVTLQLLTLVGHDDQLDGPKYKCTVSLDFIRAIARTVNFDIIKYLYDFL

SEQ ID NO: 34514 - protein, 190 aa, Artificial Sequence
  Synthetic polypeptide
CFTHIIPALWEAKAGQLLEHGSSRPAWETCSQWEKLQKDDTDPGQLKGLSAHTHVELPYYSKFILIAAYLASYNPARTDKRFFLKHHGKIKKTNFLKKHEKTSNHLLGPKPFPLDRLLAILYSIVDSRVAPTANIFSQITSLVTLQLLTLVGHDDQLDGPKYKCTVSLDFIRAIARTVNFDIIKYLYDFL

SEQ ID NO: 34515 - protein, 40 aa, Artificial Sequence
  Synthetic polypeptide
FQHFGRPRQDNCLSMGVQDQPGKHVPSGKSYRKMTQIRGN

SEQ ID NO: 34516 - protein, 20 aa, Artificial Sequence
  Synthetic polypeptide
AWEFKTSLGNMFPVGKATER

SEQ ID NO: 34517 - protein, 79 aa, Artificial Sequence
  Synthetic polypeptide
CFTHIIPALWEAKAGQLLEHGSSRPAWETCSQWEKLQKDDTDPGQLKGIRGSIETVTGDTSSANYQDTKVNTKEHSVRK

SEQ ID NO: 34518 - protein, 19 aa, Artificial Sequence
  Synthetic polypeptide
VRIPAPTLTSCVTLSEFLY

SEQ ID NO: 34519 - protein, 8 aa, Artificial Sequence
  Synthetic polypeptide
VSFSIRIP

SEQ ID NO: 34520 - protein, 47 aa, Artificial Sequence
  Synthetic polypeptide
QDPSLQKAGASTESSFSSSSSTATTTTTATFARPHTPGARGGDPGIR

SEQ ID NO: 34521 - protein, 708 aa, Artificial Sequence
  Synthetic polypeptide
ILKAGRLYRQEDCLSPGVRDQSRQHSKTHLYKRPEPQQKAPLVPPPPPPPPPPPPPLPDPTPPEPEEEILGSDDEEQEDPADYCKGGYHPVKIGDLFNGRYHVIRKLGWGHFSTVWLCWDMQGKRFVAMKVVKSAQHYTETALDEIKLLKCVRESDPSDPNKDMVVQLIDDFKISGMNGIHVCMVFEVLGHHLLKWIIKSNYQGLPVRCVKSIIRQVLQGLDYLHSKCKIIHTDIKPENILMCVDDAYVRRMAAEATEWQKAGAPPPSGSAVSTAPQQKPIGKISKNKKKKLKKKQKRQAELLEKRLQEIEELEREAERKIIEENITSAAPSNDQDGEYCPEVKLKTTGLEEAAEAETAKDNGEAEDQEEKEDAEKENIEKDEDDVDQELANIDPTWIESPKTNGHIENGPFSLEQQLDDEDDDEEDCPNPEEYNLDEPNAESDYTYSSSYEQFNGELPNGRHKIPESQFPEFSTSLFSGSLEPVACGSVLSEGSPLTEQEESSPSHDRSRTVSASSTGDLPKAKTRAADLLVNPLDPRNADKIRVKIADLGNACWVHKHFTEDIQTRQYRSIEVLIGAGYSTPADIWSTACMAFELATGDYLFEPHSGEDYSRDEDHIAHIIELLGSIPRHFALSGKYSREFFNRRGELRHITKLKPWSLFDVLVEKYGWPHEDAAQFTDFLIPMLEMVPEKRASAGECLRHPWLNS

SEQ ID NO: 34522 - protein, 27 aa, Artificial Sequence
  Synthetic polypeptide
AQEFETSLGNIARPISTKGRSLNRKLL

SEQ ID NO: 34523 - protein, 203 aa, Artificial Sequence
  Synthetic polypeptide
ILKAGRLYRQEDCLSPGVRDQSRQHSKTHLYKRPEPQQKAPLVPPPPPPPPPPPPPLPDPTPPEPEEEILGSDDEEQEDPADYCKGGYHPVKIGDLFNGRYHVIRKLGWGHFSTVWLCWDMQGKRFVAMKVVKSAQHYTETALDEIKLLKCVRESDPSDPNKDMVVQLIDDFKISGMNGIHVCMVFEVLGHHLLKWIIKSNYQ

SEQ ID NO: 34524 - protein, 180 aa, Artificial Sequence
  Synthetic polypeptide
ILKAGRLYRQEDCLSPGVRDQSRQHSKTHLYKRPEPQQKAPLVPPPPPPPPPPPPPLPDPTPPEPEEEILGSDDEEQEDPADYCKGGYHPVKIGDLFNGRYHVIRKLGWGHFSTVWLCWDMQGKRFVAMKVVKSAQHYTETALDEIKLLKCVRESDPSDPNKDMVVQLIDDFKISGMNGI

SEQ ID NO: 34525 - protein, 57 aa, Artificial Sequence
  Synthetic polypeptide
HLDSPAKLLPNCWTTKTAGASTESSFSSSSSTATTTTTATFARPHTPGARGGDPGIR

SEQ ID NO: 34526 - protein, 709 aa, Artificial Sequence
  Synthetic polypeptide
QVFQPPSSLQMTAASSDILTHQLNCSQIAGPQKLPEPQQKAPLVPPPPPPPPPPPPPLPDPTPPEPEEEILGSDDEEQEDPADYCKGGYHPVKIGDLFNGRYHVIRKLGWGHFSTVWLCWDMQGKRFVAMKVVKSAQHYTETALDEIKLLKCVRESDPSDPNKDMVVQLIDDFKISGMNGIHVCMVFEVLGHHLLKWIIKSNYQGLPVRCVKSIIRQVLQGLDYLHSKCKIIHTDIKPENILMCVDDAYVRRMAAEATEWQKAGAPPPSGSAVSTAPQQKPIGKISKNKKKKLKKKQKRQAELLEKRLQEIEELEREAERKIIEENITSAAPSNDQDGEYCPEVKLKTTGLEEAAEAETAKDNGEAEDQEEKEDAEKENIEKDEDDVDQELANIDPTWIESPKTNGHIENGPFSLEQQLDDEDDDEEDCPNPEEYNLDEPNAESDYTYSSSYEQFNGELPNGRHKIPESQFPEFSTSLFSGSLEPVACGSVLSEGSPLTEQEESSPSHDRSRTVSASSTGDLPKAKTRAADLLVNPLDPRNADKIRVKIADLGNACWVHKHFTEDIQTRQYRSIEVLIGAGYSTPADIWSTACMAFELATGDYLFEPHSGEDYSRDEDHIAHIIELLGSIPRHFALSGKYSREFFNRRGELRHITKLKPWSLFDVLVEKYGWPHEDAAQFTDFLIPMLEMVPEKRASAGECLRHPWLNS

SEQ ID NO: 34527 - protein, 19 aa, Artificial Sequence
  Synthetic polypeptide
TAPKLLDHKNCRSLNRKLL

SEQ ID NO: 34528 - protein, 204 aa, Artificial Sequence
  Synthetic polypeptide
QVFQPPSSLQMTAASSDILTHQLNCSQIAGPQKLPEPQQKAPLVPPPPPPPPPPPPPLPDPTPPEPEEEILGSDDEEQEDPADYCKGGYHPVKIGDLFNGRYHVIRKLGWGHFSTVWLCWDMQGKRFVAMKVVKSAQHYTETALDEIKLLKCVRESDPSDPNKDMVVQLIDDFKISGMNGIHVCMVFEVLGHHLLKWIIKSNYQ

SEQ ID NO: 34529 - protein, 181 aa, Artificial Sequence
  Synthetic polypeptide
QVFQPPSSLQMTAASSDILTHQLNCSQIAGPQKLPEPQQKAPLVPPPPPPPPPPPPPLPDPTPPEPEEEILGSDDEEQEDPADYCKGGYHPVKIGDLFNGRYHVIRKLGWGHFSTVWLCWDMQGKRFVAMKVVKSAQHYTETALDEIKLLKCVRESDPSDPNKDMVVQLIDDFKISGMNGI

SEQ ID NO: 34530 - protein, 246 aa, Artificial Sequence
  Synthetic polypeptide
AQEFETSLGNMFFLQLQQAALEVFAENNTLSKLQLGQLASMESSVFDDMINLLERLKHDMLTRQVDHVFREVKDAAKLYKKERWLSLPSQSEQAVMSLSSSACPLLLTLRDHLLQLEQQLCFSLFKIFWQMLVEKLDVYIYQEIILANHFNEGGAAQLQFDMTRNLFPLFSHYCKRPENYFKHIKEACIVLNLNVGSALLLKDVLQSASGQLPATAALNEVGIYKLAQQDVEILLNLRTNWPNTGK

SEQ ID NO: 34531 - protein, 32 aa, Artificial Sequence
  Synthetic polypeptide
SLKPRSSRPVWATCSFYNFNRLHWRCLQRIIL

SEQ ID NO: 34532 - protein, 48 aa, Artificial Sequence
  Synthetic polypeptide
MGTMSHTCNPNSGKPRWADHLSPGVRDQSGQHVLSTTSTGCTGGVCRE

SEQ ID NO: 34533 - protein, 60 aa, Artificial Sequence
  Synthetic polypeptide
YIFFLPSSALISPLKIETMSFYLLSHPQCLKLLTINNIHPTQAKFIPTLNAVKRRQKTPN

SEQ ID NO: 34534 - protein, 491 aa, Artificial Sequence
  Synthetic polypeptide
SFENRDHVILFTFSSSVSEVTHYKQYPPNTSKVYSYFECREKKTENSKLRKVKYEETVFYGLQYILNKYLKGKVVTKEKIQEAKDVYKEHFQDDVFNEKGWNYILEKYDGHLPIEIKAVPEGFVIPRGNVLFTVENTDPECYWLTNWIETILVQSWYPITVATNSREQKKILAKYLLETSGNLDGLEYKLHDFGYRGVSSQETAGIGASAHLVNFKGTDTVAGLALIKKYYGTKDPVPGYSVPAAEHSTITAWGKDHEKDAFEHIVTQFSSVPVSVVSDSYDIYNACEKIWGEDLRHLIVSRSTQAPLIIRPDSGNPLDTVLKVLEILGKKFPVTENSKGYKLLPPYLRVIQGDGVDINTLQEIVEGMKQKMWSIENIAFGSGGGLLQKLTRDLLNCSFKCSYVVTNGLGINVFKDPVADPNKRSKKGRLSLHRTPAGNFVTLEEGKGDLEEYGQDLLHTVFKNGKVTKSYSFDEIRKNAQLNIELEAAHH

SEQ ID NO: 34535 - protein, 368 aa, Artificial Sequence
  Synthetic polypeptide
SFENRDHVILFTFSSSVSEVTHYKQYPPNTSKVYSYFECREKKTENSKLRKVKYEETVFYGLQYILNKYLKGKVVTKEKIQEAKDVYKEHFQDDVFNEKGWNYILEKYDGHLPIEIKAVPEGFVIPRGNVLFTVENTDPECYWLTNWIETILVQSWYPITVATNSREQKKILAKYLLETSGNLDGLEYKLHDFGYRGVSSQETAGIGASAHLVNFKGTDTVAGLALIKKYYGTKDPVPGYSVPAAEHSTITAWGKDHEKDAFEHIVTQFSSVPVSVVSDSYDIYNACEKIWGEDLRHLIVSRSTQAPLIIRPDSGNPLDTVLKVLEILGKKFPVTENSKGYKLLPPYLRVIQGDGVDINTLQEVCVLY

SEQ ID NO: 34536 - protein, 88 aa, Artificial Sequence
  Synthetic polypeptide
SFENRDHVILFTFSSSVSEVTHYKQYPPNTSKVYSYFECREKKTENSKLRKVKYEETVFYGLQYILNKYLKGKVVTKEKIQEAKDVYK

SEQ ID NO: 34537 - protein, 60 aa, Artificial Sequence
  Synthetic polypeptide
SFENRDHVILFTFSSSVSEVTHYKQYPPNTSKVYSYFECREKKTENSKLRKVKYEETVFY

SEQ ID NO: 34538 - protein, 21 aa, Artificial Sequence
  Synthetic polypeptide
GQAWWLTPVIPALSEAKVFFR

SEQ ID NO: 34539 - protein, 24 aa, Artificial Sequence
  Synthetic polypeptide
SQHFRRPRCSSDDADENWGFTGSC

SEQ ID NO: 34540 - protein, 727 aa, Artificial Sequence
  Synthetic polypeptide
PGVVAHACNPSTFGGQGVLQMMQTRIGALQGAVDRIKAKIVEPYNKIVARTAQLARLQVACDLLRRIIRILNLSKRLQGQLQGGSREITKAAQSLNELDYLSQGIDLSGIEVIENDLLFIARARLEVENQAKRLLEQGLETQNPTQVGTALQVFYNLGTLKDTITSVVDGYCATLEENINSALDIKVLTQPSQSAVRGGPGRSTMPTPGNTAALRASFWTNMEKLMDHIYAVCGQVQHLQKVLAKKRDPVSHICFIEEIVKDGQPEIFYTFWNSVTQALSSQFHMATNSSMFLKQAFEGEYPKLLRLYNDLWKRLQQYSQHIQGNFNASGTTDLYVDLQHMEDDAQDIFIPKKPDYDPEKALKDSLQPYEAAYLSKSLSRLFDPINLVFPPGGRNPPSSDELDGIIKTIASELNVAAVDTNLTLAVSKNVAKTIQLYSVKSEQLLSTQGDASQVIGPLTEGQRRNVAVVNSLYKLHQSVTKAIHALMENAVQPLLTSVGDAIEAIIITMHQEDFSGSLSSSGKPDVPCSLYMKELQGFIARVMSDYFKHFECLDFVFDNTEAIAQRAVELFIRHASLIRPLGEGGKMRLAADFAQMELAVGPFCRRVSDLGKSYRMLRSFRPLLFQASEHVASSPALGDVIPFSIIIQFLFTRAPAELKSPFQRAEWSHTRFSQWLDDHPSEKDRLLLIRGALEAYVQSVRSREGKEFAPVYPIMVQLLQKAMSALQ

SEQ ID NO: 34541 - protein, 748 aa, Artificial Sequence
  Synthetic polypeptide
PGVVAHACNPSTFGGQGVLQMMQTRIGALQGAVDRIKAKIVEPYNKIVARTAQLARLQVACDLLRRIIRILNLSKRLQGQLQGGSREITKAAQSLNELDYLSQGIDLSGIEVIENDLLFIARARLEVENQAKRLLEQGLETQNPTQVGTALQVFYNLGTLKDTITSVVDGYCATLEENINSALDIKVLTQPSQSAVRGGPGRSTMPTPGNTAALRASFWTNMEKLMDHIYAVCGQVQHLQKVLAKKRDPVSHICFIEEIVKDGQPEIFYTFWNSVTQALSSQFHMATNSSMFLKQAFEGEYPKLLRLYNDLWKRLQQYSQHIQGNFNASGTTDLYVDLQHMEDDAQDIFIPKKPDYDPEKALKDSLQPYEAAYLSKSLSRLFDPINLVFPPGGRNPPSSDELDGIIKTIASELNVAAVDTNLTLAVSKNVAKTIQLYSVKSEQLLSTQGDASQVIGPLTEGQRRNVAVVNSLYKLHQSVTKVVSSQSSFPLAAEQTIISALKAIHALMENAVQPLLTSVGDAIEAIIITMHQEDFSGSLSSSGKPDVPCSLYMKELQGFIARVMSDYFKHFECLDFVFDNTEAIAQRAVELFIRHASLIRPLGEGGKMRLAADFAQMELAVGPFCRRVSDLGKSYRMLRSFRPLLFQASEHVASSPALGDVIPFSIIIQFLFTRAPAELKSPFQRAEWSHTRFSQWLDDHPSEKDRLLLIRGALEAYVQSVRSREGKEFAPVYPIMVQLLQKAMSALQ

SEQ ID NO: 34542 - protein, 711 aa, Artificial Sequence
  Synthetic polypeptide
PGVVAHACNPSTFGGQGVLQMMQTRIGALQGAVDRIKAKIVEPYNKIVARTAQLARLQVACDLLRRIIRILNLSKRLQGQLQGGSREITKAAQSLNELDYLSQGIDLSGIEVIENDLLFIARARLEVENQAKRLLEQGLETQNPTQVGTALQVFYNLGTLKDTITSVVDGYCATLEENINSALDIKVLTQPSQSAVRGGPGRSTMPTPGNTAALRASFWTNMEKLMDHIYAVCGQVQHLQKVLAKKRDPVSHICFIEEIVKDGQPEIFYTFWNSVTQALSSQFHMATNSSMFLKQAFEGEYPKLLRLYNDLWKRLQQYSQHIQGNFNASGTTDLYVDLQHMEDDAQDIFIPKKPDYDPEKALKDSLQPYEAAYLSKSLSRLFDPINLVFPPGGRNPPSSDELDGIIKTIASELNVAAVDTNLTLAVSKNVAKTIQLYSVKSEQLLSTQGDASQVIGPLTEGQRRNVAVVNSLYKLHQSVTKVVSSQSSFPLAAEQTIISALKAIHALMENAVQPLLTSVGDAIEAIIITMHQEDFSGSLSSSGKPDVPCSLYMKELQGFIARVMSDYFKHFECLDFVFDNTEAIAQRAVELFIRHASLIRPLGEGGKMRLAADFAQMELAVGPFCRRVSDLGKSYRMLRSFRPLLFQASEHVASSPALGDVIPFSIIIQFLFTRAPAELKSPFQRAEWSHTRFSQWLDDHPSEKDRLLLIR

SEQ ID NO: 34543 - protein, 98 aa, Artificial Sequence
  Synthetic polypeptide
PGVVAHACNPSTFGGQGVLQMMQTRIGALQGAVDRIKAKIVEPYNKIVARTAQLARLQVACDLLRRIIRILNLSKRLQGQLQGGSREITKAAQSLNEL

SEQ ID NO: 34544 - protein, 46 aa, Artificial Sequence
  Synthetic polypeptide
VPLGSFYILAFAPGLHNPHPSSPRSGGGFSAIDNPRGALPPCLVIV

SEQ ID NO: 34545 - protein, 21 aa, Artificial Sequence
  Synthetic polypeptide
SQRCLTTLFGDRLERGNKKRL

SEQ ID NO: 34546 - protein, 49 aa, Artificial Sequence
  Synthetic polypeptide
GRARWLTPVILALWEAEAGGSRERPFQSNISWPTGTFCSASENLRRSAD

SEQ ID NO: 34547 - protein, 507 aa, Artificial Sequence
  Synthetic polypeptide
HFGRPRRADHERGHFNRISHGLQGLSAVPLRTYADQPIDADVTVIGSGPGGYVAAIKAAQLGFKTVCIEKNETLGGTCLNVGCIPSKALLNNSHYYHMAHGKDFASRGIEMSEVRLNLDKMMEQKSTAVKALTGGIAHLFKQNKVVHVNGYGKITGKNQVTATKADGGTQVIDTKNILIATGSEVTPFPGITIDEDTIVSSTGALSLKKVPEKMVVIGAGVIGVELGSVWQRLGADVTAVEFLGHVGGVGIDMEISKNFQRILQKQGFKFKLNTKVTGATKKSDGKIDVSIEAASGGKAEVITCDVLLVCIGRRPFTKNLGLEELGIELDPRGRIPVNTRFQTKIPNIYAIGDVVAGPMLAHKAEDEGIICVEGMAGGAVHIDYNCVPSVIYTHPEVAWVGKSEEQLKEEGIEYKVGKFPFAANSRAKTNADTDGMVKILGQKSTDRVLGAHILGPGAGEMVNEAALALEYGASCEDIARVCHAHPTLSEAFREANLAASFGKSINF

SEQ ID NO: 34548 - protein, 40 aa, Artificial Sequence
  Synthetic polypeptide
PGAVAHSCNPSTLGGRGGRITREAISIEYLMAYRDFLQCL

SEQ ID NO: 34549 - protein, 51 aa, Artificial Sequence
  Synthetic polypeptide
GRARWLTPVILALWEAEAGGSRERPFQSNISWPTGTFCSASENLRRSAELY

SEQ ID NO: 34550 - protein, 56 aa, Artificial Sequence
  Synthetic polypeptide
HFGRPRRADHERGHFNRISHGLQGLSAVPLRTYADQPSFIEQLSLLPYGPWKRFCI

SEQ ID NO: 34551 - protein, 484 aa, Artificial Sequence
  Synthetic polypeptide
HFGRPRRADHERGHFNRISHGLQGLSAVPLRTYADQPIDADVTVIGSGPGGYVAAIKAAQLGFKALLNNSHYYHMAHGKDFASRGIEMSEVRLNLDKMMEQKSTAVKALTGGIAHLFKQNKVVHVNGYGKITGKNQVTATKADGGTQVIDTKNILIATGSEVTPFPGITIDEDTIVSSTGALSLKKVPEKMVVIGAGVIGVELGSVWQRLGADVTAVEFLGHVGGVGIDMEISKNFQRILQKQGFKFKLNTKVTGATKKSDGKIDVSIEAASGGKAEVITCDVLLVCIGRRPFTKNLGLEELGIELDPRGRIPVNTRFQTKIPNIYAIGDVVAGPMLAHKAEDEGIICVEGMAGGAVHIDYNCVPSVIYTHPEVAWVGKSEEQLKEEGIEYKVGKFPFAANSRAKTNADTDGMVKILGQKSTDRVLGAHILGPGAGEMVNEAALALEYGASCEDIARVCHAHPTLSEAFREANLAASFGKSINF

SEQ ID NO: 34552 - protein, 459 aa, Artificial Sequence
  Synthetic polypeptide
HFGRPRRADHERGHFNRISHGLQGLSAVPLRTYADQPIDADVTVIGSGPGGYVAAIKAAQLGFKTVCIEKNETLGGTCLNVGCIPSKALLNNSHYYHMAHGKDFASRGIEMSEVRLNLDKMMEQKSTAVKALTGGIAHLFKQNKIDEDTIVSSTGALSLKKVPEKMVVIGAGVIGVELGSVWQRLGADVTAVEFLGHVGGVGIDMEISKNFQRILQKQGFKFKLNTKVTGATKKSDGKIDVSIEAASGGKAEVITCDVLLVCIGRRPFTKNLGLEELGIELDPRGRIPVNTRFQTKIPNIYAIGDVVAGPMLAHKAEDEGIICVEGMAGGAVHIDYNCVPSVIYTHPEVAWVGKSEEQLKEEGIEYKVGKFPFAANSRAKTNADTDGMVKILGQKSTDRVLGAHILGPGAGEMVNEAALALEYGASCEDIARVCHAHPTLSEAFREANLAASFGKSINF

SEQ ID NO: 34553 - protein, 112 aa, Artificial Sequence
  Synthetic polypeptide
HFGRPRRADHERGHFNRISHGLQGLSAVPLRTYADQPIDADVTVIGSGPGGYVAAIKAAQLGFKTVCIEKNETLGGTCLNVGCIPSKALLNNSHYYHMAHGKDFASRGIENL

SEQ ID NO: 34554 - protein, 113 aa, Artificial Sequence
  Synthetic polypeptide
HFGRPRRADHERGHFNRISHGLQGLSAVPLRTYADQPIDADVTVIGSGPGGYVAAIKAAQLGFKTVCIEKNETLGGTCLNVGCIPSKALLNNSHYYHMAHGKDFASRGIETLG

SEQ ID NO: 34555 - protein, 492 aa, Artificial Sequence
  Synthetic polypeptide
GRARWLTPVILALWEAEAGGSRVDADVTVIGSGPGGYVAAIKAAQLGFKTVCIEKNETLGGTCLNVGCIPSKALLNNSHYYHMAHGKDFASRGIEMSEVRLNLDKMMEQKSTAVKALTGGIAHLFKQNKVVHVNGYGKITGKNQVTATKADGGTQVIDTKNILIATGSEVTPFPGITIDEDTIVSSTGALSLKKVPEKMVVIGAGVIGVELGSVWQRLGADVTAVEFLGHVGGVGIDMEISKNFQRILQKQGFKFKLNTKVTGATKKSDGKIDVSIEAASGGKAEVITCDVLLVCIGRRPFTKNLGLEELGIELDPRGRIPVNTRFQTKIPNIYAIGDVVAGPMLAHKAEDEGIICVEGMAGGAVHIDYNCVPSVIYTHPEVAWVGKSEEQLKEEGIEYKVGKFPFAANSRAKTNADTDGMVKILGQKSTDRVLGAHILGPGAGEMVNEAALALEYGASCEDIARVCHAHPTLSEAFREANLAASFGKSINF

SEQ ID NO: 34556 - protein, 15 aa, Artificial Sequence
  Synthetic polypeptide
HFGRPRRADHELMLM

SEQ ID NO: 34557 - protein, 22 aa, Artificial Sequence
  Synthetic polypeptide
PGAVAHSCNPSTLGGRGGRITS

SEQ ID NO: 34558 - protein, 469 aa, Artificial Sequence
  Synthetic polypeptide
GRARWLTPVILALWEAEAGGSRVDADVTVIGSGPGGYVAAIKAAQLGFKALLNNSHYYHMAHGKDFASRGIEMSEVRLNLDKMMEQKSTAVKALTGGIAHLFKQNKVVHVNGYGKITGKNQVTATKADGGTQVIDTKNILIATGSEVTPFPGITIDEDTIVSSTGALSLKKVPEKMVVIGAGVIGVELGSVWQRLGADVTAVEFLGHVGGVGIDMEISKNFQRILQKQGFKFKLNTKVTGATKKSDGKIDVSIEAASGGKAEVITCDVLLVCIGRRPFTKNLGLEELGIELDPRGRIPVNTRFQTKIPNIYAIGDVVAGPMLAHKAEDEGIICVEGMAGGAVHIDYNCVPSVIYTHPEVAWVGKSEEQLKEEGIEYKVGKFPFAANSRAKTNADTDGMVKILGQKSTDRVLGAHILGPGAGEMVNEAALALEYGASCEDIARVCHAHPTLSEAFREANLAASFGKSINF

SEQ ID NO: 34559 - protein, 444 aa, Artificial Sequence
  Synthetic polypeptide
GRARWLTPVILALWEAEAGGSRVDADVTVIGSGPGGYVAAIKAAQLGFKTVCIEKNETLGGTCLNVGCIPSKALLNNSHYYHMAHGKDFASRGIEMSEVRLNLDKMMEQKSTAVKALTGGIAHLFKQNKIDEDTIVSSTGALSLKKVPEKMVVIGAGVIGVELGSVWQRLGADVTAVEFLGHVGGVGIDMEISKNFQRILQKQGFKFKLNTKVTGATKKSDGKIDVSIEAASGGKAEVITCDVLLVCIGRRPFTKNLGLEELGIELDPRGRIPVNTRFQTKIPNIYAIGDVVAGPMLAHKAEDEGIICVEGMAGGAVHIDYNCVPSVIYTHPEVAWVGKSEEQLKEEGIEYKVGKFPFAANSRAKTNADTDGMVKILGQKSTDRVLGAHILGPGAGEMVNEAALALEYGASCEDIARVCHAHPTLSEAFREANLAASFGKSINF

SEQ ID NO: 34560 - protein, 97 aa, Artificial Sequence
  Synthetic polypeptide
GRARWLTPVILALWEAEAGGSRVDADVTVIGSGPGGYVAAIKAAQLGFKTVCIEKNETLGGTCLNVGCIPSKALLNNSHYYHMAHGKDFASRGIENL

SEQ ID NO: 34561 - protein, 98 aa, Artificial Sequence
  Synthetic polypeptide
GRARWLTPVILALWEAEAGGSRVDADVTVIGSGPGGYVAAIKAAQLGFKTVCIEKNETLGGTCLNVGCIPSKALLNNSHYYHMAHGKDFASRGIETLG

SEQ ID NO: 34562 - protein, 16 aa, Artificial Sequence
  Synthetic polypeptide
SPALWEAKAGGSLEIY

SEQ ID NO: 34563 - protein, 42 aa, Artificial Sequence
  Synthetic polypeptide
ARRGGSLRNPQHFGRPRQADHLRFIKNYQLENQVCETAYFGR

SEQ ID NO: 34564 - protein, 19 aa, Artificial Sequence
  Synthetic polypeptide
HCSQWQIHGINLGIGWDLH

SEQ ID NO: 34565 - protein, 217 aa, Artificial Sequence
  Synthetic polypeptide
ILLLGIYPKENNSFCQKDTCTYVFIIALFTMADTWNQPRDRMGSALMIETARNPTCPKVAADGGLLLNNPSALAMHECKCLWPDVPLECIVSLGTGRYESDVRNTVTYTSLKTKLSNVINSATDTEEVHIMLDGLLPPDTYFRFNPVMCENIPLDESRNEKLDQLQLEGLKYIERNEQKMKKVAKILSQEKTTLQKINDWIKLKTDMYEGLPFFSKL

SEQ ID NO: 34566 - protein, 217 aa, Artificial Sequence
  Synthetic polypeptide
ILLLGIYPKENNSFCQKDTCTYVFIIALFTMADTWNQPRDRMGSALMIETARNPTCPKVRKDGGLLLNNPSALAMHECKCLWPDVPLECIVSLGTGRYESDVRNTVTYTSLKTKLSNVINSATDTEEVHIMLDGLLPPDTYFRFNPVMCENIPLDESRNEKLDQLQLEGLKYIERNEQKMKKVAKILSQEKTTLQKINDWIKLKTDMYEGLPFFSKL

SEQ ID NO: 34567 - protein, 279 aa, Artificial Sequence
  Synthetic polypeptide
ILLLGIYPKENNSFCQKDTCTYVFIIALFTMADTWNQPRDRMGSALMIETARNPTCPKVAAVSTIVNRGITPKAFVFRNYGHFPGINSHYLGGCQYKMWQAIRASSAAPGYFAEYALGNDLHQDGGLLLNNPSALAMHECKCLWPDVPLECIVSLGTGRYESDVRNTVTYTSLKTKLSNVINSATDTEEVHIMLDGLLPPDTYFRFNPVMCENIPLDESRNEKLDQLQLEGLKYIERNEQKMKKVAKILSQEKTTLQKINDWIKLKTDMYEGLPFFSKL

SEQ ID NO: 34568 - protein, 236 aa, Artificial Sequence
  Synthetic polypeptide
ILLLGIYPKENNSFCQKDTCTYVFIIALFTMADTWNQPRDRMGSALMIETARNPTCPKVAAVSTIVNRGITPKAFVFRNYGHFPGINSHYLGGCQYKMWQAIRASSAAPGYFAEYALGNDLHQDGGLLLNNPSALAMHECKCLWPDVPLECIVSLGTGRYESDVRNTVTYTSLKTKLSNVINSATDTEEVHIMLDGLLPPDTYFRFNPVMCENIPLDESRNEKLDQLQLEGLKYIE

SEQ ID NO: 34569 - protein, 711 aa, Artificial Sequence
  Synthetic polypeptide
SDGIKSNARSVCGKQRSKQLYFLFSPKHYWRISHISLQRGFHTNIIRCKWTKSEAHSCSKHCYSPSNHGLHIGILKLSTSAPKGLTKVNICMSRIKSTLNSVSKAVFGNQNEMISRLAQFKPSSQILRKVSDSGWLKQKNIKQAIKSLKKYSDKSAEKSPFPEEKSHIIDKEEDIGKRSLFHYTSSITTKFGDSFYFLSNHINSYFKRKEKMSQQKENEHFRDKSELEDKKVEEGKLRSPDPGILAYKPGSESVHTVDKPTSPSAIPDVLQVSTKQSIANFLSRPTEGVQALVGGYIGGLVPKLKYDSKSQSEEQEEPAKTDQAVSKDRNAEEKKRLSLQREKIIARVSIDNRTRALVQALRRTTDPKLCITRVEELTFHLLEFPEGKGVAVKERIIPYLLRLRQIKDETLQAAVREILALIGYVDPVKGRGIRILSIDGGGTRGVVALQTLRKLVELTQKPVHQLFDYICGVSTGAILAFMLGLFHMPLDECEELYRKLGSDVFSQNVIVGTVKMSWSHAFYDSQTWENILKDRMGSALMIETARNPTCPKVAADGGLLLNNPSALAMHECKCLWPDVPLECIVSLGTGRYESDVRNTVTYTSLKTKLSNVINSATDTEEVHIMLDGLLPPDTYFRFNPVMCENIPLDESRNEKLDQLQLEGLKYIERNEQKMKKVAKILSQEKTTLQKINDWIKLKTDMYEGLPFFSKL

SEQ ID NO: 34570 - protein, 50 aa, Artificial Sequence
  Synthetic polypeptide
AMVRMFVPLKIHVEIITAKVMVLRVMQEVFVGSREASNCISCSHLSITGG

SEQ ID NO: 34571 - protein, 711 aa, Artificial Sequence
  Synthetic polypeptide
SDGIKSNARSVCGKQRSKQLYFLFSPKHYWRISHISLQRGFHTNIIRCKWTKSEAHSCSKHCYSPSNHGLHIGILKLSTSAPKGLTKVNICMSRIKSTLNSVSKAVFGNQNEMISRLAQFKPSSQILRKVSDSGWLKQKNIKQAIKSLKKYSDKSAEKSPFPEEKSHIIDKEEDIGKRSLFHYTSSITTKFGDSFYFLSNHINSYFKRKEKMSQQKENEHFRDKSELEDKKVEEGKLRSPDPGILAYKPGSESVHTVDKPTSPSAIPDVLQVSTKQSIANFLSRPTEGVQALVGGYIGGLVPKLKYDSKSQSEEQEEPAKTDQAVSKDRNAEEKKRLSLQREKIIARVSIDNRTRALVQALRRTTDPKLCITRVEELTFHLLEFPEGKGVAVKERIIPYLLRLRQIKDETLQAAVREILALIGYVDPVKGRGIRILSIDGGGTRGVVALQTLRKLVELTQKPVHQLFDYICGVSTGAILAFMLGLFHMPLDECEELYRKLGSDVFSQNVIVGTVKMSWSHAFYDSQTWENILKDRMGSALMIETARNPTCPKVRKDGGLLLNNPSALAMHECKCLWPDVPLECIVSLGTGRYESDVRNTVTYTSLKTKLSNVINSATDTEEVHIMLDGLLPPDTYFRFNPVMCENIPLDESRNEKLDQLQLEGLKYIERNEQKMKKVAKILSQEKTTLQKINDWIKLKTDMYEGLPFFSKL

SEQ ID NO: 34572 - protein, 773 aa, Artificial Sequence
  Synthetic polypeptide
SDGIKSNARSVCGKQRSKQLYFLFSPKHYWRISHISLQRGFHTNIIRCKWTKSEAHSCSKHCYSPSNHGLHIGILKLSTSAPKGLTKVNICMSRIKSTLNSVSKAVFGNQNEMISRLAQFKPSSQILRKVSDSGWLKQKNIKQAIKSLKKYSDKSAEKSPFPEEKSHIIDKEEDIGKRSLFHYTSSITTKFGDSFYFLSNHINSYFKRKEKMSQQKENEHFRDKSELEDKKVEEGKLRSPDPGILAYKPGSESVHTVDKPTSPSAIPDVLQVSTKQSIANFLSRPTEGVQALVGGYIGGLVPKLKYDSKSQSEEQEEPAKTDQAVSKDRNAEEKKRLSLQREKIIARVSIDNRTRALVQALRRTTDPKLCITRVEELTFHLLEFPEGKGVAVKERIIPYLLRLRQIKDETLQAAVREILALIGYVDPVKGRGIRILSIDGGGTRGVVALQTLRKLVELTQKPVHQLFDYICGVSTGAILAFMLGLFHMPLDECEELYRKLGSDVFSQNVIVGTVKMSWSHAFYDSQTWENILKDRMGSALMIETARNPTCPKVAAVSTIVNRGITPKAFVFRNYGHFPGINSHYLGGCQYKMWQAIRASSAAPGYFAEYALGNDLHQDGGLLLNNPSALAMHECKCLWPDVPLECIVSLGTGRYESDVRNTVTYTSLKTKLSNVINSATDTEEVHIMLDGLLPPDTYFRFNPVMCENIPLDESRNEKLDQLQLEGLKYIERNEQKMKKVAKILSQEKTTLQKINDWIKLKTDMYEGLPFFSKL

SEQ ID NO: 34573 - protein, 183 aa, Artificial Sequence
  Synthetic polypeptide
SDGIKSNARSVCGKQRSKQLYFLFSPKHYWRISHISLQRGFHTNIIRCKWTKSEAHSCSKHCYSPSNHGLHIGILKLSTSAPKGLTKVNICMSRIKSTLNSVSKAVFGNQNEMISRLAQFKPSSQILRKVSDSGWLKQKNIKQAIKSLKKYSDKSAEKSPFPEEKSHIIDKEEDIGKRSLFHY

SEQ ID NO: 34574 - protein, 46 aa, Artificial Sequence
  Synthetic polypeptide
SDGIKSNARSVCGKQRSKQLYFLFSPKHYWRISHISLQRGFHTNII

SEQ ID NO: 34575 - protein, 48 aa, Artificial Sequence
  Synthetic polypeptide
VPAFVVLLLHSFFALLGVLSNSLLKTPRTWTTCSHDPLPWIAAPRGGR

SEQ ID NO: 34576 - protein, 35 aa, Artificial Sequence
  Synthetic polypeptide
KRQEPGQLAVTILYRGSQLQEEAGEAFGSFSAGSS

SEQ ID NO: 34577 - protein, 84 aa, Artificial Sequence
  Synthetic polypeptide
FSISPCFCCFVASFFLCFAGRFVQFFVKNAKNLDNLQSRSSTVDRSSKRRQVKPLAASLLEALDYDSSDDSDFKVGDASGLADS

SEQ ID NO: 34578 - protein, 930 aa, Artificial Sequence
  Synthetic polypeptide
FSISPCFCCFVASFFLCFAGRFVQFFVKNAKNLDNLQSRSSTVDRSSKRRQVKPLAASLLEALDYDSSDDSDFKVGDASDSEGSGNGSEDASKDSGEGSCSDSEENILEEELNEDIKVKEEQLKNSAEEEVLSSEKQLIKMEKKEEEENGERPRKKKEKEKEKEKEKEKEKEREKEKEKATVSENVAASAAATTPATSPPAVNTSPSVPTTTTATEEQVSEPKKWNLRRNRPLLDFVSMEELNDMDDYDSEDDNDWRPTVVKRKGRSASQKEGSDGDNEDDEDEGSGSDEDENDEGNDEDHSSPASEGGCKKKKSKVLSRNSADDEELTNDSLTLSQSKSNEDSLILEKSQNWSSQKMDHILICCVCLGDNSEDADEIIQCDNCGITVHEGCYGVDGESDSIMSSASENSTEPWFCDACKCGVSPSCELCPNQDGIFKETDAGRWVHIVCALYVPGVAFGDIDKLRPVTLTEMNYSKYGAKECSFCEDPRFARTGVCISCDAGMCRAYFHVTCAQKEGLLSEAAAEEDIADPFFAYCKQHADRLDRKWKRKNYLALQSYCKMSLQEREKQLSPEAQARINARLQQYRAKAELARSTRPQAWVPREKLPRPLTSSASAIRKLMRKAELMGISTDIFPVDNSDTSSSVDGRRKHKQPALTADFVNYYFERNMRMIQIQENMAEQKNIKDKLENEQEKLHVEYNKLCESLEELQNLNGKLRSEGQGIWALLGRITGQKLNIPAILRAPKERKPSKKEGGTQKTSTLPAVLYSCGICKKNHDQHLLLLCDTCKLHYHLGCLDPPLTRMPRKTKNSYWQCSECDQAGSSDMEADMAMETLPDGTKRSRRQIKEPVKFVPQDVPPEPKKIPIRNTRTRGRKRSFVPEEEKHEERVPRERRQRQSVLQKKPKAEDLRTECATCKGTGDNENLVRYPS

SEQ ID NO: 34579 - protein, 68 aa, Artificial Sequence
  Synthetic polypeptide
RAFPPFAQHFCLLPPCEEGHVCFPFCYDCFPRTSACPCHTYPVAPRALAEIGICSSSRALTSTERRGM

SEQ ID NO: 34580 - protein, 71 aa, Artificial Sequence
  Synthetic polypeptide
WFYKGLFPLLLSTSACCHHVKKDMFASPSAMIVSLGLLHAHATHILWPPERWQKLESVLPPERLPVQREEE

SEQ ID NO: 34581 - protein, 4 aa, Artificial Sequence
  Synthetic polypeptide
NEVS

SEQ ID NO: 34582 - protein, 116 aa, Artificial Sequence
  Synthetic polypeptide
SWANASPFQASVPSWNQSEMRSPKNPEQKIIKRVIALEGDIVRTIGHKNRYVKVPRGHIWVEGDHHGHSFDSNSFGPVSLGLLHAHATHILWPPERWQKLESVLPPERLPVQREEE

SEQ ID NO: 34583 - protein, 51 aa, Artificial Sequence
  Synthetic polypeptide
SWANASPFQASVPSWNQSEMRSPKNPEQKIIKRVIALEGDIVRDGRKLKRI

SEQ ID NO: 34584 - protein, 102 aa, Artificial Sequence
  Synthetic polypeptide
VSSSTERSPKNPEQKIIKRVIALEGDIVRTIGHKNRYVKVPRGHIWVEGDHHGHSFDSNSFGPVSLGLLHAHATHILWPPERWQKLESVLPPERLPVQREEE

SEQ ID NO: 34585 - protein, 19 aa, Artificial Sequence
  Synthetic polypeptide
FPHLLKGLLKTQNRRSLRE

SEQ ID NO: 34586 - protein, 3 aa, Artificial Sequence
  Synthetic polypeptide
KVS

SEQ ID NO: 34587 - protein, 37 aa, Artificial Sequence
  Synthetic polypeptide
VSSSTERSPKNPEQKIIKRVIALEGDIVRDGRKLKRI

SEQ ID NO: 34588 - protein, 24 aa, Artificial Sequence
  Synthetic polypeptide
ARGSRPYHLCLCLLKTQNRRSLRE

SEQ ID NO: 34589 - protein, 18 aa, Artificial Sequence
  Synthetic polypeptide
SRSHKLGVVGHTIYVCVS

SEQ ID NO: 34590 - protein, 103 aa, Artificial Sequence
  Synthetic polypeptide
SAIPSMFVSPKNPEQKIIKRVIALEGDIVRTIGHKNRYVKVPRGHIWVEGDHHGHSFDSNSFGPVSLGLLHAHATHILWPPERWQKLESVLPPERLPVQREEE

SEQ ID NO: 34591 - protein, 38 aa, Artificial Sequence
  Synthetic polypeptide
SAIPSMFVSPKNPEQKIIKRVIALEGDIVRDGRKLKRI

SEQ ID NO: 34592 - protein, 25 aa, Artificial Sequence
  Synthetic polypeptide
HIRNYILPSSKRGSLLLVSCPYYDK

SEQ ID NO: 34593 - protein, 35 aa, Artificial Sequence
  Synthetic polypeptide
VTWGKSFSTSETTFYLLQKGGVCCLSPVPITTNDR

SEQ ID NO: 34594 - protein, 1043 aa, Artificial Sequence
  Synthetic polypeptide
LGASHLAHQKLHFTFFKKGEFVACLLSLLRQMTDRHYQQLLDSFNTKEELRDFLLQIFTVFRILIRPEMFPKDWTVMRLVANNVIITTVLYLSDALRKNFLNENFDYKIWDSYFYLAVIFINQLCLQLEMFTPSKKKKVLEKYGDMRVTMGCEIFSMWQNLGEHKLHFIPALIGPFLEVTLIPQPDLRNVMIPIFHDMMDWEQRRSGNFKQVEAKLIDKLDSLMSEGKGDETYRELFNSIIPLFGPYPSLLKKIERETWRESGVSLIATVTRLMERLLDYRDCMKMGEVDGKKIGCTVSLLNFYKTELNKEEMYIRYIHKLYDLHLKAQNFTEAAYTLLLYDELLEWSDRPLREFLTYPMQTEWQRKEHLHLTIIQNFDRGKCWENGIILCRKIAEQYESYYDYRNLSKMRMMEASLYDKIMDQQRLEPEFFRVGFYGKKFPFFLRNKEFVCRGHDYERLEAFQQRMLNEFPHAIAMQHANQPDETIFQAEAQYLQIYAVTPIPESQEVLQREGVPDNIKSFYKVNHIWKFRYDRPFHKGTKDKENEFKSLWVERTSLYLVQSLPGISRWFEVEKREVVEMSPLENAIEVLENKNQQLKTLISQCQTRQMQNINPLTMCLNGVIDAAVNGGVSRYQEAFFVKEYILSHPEDGEKIARLRELMLEQAQILEFGLAVHEKFVPQDMRPLHKKLVDQFFVMKSSLGIQEFSACMQASPVHFPNGSPRVCRNSAPASVSPDGTRVIPRRSPLSYPAVNRYSSSSLSSQASAEVSNITGQSESSDEVFNMQPSPSTSSLSSTHSASPNVTSSAPSSARASPLLSDKHKHSRENSCLSPRERPCSAIYPTPVEPSQRMLFNHIGDGALPRSDPNLSAPEKASPARHTTSVSPSPAGRSPLKGSVQSFTPSPVEYHSPGLISNSPVLSGSYSSGISSLSRCSTSETSGFENQVNEQSAPLPVPVPVPVPSYGGEEPVRKESKTPPPYSVYERTLRRPVPLPHSLSIPVTSEPPALPPKPLAARSSHLENGARRTDPGPRPRPLPRKVSQL

SEQ ID NO: 34595 - protein, 1081 aa, Artificial Sequence
  Synthetic polypeptide
LGASHLAHQKLHFTFFKKGEFVACLLSLLRQMTDRHYQQLLDSFNTKEELRDFLLQIFTVFRILIRPEMFPKDWTVMRLVANNVIITTVLYLSDALRKNFLNENFDYKIWDSYFYLAVIFINQLCLQLEMFTPSKKKKVLEKYGDMRVTMGCEIFSMWQNLGEHKLHFIPALIGPFLEVTLIPQPDLRNVMIPIFHDMMDWEQRRSGNFKQVEAKLIDKLDSLMSEGKGDETYRELFNSIIPLFGPYPSLLKKIERETWRESGVSLIATVTRLMERLLDYRDCMKMGEVDGKKIGCTVSLLNFYKTELNKEEMYIRYIHKLYDLHLKAQNFTEAAYTLLLYDELLEWSDRPLREFLTYPMQTEWQRKEHLHLTIIQNFDRGKCWENGIILCRKIAEQYESYYDYRNLSKMRMMEASLYDKIMDQQRLEPEFFRVGFYGKKFPFFLRNKEFVCRGHDYERLEAFQQRMLNEFPHAIAMQHANQPDETIFQAEAQYLQIYAVTPIPESQEVLQREGVPDNIKSFYKVNHIWKFRYDRPFHKGTKDKENEFKSLWVERTSLYLVQSLPGISRWFEVEKREVVEMSPLENAIEVLENKNQQLKTLISQCQTRQMQNINPLTMCLNGVIDAAVNGGVSRYQEAFFVKEYILSHPEDGEKIARLRELMLEQAQILEFGLAVHEKFVPQDMRPLHKKLVDQFFVMKSSLGIQEFSACMQASPVHFPNGSPRVCRNSAPASVSPDGTRVIPRRSPLSYPAVNRYSSSSLSSQASAEVSNITGQSESSDEVFNMQPSPSTSSLSSTHSASPNVTSSAPSSARASPLLSDKHKHSRENSCLSPRERPCSAIYPTPVEPSQRMLFNHIGDGALPRSDPNLSAPEKAVNPTPSSWSLDSGKEAKNMSDSGKLISPPVPPRPTQTASPARHTTSVSPSPAGRSPLKGSVQSFTPSPVEYHSPGLISNSPVLSGSYSSGISSLSRCSTSETSGFENQVNEQSAPLPVPVPVPVPSYGGEEPVRKESKTPPPYSVYERTLRRPVPLPHSLSIPVTSEPPALPPKPLAARSSHLENGARRTDPGPRPRPLPRKVSQL

SEQ ID NO: 34596 - protein, 1072 aa, Artificial Sequence
  Synthetic polypeptide
LGASHLAHQKLHFTFFKKGEFVACLLSLLRQMTDRHYQQLLDSFNTKEELRDFLLQIFTVFRILIRPEMFPKDWTVMRLVANNVIITTVLYLSDALRKNFLNENFDYKIWDSYFYLAVIFINQLCLQLEMFTPSKKKKVLEKYGDMRVTMGCEIFSMWQNLGEHKLHFIPALIGPFLEVTLIPQPDLRNVMIPIFHDMMDWEQRRSGNFKQVEAKLIDKLDSLMSEGKGDETYRELFNSILLKKIERETWRESGVSLIATVTRLMERLLDYRDCMKMGEVDGKKIGCTVSLLNFYKTELNKEEMYIRYIHKLYDLHLKAQNFTEAAYTLLLYDELLEWSDRPLREFLTYPMQTEWQRKEHLHLTIIQNFDRGKCWENGIILCRKIAEQYESYYDYRNLSKMRMMEASLYDKIMDQQRLEPEFFRVGFYGKKFPFFLRNKEFVCRGHDYERLEAFQQRMLNEFPHAIAMQHANQPDETIFQAEAQYLQIYAVTPIPESQEVLQREGVPDNIKSFYKVNHIWKFRYDRPFHKGTKDKENEFKSLWVERTSLYLVQSLPGISRWFEVEKREVVEMSPLENAIEVLENKNQQLKTLISQCQTRQMQNINPLTMCLNGVIDAAVNGGVSRYQEAFFVKEYILSHPEDGEKIARLRELMLEQAQILEFGLAVHEKFVPQDMRPLHKKLVDQFFVMKSSLGIQEFSACMQASPVHFPNGSPRVCRNSAPASVSPDGTRVIPRRSPLSYPAVNRYSSSSLSSQASAEVSNITGQSESSDEVFNMQPSPSTSSLSSTHSASPNVTSSAPSSARASPLLSDKHKHSRENSCLSPRERPCSAIYPTPVEPSQRMLFNHIGDGALPRSDPNLSAPEKAVNPTPSSWSLDSGKEAKNMSDSGKLISPPVPPRPTQTASPARHTTSVSPSPAGRSPLKGSVQSFTPSPVEYHSPGLISNSPVLSGSYSSGISSLSRCSTSETSGFENQVNEQSAPLPVPVPVPVPSYGGEEPVRKESKTPPPYSVYERTLRRPVPLPHSLSIPVTSEPPALPPKPLAARSSHLENGARRTDPGPRPRPLPRKVSQL

SEQ ID NO: 34597 - protein, 56 aa, Artificial Sequence
  Synthetic polypeptide
RNLCLIHCCIATALSFDSKEKLLPVSEEPFHMACHWKLEIQFRSWRSVMAGTEDLP

SEQ ID NO: 34598 - protein, 33 aa, Artificial Sequence
  Synthetic polypeptide
VLTVRRSYCQFPRNRSIWPVIGNWRYSSDPGEV

SEQ ID NO: 34599 - protein, 1965 aa, Artificial Sequence
  Synthetic polypeptide
GEVIASFRGTVPYGLSLEIGDTVQILEKCDGWYRGFALKNPNIKGIFPSSYVHLKNACVKNKGQFEMVIPTEDSVITEMTSTLRDWGTMWKQLYVRNEGDLFHRLWHIMNEILDLRRQVLVGHLTHDRMKDVKRHITARLDWGNEQLGLDLVPRKEYAMVDPEDISITELYRLMEHRHRKKDTPVQASSHHLFVQMKSLMCSNLGEELEVIFSLFDSKENRPISERFFLRLNRNGLPKAPDKPERHCSLFVDLGSSELRKDIYITVHIIRIGRMGAGEKKNACSVQYRRPFGCAVLSIADLLTGETKDDLILKVYMCNTESEWYQIHENIIKKLNARYNLTGSNAGLAVSLQLLHGDIEQIRREYSSVFSHGVSITRKLGFSNIIMPGEMRNDLYITIERGEFEKGGKSVARNVEVTMFIVDSSGQTLKDFISFGSGEPPASEYHSFVLYHNNSPRWSELLKLPIPVDKFRGAHIRFEFRHCSTKEKGEKKLFGFSFVPLMQEDGRTLPDGTHELIVHKCEENTNLQDTTRYLKLPFSKGIFLGNNNQAMKATKESFCITSFLCSTKLTQNGDMLDLLKWRTHPDKITGCLSKLKEIDGSEIVKFLQDTLDTLFGILDENSQKYGSKVFDSLVHIINLLQDSKFHHFKPVMDTYIESHFAGALAYRDLIKVLKWYVDRITEAERQEHIQEVLKAQEYIFKYIVQSRRLFSLATGGQNEEEFRCCIQELLMSVRFFLSQESKGSGALSQSQAVFLSSFPAVYSELLKLFDVREVANLVQDTLGSLPTILHVDDSLQAIKLQCIGKTVESQLYTNPDSRYILLPVVLHHLHIHLQEQKDLIMCARILSNVFCLIKKNSSEKSVLEEIDVIVASLLDILLRTILEITSRPQPSSSAMRFQFQDVTGEFVACLLSLLRQMTDRHYQQLLDSFNTKEELRDFLLQIFTVFRILIRPEMFPKDWTVMRLVANNVIITTVLYLSDALRKNFLNENFDYKIWDSYFYLAVIFINQLCLQLEMFTPSKKKKVLEKYGDMRVTMGCEIFSMWQNLGEHKLHFIPALIGPFLEVTLIPQPDLRNVMIPIFHDMMDWEQRRSGNFKQVEAKLIDKLDSLMSEGKGDETYRELFNSIIPLFGPYPSLLKKIERETWRESGVSLIATVTRLMERLLDYRDCMKMGEVDGKKIGCTVSLLNFYKTELNKEEMYIRYIHKLYDLHLKAQNFTEAAYTLLLYDELLEWSDRPLREFLTYPMQTEWQRKEHLHLTIIQNFDRGKCWENGIILCRKIAEQYESYYDYRNLSKMRMMEASLYDKIMDQQRLEPEFFRVGFYGKKFPFFLRNKEFVCRGHDYERLEAFQQRMLNEFPHAIAMQHANQPDETIFQAEAQYLQIYAVTPIPESQEVLQREGVPDNIKSFYKVNHIWKFRYDRPFHKGTKDKENEFKSLWVERTSLYLVQSLPGISRWFEVEKREVVEMSPLENAIEVLENKNQQLKTLISQCQTRQMQNINPLTMCLNGVIDAAVNGGVSRYQEAFFVKEYILSHPEDGEKIARLRELMLEQAQILEFGLAVHEKFVPQDMRPLHKKLVDQFFVMKSSLGIQEFSACMQASPVHFPNGSPRVCRNSAPASVSPDGTRVIPRRSPLSYPAVNRYSSSSLSSQASAEVSNITGQSESSDEVFNMQPSPSTSSLSSTHSASPNVTSSAPSSARASPLLSDKHKHSRENSCLSPRERPCSAIYPTPVEPSQRMLFNHIGDGALPRSDPNLSAPEKAVNPTPSSWSLDSGKEAKNMSDSGKLISPPVPPRPTQTASPARHTTSVSPSPAGRSPLKGSVQSFTPSPVEYHSPGLISNSPVLSGSYSSGISSLSRCSTSETSGFENQVNEQSAPLPVPVPVPVPSYGGEEPVRKESKTPPPYSVYERTLRRPVPLPHSLSIPVTSEPPALPPKPLAARSSHLENGARRTDPGPRPRPLPRKVSQL

SEQ ID NO: 34600 - protein, 1956 aa, Artificial Sequence
  Synthetic polypeptide
GEVIASFRGTVPYGLSLEIGDTVQILEKCDGWYRGFALKNPNIKGIFPSSYVHLKNACVKNKGQFEMVIPTEDSVITEMTSTLRDWGTMWKQLYVRNEGDLFHRLWHIMNEILDLRRQVLVGHLTHDRMKDVKRHITARLDWGNEQLGLDLVPRKEYAMVDPEDISITELYRLMEHRHRKKDTPVQASSHHLFVQMKSLMCSNLGEELEVIFSLFDSKENRPISERFFLRLNRNGLPKAPDKPERHCSLFVDLGSSELRKDIYITVHIIRIGRMGAGEKKNACSVQYRRPFGCAVLSIADLLTGETKDDLILKVYMCNTESEWYQIHENIIKKLNARYNLTGSNAGLAVSLQLLHGDIEQIRREYSSVFSHGVSITRKLGFSNIIMPGEMRNDLYITIERGEFEKGGKSVARNVEVTMFIVDSSGQTLKDFISFGSGEPPASEYHSFVLYHNNSPRWSELLKLPIPVDKFRGAHIRFEFRHCSTKEKGEKKLFGFSFVPLMQEDGRTLPDGTHELIVHKCEENTNLQDTTRYLKLPFSKGIFLGNNNQAMKATKESFCITSFLCSTKLTQNGDMLDLLKWRTHPDKITGCLSKLKEIDGSEIVKFLQDTLDTLFGILDENSQKYGSKVFDSLVHIINLLQDSKFHHFKPVMDTYIESHFAGALAYRDLIKVLKWYVDRITEAERQEHIQEVLKAQEYIFKYIVQSRRLFSLATGGQNEEEFRCCIQELLMSVRFFLSQESKGSGALSQSQAVFLSSFPAVYSELLKLFDVREVANLVQDTLGSLPTILHVDDSLQAIKLQCIGKTVESQLYTNPDSRYILLPVVLHHLHIHLQEQKDLIMCARILSNVFCLIKKNSSEKSVLEEIDVIVASLLDILLRTILEITSRPQPSSSAMRFQFQDVTGEFVACLLSLLRQMTDRHYQQLLDSFNTKEELRDFLLQIFTVFRILIRPEMFPKDWTVMRLVANNVIITTVLYLSDALRKNFLNENFDYKIWDSYFYLAVIFINQLCLQLEMFTPSKKKKVLEKYGDMRVTMGCEIFSMWQNLGEHKLHFIPALIGPFLEVTLIPQPDLRNVMIPIFHDMMDWEQRRSGNFKQVEAKLIDKLDSLMSEGKGDETYRELFNSILLKKIERETWRESGVSLIATVTRLMERLLDYRDCMKMGEVDGKKIGCTVSLLNFYKTELNKEEMYIRYIHKLYDLHLKAQNFTEAAYTLLLYDELLEWSDRPLREFLTYPMQTEWQRKEHLHLTIIQNFDRGKCWENGIILCRKIAEQYESYYDYRNLSKMRMMEASLYDKIMDQQRLEPEFFRVGFYGKKFPFFLRNKEFVCRGHDYERLEAFQQRMLNEFPHAIAMQHANQPDETIFQAEAQYLQIYAVTPIPESQEVLQREGVPDNIKSFYKVNHIWKFRYDRPFHKGTKDKENEFKSLWVERTSLYLVQSLPGISRWFEVEKREVVEMSPLENAIEVLENKNQQLKTLISQCQTRQMQNINPLTMCLNGVIDAAVNGGVSRYQEAFFVKEYILSHPEDGEKIARLRELMLEQAQILEFGLAVHEKFVPQDMRPLHKKLVDQFFVMKSSLGIQEFSACMQASPVHFPNGSPRVCRNSAPASVSPDGTRVIPRRSPLSYPAVNRYSSSSLSSQASAEVSNITGQSESSDEVFNMQPSPSTSSLSSTHSASPNVTSSAPSSARASPLLSDKHKHSRENSCLSPRERPCSAIYPTPVEPSQRMLFNHIGDGALPRSDPNLSAPEKAVNPTPSSWSLDSGKEAKNMSDSGKLISPPVPPRPTQTASPARHTTSVSPSPAGRSPLKGSVQSFTPSPVEYHSPGLISNSPVLSGSYSSGISSLSRCSTSETSGFENQVNEQSAPLPVPVPVPVPSYGGEEPVRKESKTPPPYSVYERTLRRPVPLPHSLSIPVTSEPPALPPKPLAARSSHLENGARRTDPGPRPRPLPRKVSQL

SEQ ID NO: 34601 - protein, 2001 aa, Artificial Sequence
  Synthetic polypeptide
GEVIASFRGTVPYGLSLEIGDTVQILEKCDGWYRGFALKNPNIKGIFPSSYVHLKNACVKNKGQFEMVIPTEDSVITEMTSTLRDWGTMWKQLYVRNEGDLFHRLWHIMNEILDLRRQVLVGHLTHDRMKDVKRHITARLDWGNEQLGLDLVPRKEYAMVDPEDISITELYRLMEHRHRKKDTPVQASSHHLFVQMKSLMCSNLGEELEVIFSLFDSKENRPISERFFLRLNRNGLPKAPDKPERHCSLFVDLGSSELRKDIYITVHIIRIGRMGAGEKKNACSVQYRRPFGCAVLSIADLLTGETKDDLILKVYMCNTESEWYQIHENIIKKLNARYNLTGSNAGLAVSLQLLHGDIEQIRREYSSVFSHGVSITRKLGFSNIIMPGEMRNDLYITIERGEFEKGGKSVARNVEVTMFIVDSSGQTLKDFISFGSGEPPASEYHSFVLYHNNSPRWSELLKLPIPVDKFRGAHIRFEFRHCSTKEKGEKKLFGFSFVPLMQEDGRTLPDGTHELIVHKCEENTNLQDTTRYLKLPFSKGIFLGNNNQAMKATKESFCITSFLCSTKLTQNGDMLDLLKWRTHPDKITGCLSKLKEIDGSEIVKFLQDTLDTLFGILDENSQKYGSKVFDSLVHIINLLQDSKFHHFKPVMDTYIESHFAGALAYRDLIKVLKWYVDRITEAERQEHIQEVLKAQEYIFKYIVQSRRLFSLATGGQNEEEFRCCIQELLMSVRFFLSQESKGSGALSQSQAVFLSSFPAVYSELLKLFDVREVANLVQDTLGSLPTILHVDDSLQAIKLQCIGKTVESQLYTNPDSRYILLPVVLHHLHIHLQEQKDLIMCARILSNVFCLIKKNSSEKSVLEEIDVIVASLLDILLRTILEITSRPQPSSSAMRFQFQDVTRTGFLNRESSHGSTTLSTFSVCADTYGKVPMTSRHTGEFVACLLSLLRQMTDRHYQQLLDSFNTKEELRDFLLQIFTVFRILIRPEMFPKDWTVMRLVANNVIITTVLYLSDALRKNFLNENFDYKIWDSYFYLAVIFINQLCLQLEMFTPSKKKKVLEKYGDMRVTMGCEIFSMWQNLGEHKLHFIPALIGPFLEVTLIPQPDLRNVMIPIFHDMMDWEQRRSGNFKQVEAKLIDKLDSLMSEGKGDETYRELFNSIIPLFGPYPSLLKKIERETWRESGVSLIATVTRLMERLLDYRDCMKMGEVDGKKIGCTVSLLNFYKTELNKEEMYIRYIHKLYDLHLKAQNFTEAAYTLLLYDELLEWSDRPLREFLTYPMQTEWQRKEHLHLTIIQNFDRGKCWENGIILCRKIAEQYESYYDYRNLSKMRMMEASLYDKIMDQQRLEPEFFRVGFYGKKFPFFLRNKEFVCRGHDYERLEAFQQRMLNEFPHAIAMQHANQPDETIFQAEAQYLQIYAVTPIPESQEVLQREGVPDNIKSFYKVNHIWKFRYDRPFHKGTKDKENEFKSLWVERTSLYLVQSLPGISRWFEVEKREVVEMSPLENAIEVLENKNQQLKTLISQCQTRQMQNINPLTMCLNGVIDAAVNGGVSRYQEAFFVKEYILSHPEDGEKIARLRELMLEQAQILEFGLAVHEKFVPQDMRPLHKKLVDQFFVMKSSLGIQEFSACMQASPVHFPNGSPRVCRNSAPASVSPDGTRVIPRRSPLSYPAVNRYSSSSLSSQASAEVSNITGQSESSDEVFNMQPSPSTSSLSSTHSASPNVTSSAPSSARASPLLSDKHKHSRENSCLSPRERPCSAIYPTPVEPSQRMLFNHIGDGALPRSDPNLSAPEKAVNPTPSSWSLDSGKEAKNMSDSGKLISPPVPPRPTQTASPARHTTSVSPSPAGRSPLKGSVQSFTPSPVEYHSPGLISNSPVLSGSYSSGISSLSRCSTSETSGFENQVNEQSAPLPVPVPVPVPSYGGEEPVRKESKTPPPYSVYERTLRRPVPLPHSLSIPVTSEPPALPPKPLAARSSHLENGARRTDPGPRPRPLPRKVSQL

SEQ ID NO: 34602 - protein, 4 aa, Artificial Sequence
  Synthetic polypeptide
VRKM

SEQ ID NO: 34603 - protein, 218 aa, Artificial Sequence
  Synthetic polypeptide
AELGKCDKDNTEKDITQATNSHFTHGEMQDQSIWGNPSDGELIRTQPQRLPQLQTSAQVPSGEEIGKIKNGHTGLSNGNGIHHGAKHGSADNRKLSAPVSQKMHRKIQSSLSVNSDISKKSKVNAVFSQKTGSSPEDCCVHCILACLFCEFLTLCNIVLGQASCGICTSEACCCCCGDEMGDDCNCPCDMDCGIMDACCESSDCLEICMECCGICFPS

SEQ ID NO: 34604 - protein, 138 aa, Artificial Sequence
  Synthetic polypeptide
AELGKCDKDNTEKDITQATNSHFTHGEMQDQSIWGNPSDGELIRTQPQRLPQLQTSAQVPSGEEIGKIKNGHTGLSNGNGIHHGAKHGSADNRKLSAPVSQKMHRKIQSSLSVNSDISKKSKVNAVFSQKTGSSPEVC

SEQ ID NO: 34605 - protein, 142 aa, Artificial Sequence
  Synthetic polypeptide
AELGKCDKDNTEKDITQATNSHFTHGEMQDQSIWGNPSDGELIRTQPQRLPQLQTSAQVPSGEEIGKIKNGHTGLSNGNGIHHGAKHGSADNRKLSAPVSQKMHRKIQSSLSVNSDISKKSKVNAVFSQKTGSSPEDKQEFW

SEQ ID NO: 34606 - protein, 31 aa, Artificial Sequence
  Synthetic polypeptide
HVTMSPSTPGKFCKASATESPETESKLFHDP

SEQ ID NO: 34607 - protein, 30 aa, Artificial Sequence
  Synthetic polypeptide
LATNLTCDYESQHTWKVLQGLSYRKPRDRK

SEQ ID NO: 34608 - protein, 43 aa, Artificial Sequence
  Synthetic polypeptide
DPFSIKNTKNYPGVVARACSPSCSGGGGAYSSKIHHSCPSWRI

SEQ ID NO: 34609 - protein, 303 aa, Artificial Sequence
  Synthetic polypeptide
HSEIPSLSKIQKIIQVWWHVPVVPAAQEAEVRIAAKFIIHAPPGEFNEVFNDVRLLLNNDNLLREGAAHAFAQYNLDQFTPVKIEGYEDQVLITEHGDLGNGKFLDPKNRICFKFDHLRKEATDPRPCEVENAVESWRTSVETALRAYVKEHYPNGVCTVYGKKIDGQQTIIACIESHQFQAKNFWNGRWRSEWKFTITPSTTQVVGILKIQVHYYEDGNVQLVSHKDIQDSLTVSNEVQTAKEFIKIVEAAENEYQTAISENYQTMSDTTFKALRRQLPVTRTKIDWNKILSYKIGKEMQNA

SEQ ID NO: 34610 - protein, 10 aa, Artificial Sequence
  Synthetic polypeptide
SQLLRRRRCV

SEQ ID NO: 34611 - protein, 189 aa, Artificial Sequence
  Synthetic polypeptide
HSEIPSLSKIQKIIQVWWHVPVVPAAQEAEVRIAAKFIIHAPPGEFNEVFNDVRLLLNNDNLLREGAAHAFAQYNLDQFTPVKIEGYEDQVLITEHGDLGNGKFLDPKNRICFKFDHLRKEATDPRPCEVENAVESWRTSVETALRAYVKEHYPNGVCTEWSLEVRMEVYNHSFNHSSGWHLENSGSLL

SEQ ID NO: 34612 - protein, 163 aa, Artificial Sequence
  Synthetic polypeptide
HSEIPSLSKIQKIIQVWWHVPVVPAAQEAEVRIAAKFIIHAPPGEFNEVFNDVRLLLNNDNLLREGAAHAFAQYNLDQFTPVKIEGYEDQVLITEHGDLGNGKFLDPKNRICFKFDHLRKEATDPRPCEVENAVESWRTSVETALRAYVKEHYPNGVCTVSHQ

SEQ ID NO: 34613 - protein, 191 aa, Artificial Sequence
  Synthetic polypeptide
HSEIPSLSKIQKIIQVWWHVPVVPAAQEAEVRIAAKFIIHAPPGEFNEVFNDVRLLLNNDNLLREGAAHAFAQYNLDQFTPVKIEGYEDQVLITEHGDLGNGKFLDPKNRICFKFDHLRKEATDPRPCEVENAVESWRTSVETALRAYVKEHYPNGVCTVYGKKIDGQQTIIACIESHQFQAKNFCCCFYF

SEQ ID NO: 34614 - protein, 235 aa, Artificial Sequence
  Synthetic polypeptide
WIGRLNYVIITSWDIMQPFKRMVLITEHGDLGNGKFLDPKNRICFKFDHLRKEATDPRPCEVENAVESWRTSVETALRAYVKEHYPNGVCTVYGKKIDGQQTIIACIESHQFQAKNFWNGRWRSEWKFTITPSTTQVVGILKIQVHYYEDGNVQLVSHKDIQDSLTVSNEVQTAKEFIKIVEAAENEYQTAISENYQTMSDTTFKALRRQLPVTRTKIDWNKILSYKIGKEMQNA

SEQ ID NO: 34615 - protein, 14 aa, Artificial Sequence
  Synthetic polypeptide
SRHGTLCSHLKEWY

SEQ ID NO: 34616 - protein, 25 aa, Artificial Sequence
  Synthetic polypeptide
KNGIDNRTWRLGKWKVFGSKEQNLF

SEQ ID NO: 34617 - protein, 121 aa, Artificial Sequence
  Synthetic polypeptide
WIGRLNYVIITSWDIMQPFKRMVLITEHGDLGNGKFLDPKNRICFKFDHLRKEATDPRPCEVENAVESWRTSVETALRAYVKEHYPNGVCTEWSLEVRMEVYNHSFNHSSGWHLENSGSLL

SEQ ID NO: 34618 - protein, 95 aa, Artificial Sequence
  Synthetic polypeptide
WIGRLNYVIITSWDIMQPFKRMVLITEHGDLGNGKFLDPKNRICFKFDHLRKEATDPRPCEVENAVESWRTSVETALRAYVKEHYPNGVCTVSHQ

SEQ ID NO: 34619 - protein, 123 aa, Artificial Sequence
  Synthetic polypeptide
WIGRLNYVIITSWDIMQPFKRMVLITEHGDLGNGKFLDPKNRICFKFDHLRKEATDPRPCEVENAVESWRTSVETALRAYVKEHYPNGVCTVYGKKIDGQQTIIACIESHQFQAKNFCCCFYF

SEQ ID NO: 34620 - protein, 17 aa, Artificial Sequence
  Synthetic polypeptide
SYHFGKLRMKCKQQKNL

SEQ ID NO: 34621 - protein, 82 aa, Artificial Sequence
  Synthetic polypeptide
VRWLTSVILSFREAENEVQTAKEFIKIVEAAENEYQTAISENYQTMSDTTFKALRRQLPVTRTKIDWNKILSYKIGKEMQNA

SEQ ID NO: 34622 - protein, 33 aa, Artificial Sequence
  Synthetic polypeptide
LISGCRHIIADCCKLRVISRILFPDSLIGIAMI

SEQ ID NO: 34623 - protein, 199 aa, Artificial Sequence
  Synthetic polypeptide
NPIPRFSHWYCHDISLPKSATICYTAALLKARAVSDKFSPEAASRRGLSTAEMNAVEAIHRAVEFNPHVPKYLLEMKSLILPPEHILKRGDSEAIAYAFFHLAHWKRVEGALNLLHCTWEGTFHEVSVYPKKELPFFILFTAGLCSFTAMLALLTHQFPELMGVFAKAFLSTLFAPLNFVMEKVESILPSSLWHQLTRI

SEQ ID NO: 34624 - protein, 238 aa, Artificial Sequence
  Synthetic polypeptide
NPIPRFSHWYCHDISLPKSATICYTAALLKARAVSDKFSPEAASRRGLSTAEMNAVEAIHRAVEFNPHVPKYLLEMKSLILPPEHILKRGDSEAIAYAFFHLAHWKRVEGALNLLHCTWEGTFRMIPYPLEKGHLFYPYPICTETADRELLPSFHEVSVYPKKELPFFILFTAGLCSFTAMLALLTHQFPELMGVFAKAMIDIFCSAEFRDWNCKSIFMRVEDELEIPPAPQSQHFQN

SEQ ID NO: 34625 - protein, 230 aa, Artificial Sequence
  Synthetic polypeptide
NPIPRFSHWYCHDISLPKSATICYTAALLKARAVSDKFSPEAASRRGLSTAEMNAVEAIHRAVEFNPHVPKYLLEMKSLILPPEHILKRGDSEAIAYAFFHLAHWKRVEGALNLLHCTWEGTFRMIPYPLEKGHLFYPYPICTETADRELLPSFHEVSVYPKKELPFFILFTAGLCSFTAMLALLTHQFPELMGVFAKAFLSTLFAPLNFVMEKVESILPSSLWHQLTRI

SEQ ID NO: 34626 - protein, 225 aa, Artificial Sequence
  Synthetic polypeptide
NPIPRFSHWYCHDISLPKSATICYTAALLKARAVSDKFSPEAASRRGLSTAEMNAVEAIHRAVEFNPHVPKYLLEMKSLILPPEHILKRGDSEAIAYAFFHLAHWKRVEGALNLLHSFRMIPYPLEKGHLFYPYPICTETADRELLPSFHEVSVYPKKELPFFILFTAGLCSFTAMLALLTHQFPELMGVFAKAFLSTLFAPLNFVMEKVESILPSSLWHQLTRI

SEQ ID NO: 34627 - protein, 234 aa, Artificial Sequence
  Synthetic polypeptide
NPIPRFSHWYCHDISLPKSATICYTAALLKARAVSDKFSPEAASRRGLSTAEMNAVEAIHRAVEFNPHVPKYLLEMKSLILPPEHILKRGDSEAIAYAFFHLAHWKRVEGALNLLHCTWEGIPQHFVCPLKLCHGESGEHPPIQSVAPANTDLREALSSTHLTRRCHHLLCANSLWTARKHDFEKGKPFRDFKMFMDYSILKAVFVVQNSLMFSSILFCLQKRRKSKIKLLCIT

SEQ ID NO: 34628 - protein, 266 aa, Artificial Sequence
  Synthetic polypeptide
NPIPRFSHWYCHDISLPKSATICYTAALLKARAVSDKFSPEAASRRGLSTAEMNAVEAIHRAVEFNPHVPKYLLEMKSLILPPEHILKRGDSEAIAYAFFHLAHWKRVEGALNLLHCTWEGTFRMIPYPLEKGHLFYPYPICTETADRELLPFPQHFVCPLKLCHGESGEHPPIQSVAPANTDLREALSSTHLTRRCHHLLCANSLWTARKHDFEKGKPFRDFKMFMDYSILKAVFVVQNSLMFSSILFCLQKRRKSKIKLLCITA

SEQ ID NO: 34629 - protein, 223 aa, Artificial Sequence
  Synthetic polypeptide
EQTESQLLNTRAVLAGIQRRRVAQLLRLHVFPELSTDISLPKSATICYTAALLKARAVSDKFSPEAASRRGLSTAEMNAVEAIHRAVEFNPHVPKYLLEMKSLILPPEHILKRGDSEAIAYAFFHLAHWKRVEGALNLLHCTWEGTFHEVSVYPKKELPFFILFTAGLCSFTAMLALLTHQFPELMGVFAKAFLSTLFAPLNFVMEKVESILPSSLWHQLTRI

SEQ ID NO: 34630 - protein, 23 aa, Artificial Sequence
  Synthetic polypeptide
LVFRDVEWHSSSDCTFSLSSLLI

SEQ ID NO: 34631 - protein, 262 aa, Artificial Sequence
  Synthetic polypeptide
EQTESQLLNTRAVLAGIQRRRVAQLLRLHVFPELSTDISLPKSATICYTAALLKARAVSDKFSPEAASRRGLSTAEMNAVEAIHRAVEFNPHVPKYLLEMKSLILPPEHILKRGDSEAIAYAFFHLAHWKRVEGALNLLHCTWEGTFRMIPYPLEKGHLFYPYPICTETADRELLPSFHEVSVYPKKELPFFILFTAGLCSFTAMLALLTHQFPELMGVFAKAMIDIFCSAEFRDWNCKSIFMRVEDELEIPPAPQSQHFQN

SEQ ID NO: 34632 - protein, 254 aa, Artificial Sequence
  Synthetic polypeptide
EQTESQLLNTRAVLAGIQRRRVAQLLRLHVFPELSTDISLPKSATICYTAALLKARAVSDKFSPEAASRRGLSTAEMNAVEAIHRAVEFNPHVPKYLLEMKSLILPPEHILKRGDSEAIAYAFFHLAHWKRVEGALNLLHCTWEGTFRMIPYPLEKGHLFYPYPICTETADRELLPSFHEVSVYPKKELPFFILFTAGLCSFTAMLALLTHQFPELMGVFAKAFLSTLFAPLNFVMEKVESILPSSLWHQLTRI

SEQ ID NO: 34633 - protein, 249 aa, Artificial Sequence
  Synthetic polypeptide
EQTESQLLNTRAVLAGIQRRRVAQLLRLHVFPELSTDISLPKSATICYTAALLKARAVSDKFSPEAASRRGLSTAEMNAVEAIHRAVEFNPHVPKYLLEMKSLILPPEHILKRGDSEAIAYAFFHLAHWKRVEGALNLLHSFRMIPYPLEKGHLFYPYPICTETADRELLPSFHEVSVYPKKELPFFILFTAGLCSFTAMLALLTHQFPELMGVFAKAFLSTLFAPLNFVMEKVESILPSSLWHQLTRI

SEQ ID NO: 34634 - protein, 258 aa, Artificial Sequence
  Synthetic polypeptide
EQTESQLLNTRAVLAGIQRRRVAQLLRLHVFPELSTDISLPKSATICYTAALLKARAVSDKFSPEAASRRGLSTAEMNAVEAIHRAVEFNPHVPKYLLEMKSLILPPEHILKRGDSEAIAYAFFHLAHWKRVEGALNLLHCTWEGIPQHFVCPLKLCHGESGEHPPIQSVAPANTDLREALSSTHLTRRCHHLLCANSLWTARKHDFEKGKPFRDFKMFMDYSILKAVFVVQNSLMFSSILFCLQKRRKSKIKLLCIT

SEQ ID NO: 34635 - protein, 290 aa, Artificial Sequence
  Synthetic polypeptide
EQTESQLLNTRAVLAGIQRRRVAQLLRLHVFPELSTDISLPKSATICYTAALLKARAVSDKFSPEAASRRGLSTAEMNAVEAIHRAVEFNPHVPKYLLEMKSLILPPEHILKRGDSEAIAYAFFHLAHWKRVEGALNLLHCTWEGTFRMIPYPLEKGHLFYPYPICTETADRELLPFPQHFVCPLKLCHGESGEHPPIQSVAPANTDLREALSSTHLTRRCHHLLCANSLWTARKHDFEKGKPFRDFKMFMDYSILKAVFVVQNSLMFSSILFCLQKRRKSKIKLLCITA

SEQ ID NO: 34636 - protein, 9 aa, Artificial Sequence
  Synthetic polypeptide
SWTSQPPEL

SEQ ID NO: 34637 - protein, 43 aa, Artificial Sequence
  Synthetic polypeptide
QTQICWHLDLGLPSLQNYNDGCRAPLQWRHCQPSGHEGESDFN

SEQ ID NO: 34638 - protein, 102 aa, Artificial Sequence
  Synthetic polypeptide
SMRVKSLVNEISVFIKETLERPSHLRETLTPFCHVRTQQEDSWLSRIQESLSRPKSAGTLILDFPASRTIMMVAGPLFNGGIASLLAMKEKVISTNPGNSYL

SEQ ID NO: 34639 - protein, 197 aa, Artificial Sequence
  Synthetic polypeptide
GSFPCSCTLFLACHHVRHNSFPSAMIVSFLRPSQPCGTVGLRSVIEQFPGKLDFVLVDGGCVLSHGHKQLMCLARSVLSKAKILLLDEPSAHLDPVTYQIIRRTLKQAFADCTVILCEHRIEAMLECQQFLVIEENKVRQYDSIQKLLNERSLFRQAISPSDRVKLFPHRNSSKCKSKPQIAALKEETEEEVQDTRL

SEQ ID NO: 34640 - protein, 13 aa, Artificial Sequence
  Synthetic polypeptide
GLPSHVELLGSDL

SEQ ID NO: 34641 - protein, 33 aa, Artificial Sequence
  Synthetic polypeptide
LFPFRHDCKFPEAFPAMWNCWAQICDRTVSWEA

SEQ ID NO: 34642 - protein, 185 aa, Artificial Sequence
  Synthetic polypeptide
GSFPCSCTLFLACHHVRHNSFPSAMIVSFLRPSQPCGTVGLRSVIEQFPGKLDFVLVDGGCVLSHGHKQLMCLARSVLSKAKILLLDEPSAHLDPVTYQIIRRTLKQAFADCTVILCEHRIEAMLECQQFLVIEENKVRQYDSIQKLLNERSLFRQAISPSDRVKLFPHRNSSKCKSKPQIAALK

SEQ ID NO: 34643 - protein, 164 aa, Artificial Sequence
  Synthetic polypeptide
GSFPCSCTLFLACHHVRHNSFPSAMIVSFLRPSQPCGTVGLRSVIEQFPGKLDFVLVDGGCVLSHGHKQLMCLARSVLSKAKILLLDEPSAHLDPVTYQIIRRTLKQAFADCTVILCEHRIEAMLECQQFLIMMVAGPLFNGGIASLLAMKEKVISTNPGNSYL

SEQ ID NO: 34644 - protein, 29 aa, Artificial Sequence
  Synthetic polypeptide
ANKYNDGCRAPLQWRHCQPSGHEGESDFN

SEQ ID NO: 34645 - protein, 49 aa, Artificial Sequence
  Synthetic polypeptide
PLDTGLPSLQNCKPTNIMMVAGPLFNGGIASLLAMKEKVISTNPGNSYL

SEQ ID NO: 34646 - protein, 54 aa, Artificial Sequence
  Synthetic polypeptide
VHYKRTSLAPFSLFLALFWPFCLLPWDDTAQKPSPDADPLILDFPASRTVSQQI

SEQ ID NO: 34647 - protein, 29 aa, Artificial Sequence
  Synthetic polypeptide
ESLEPVQSLEKSMKKQILRLIWGIFEQNL

SEQ ID NO: 34648 - protein, 22 aa, Artificial Sequence
  Synthetic polypeptide
SQLLGRLKHENRLNLCSHWRNR

SEQ ID NO: 34649 - protein, 31 aa, Artificial Sequence
  Synthetic polypeptide
TCAVIGEIDEETDSALDLGNIRAEPLNSVAH

SEQ ID NO: 34650 - protein, 27 aa, Artificial Sequence
  Synthetic polypeptide
GLPSHVELQTDYQKYSSHFAERKDYVK

SEQ ID NO: 34651 - protein, 39 aa, Artificial Sequence
  Synthetic polypeptide
GMLFTFCHNYEASPATWNCKQITRNTAATLQKGRIMSNS

SEQ ID NO: 34652 - protein, 892 aa, Artificial Sequence
  Synthetic polypeptide
VSLTRSDGFIRDFPFHLALIRSCLPPCKVCFSLSAIIMRPPQPRGTANRLPEIQQPLCRKEGLCQIVRRFPELQLPVSPSVCLDQGMQLKPSTSSHLLKTVKPRVWKPGDWSREQLNETTVLAPHETIFRAEDLSVILKAYVLVTSLTPLRAFIHSTGTVWNPPKKKRFTVKLQTFFETFLRASSPQQAFDIMKEAIGKLLLAAEVFSETSTLGPKTFHRCRFCFQLLTFDIGYGSFMYPVVLQVHEHLNFQDYDNMDFEDQNTEEFLLNDTFNFLFPNESSLSIFSEIFQRLYRSDVFKGENYQKELNQCLSLEEINSIMTFIKELGSLGQFQLLFPSTTPGIQSLMHEFYDVANPVGNPGSVLTQYWSLLNVFEQFQFMNKKTQPHPLEWNSFTEDKNIEKPQVPFDAIENKKAAVPQIKNENKEIHCSDDENTPCHIKQIFTHPHLELNPDFHPKIKDYYCEVPFDVVTVTIGVETPKCLCKVHLYEQAGPSFASYPLGLGMNKISIFVVDESPAHGETLITYKLTIYREDRPSLPLFEAFTACGFVQDCGLLIHPEETCGLQPISSDYIEAILQSELKRCPSGDMKGQWIVPCLSCSDNRTCDWREITWQPHNCQYGVLTKPQLQQCLGGRKILFIGDSTNRGIMYYLIERLNETLQEWQKVHGTKFYHNVNGGKTLISYSYYPQFWISPSLRPTFENALEHLLQRSRPLENTGQTVLVVGGVQWLNSNHLQIIHKVLKRENLLNILVIIKTLGIGFHLPVDGVHFLTQSEVQNLWKENLIILDTAKKHGYEVVDTFTITMGRYKEFLQGKCGCHFHEVVKSKLSKEYNFIKMKRSRNHIMGRYFSNQSKLQQGTVTNFRSPYHVRGPINQVCSEILLSRMCANKRTM

SEQ ID NO: 34653 - protein, 415 aa, Artificial Sequence
  Synthetic polypeptide
VSLTRSDGFIRDFPFHLALIRSCLPPCKVCFSLSAIIMRPPQPRGTANRLPEIQQPLCRKEGLCQIVRRFPELQLPVSPSVCLDQGMQLKPSTSSHLLKTVKPRVWKPGDWSREQLNETTVLAPHETIFRAEDLSVILKAYVLVTSLTPLRAFIHSTGTVWNPPKKKRFTVKLQTFFETFLRASSPQQAFDIMKEAIGKLLLAAEVFSETSTLGPKTFHRCRFCFQLLTFDIGYGSFMYPVVLQVHEHLNFQDYDNMDFEDQNTEEFLLNDTFNFLFPNESSLSIFSEIFQRLYRSDVFKGENYQKELNQCLSLEEINSIMTFIKELGSLGQFQLLFPSTTPGIQSLMHEFYDVANPVGNPGSVLTQYWSLLNVFEQFQFMNKKTQPHPLEWNSFTEDKNIEKPQVPFDAIENKK

SEQ ID NO: 34654 - protein, 649 aa, Artificial Sequence
  Synthetic polypeptide
VSLTRSDGFIRDFPFHLALIRSCLPPCKVCFSLSAIIMRPPQPRGTANRLPEIQQPLCRKEGLCQIVRRFPELQLPVSPSVCLDQGMQLKPSTSSHLLKTVKPRVWKPGDWSREQLNETTVLAPHETIFRAEDLSVILKAYVLVTSLTPLRAFIHSTGTVWNPPKKKRFTVKLQTFFETFLRASSPQQAFDIMKEAIGKLLLAAEVFSETSTLGPKTFHRCRFCFQLLTFDIGYGSFMYPVVLQVHEHLNFQDYDNMDFEDQNTEEFLLNDTFNFLFPNESSLSIFSEIFQRLYRSDVFKGENYQKELNQCLSLEEINSIMTFIKELGSLGQFQLLFPSTTPGIQSLMHEFYDVANPVGNPGSVLTQYWSLLNVFEQFQFMNKKTQPHPLEWNSFTEDKNIEKPQVPFDAIENKKAAVPQIKNENKEIHCSDDENTPCHIKQIFTHPHLELNPDFHPKIKDYYCEVPFDVVTVTIGVETPKCLCKVHLYEQAGPSFASYPLGLGMNKISIFVVDESPAHGETLITYKLTIYREDRPSLPLFEAFTACGFVQDCGLLIHPEETCGLQPISSDYIEAILQSELKRCPSGDMKGQWIVPCLSCSDNRTCDWREITWQPHNCQYGVLTKPQLQQCLGGRKLGVDVQRVPRSRN

SEQ ID NO: 34655 - protein, 277 aa, Artificial Sequence
  Synthetic polypeptide
PPCPTPAHKPDLNHLDYFSERILFIGDSTNRGIMYYLIERLNETLQEWQKVHGTKFYHNVNGGKTLISYSYYPQFWISPSLRPTFENALEHLLQRSRPLENTGQTVLVVGGVQWLNSNHLQIIHKVLKRENLLNILVIIKTLGIGFHLPVDGVHFLTQSEVQNLWKENLIILDTAKKHGYEVVDTFTITMGRYKEFLQGKCGCHFHEVVKSKLSKEYNFIKMKRSRNHIMGRYFSNQSKLQQGTVTNFRSPYHVRGPINQVCSEILLSRMCANKRTM

SEQ ID NO: 34656 - protein, 28 aa, Artificial Sequence
  Synthetic polypeptide
ITWTIFLREFCSLEIQPTEGSCTILLKG

SEQ ID NO: 34657 - protein, 18 aa, Artificial Sequence
  Synthetic polypeptide
ENSVHWRFNQQRDHVLSY

SEQ ID NO: 34658 - protein, 357 aa, Artificial Sequence
  Synthetic polypeptide
ERSTYDLRSSDRPAQETSHQFQIRWLGIASFGVPEKLGCANLPLNSRQKELCKRKPYLLPSIREGARLGIQECGSQFRHERWNCMITAAATTAPMGASPLFGYELSSGTKETAFIYAVMAAGLVHSVTRSCSAGNMTECSCDTTLQNGGSASEGWHWGGCSDDVQYGMWFSRKFLDFPIGNTTGKENKVLLAMNLHNNEAGRQAVAKLMSVDCRCHGVSGSCAVKTCWKTMSSFEKIGHLLKDKYENSIQISDKTKRKMRRREKDQRKIPIHKDDLLYVNKSPNYCVEDKKLGIPGTQGRECNRTSEGADGCNLLCCGRGYNTHVVRHVERCECKFIWCCYVRCRRCESMTDVHTCK

SEQ ID NO: 34659 - protein, 64 aa, Artificial Sequence
  Synthetic polypeptide
LGLGDLPWEINPPSFCSLLREKDPPMTSGPQTDQPKKHLTNFKSGGWALPPSGFQRSWAAPICR

SEQ ID NO: 34660 - protein, 135 aa, Artificial Sequence
  Synthetic polypeptide
PQVLRPTSPRNISPISNPVVGHCLLRGSREAGLRQFAAEQPPEGAVQEETVPAAEHPRGRPAGHSGVREPVQTREMELHDHRRRHYRPDGRQPPLWLRAEQRHQRDSIYLCCDGCRPGAFCDQVMQCRQHDRVFL

SEQ ID NO: 34661 - protein, 122 aa, Artificial Sequence
  Synthetic polypeptide
LSQWKVVGHCLLRGSREAGLRQFAAEQPPEGAVQEETVPAAEHPRGRPAGHSGVREPVQTREMELHDHRRRHYRPDGRQPPLWLRAEQRHQRDSIYLCCDGCRPGAFCDQVMQCRQHDRVFL

SEQ ID NO: 34662 - protein, 360 aa, Artificial Sequence
  Synthetic polypeptide
RLMLPDCLGSPVDHHGHRALGNSHSGRWLGIASFGVPEKLGCANLPLNSRQKELCKRKPYLLPSIREGARLGIQECGSQFRHERWNCMITAAATTAPMGASPLFGYELSSGTKETAFIYAVMAAGLVHSVTRSCSAGNMTECSCDTTLQNGGSASEGWHWGGCSDDVQYGMWFSRKFLDFPIGNTTGKENKVLLAMNLHNNEAGRQAVAKLMSVDCRCHGVSGSCAVKTCWKTMSSFEKIGHLLKDKYENSIQISDKTKRKMRRREKDQRKIPIHKDDLLYVNKSPNYCVEDKKLGIPGTQGRECNRTSEGADGCNLLCCGRGYNTHVVRHVERCECKFIWCCYVRCRRCESMTDVHTCK

SEQ ID NO: 34663 - protein, 34 aa, Artificial Sequence
  Synthetic polypeptide
TITDTELWVTLTVEGGWALPPSGFQRSWAAPICR

SEQ ID NO: 34664 - protein, 9 aa, Artificial Sequence
  Synthetic polypeptide
MIIKFNEWC

SEQ ID NO: 34665 - protein, 139 aa, Artificial Sequence
  Synthetic polypeptide
SLSLMSGVKNNVGRGINVALANGKTGEVLDTKYFDMWGGDVAPFIEFLKAIQDGTIVLMGTYDDGATKLNDEARRLIADLGSTSITNLGFRDNWVFCGGKGIKTKSPFEQHIKNNKDTNKYEGWPEVVEMEGCIPQKQD

SEQ ID NO: 34666 - protein, 63 aa, Artificial Sequence
  Synthetic polypeptide
SLSLMSGVKNNVGRGINVALANGKTGEVLDTKYFDMWGGDVAPFIEFLKAIQDGTIVLMGTYD

SEQ ID NO: 34667 - protein, 51 aa, Artificial Sequence
  Synthetic polypeptide
SLSLMSGVKNNVGRGINVALANGKTGEVLDTKYFDMWGGDVAPFIEFLKAI

SEQ ID NO: 34668 - protein, 208 aa, Artificial Sequence
  Synthetic polypeptide
FQLLRRPRWEDHWSPGVPGCARSALDTAARSTKPPRYKCGISKACPEKHFAFKMASGAANVVGPKICLEDNVLMSGVKNNVGRGINVALANGKTGEVLDTKYFDMWGGDVAPFIEFLKAIQDGTIVLMGTYDDGATKLNDEARRLIADLGSTSITNLGFRDNWVFCGGKGIKTKSPFEQHIKNNKDTNKYEGWPEVVEMEGCIPQKQD

SEQ ID NO: 34669 - protein, 81 aa, Artificial Sequence
  Synthetic polypeptide
MAVVACTCNSSYSGGRGGRITGAQEFQAVQDQHWTQLHVLQSLPDISVGSQKLALRSILLLKWQVEQPTWWDPKSAWKIMF

SEQ ID NO: 34670 - protein, 45 aa, Artificial Sequence
  Synthetic polypeptide
WLWWLAPVIPATQEAEVGGSLEPRSSRLCKISIGHSCTFYKASQI

SEQ ID NO: 34671 - protein, 132 aa, Artificial Sequence
  Synthetic polypeptide
FQLLRRPRWEDHWSPGVPGCARSALDTAARSTKPPRYKCGISKACPEKHFAFKMASGAANVVGPKICLEDNVLMSGVKNNVGRGINVALANGKTGEVLDTKYFDMWGGDVAPFIEFLKAIQDGTIVLMGTYD

SEQ ID NO: 34672 - protein, 120 aa, Artificial Sequence
  Synthetic polypeptide
FQLLRRPRWEDHWSPGVPGCARSALDTAARSTKPPRYKCGISKACPEKHFAFKMASGAANVVGPKICLEDNVLMSGVKNNVGRGINVALANGKTGEVLDTKYFDMWGGDVAPFIEFLKAI

SEQ ID NO: 34673 - protein, 30 aa, Artificial Sequence
  Synthetic polypeptide
SQCFGRPRQADHLRSGVRGQPGQYGSPSNL

SEQ ID NO: 34674 - protein, 708 aa, Artificial Sequence
  Synthetic polypeptide
GQEFEANLANMGAQAIFNELPCEYVEPHELKEVSQTGDLRKVYGTVLSRHHHLVRKTDAVYDPAEYDKHPERYISRFNTDIAPYTTCLINGIYWEQNTPRLLTRQDAQSLLAPGKFSPAGVEGCPALPHKLVAICDISADTGGSIEFMTECTTIEHPFCMYDADQHIIHDSVEGSGILMCSIDNLPAQLPIEATECFGDMLYPYVEEMILSDATQPLESQNFSPVVRDAVITSNGTLPDKYKYIQTLRESRERAQSLSMGTRRKVLVLGSGYISEPVLEYLSRDGNIEITVGSDMKNQIEQLGKKYNINPVSMDICKQEEKLGFLVAKQDLVISLLPYVLHPLVAKACITNKVNMVTASYITPALKELEKSVEDAGITIIGELGLDPGLDHMLAMETIDKAKEVGATIESYISYCGGLPAPEHSNNPLRYKFSWSPVGVLMNVMQSATYLLDGKVVNVAGGISFLDAVTSMDFFPGLNLEGYPNRDSTKYAEIYGISSAHTLLRGTLRYKGYMKALNGFVKLGLINREALPAFRPEANPLTWKQLLCDLVGISPSSEHDVLKEAVLKKLGGDNTQLEAAEWLGLLGDEQVPQAESILDALSKHLVMKLSYGPEEKDMIVMRDSFGIRHPSGHLEHKTIDLVAYGDINGFSAMAKTVGLPTAMAAKMLLDGEIGAKGLMGPFSKEIYGPILERIKAEGIIYTTQSTIKP

SEQ ID NO: 34675 - protein, 51 aa, Artificial Sequence
  Synthetic polypeptide
QTWWLTPIIPVLWEAEAGGSPEVRSSRPTWPIWEPKQSLMSYLVNMWSPMN

SEQ ID NO: 34676 - protein, 514 aa, Artificial Sequence
  Synthetic polypeptide
GQEFEANLANMGAQAIFNELPCEYVEPHELKEVSQTGDLRKVYGTVLSRHHHLVRKTDAVYDPAEYDKHPERYISRFNTDIAPYTTCLINGIYWEQNTPRLLTRQDAQSLLAPGKFSPAGVEGCPALPHKLVAICDISADTGGSIEFMTECTTIEHPFCMYDADQHIIHDSVEGSGILMCSIDNLPAQLPIEATECFGDMLYPYVEEMILSDATQPLESQNFSPVVRDAVITSNGTLPDKYKYIQTLRESRERAQSLSMGTRRKVLVLGSGYISEPVLEYLSRDGNIEITVGSDMKNQIEQLGKKYNINPVSMDICKQEEKLGFLVAKQDLVISLLPYVLHPLVAKACITNKVNMVTASYITPALKELEKSVEDAGITIIGELGLDPGLDHMLAMETIDKAKEVGATIESYISYCGGLPAPEHSNNPLRYKFSWSPVGVLMNVMQSATYLLDGKVVNVAGGISFLDAVTSMDFFPGLNLEGYPNRDSTKYAEIYGISSAHTLLRGTLRYKGLEC

SEQ ID NO: 34677 - protein, 293 aa, Artificial Sequence
  Synthetic polypeptide
GQEFEANLANMGAQAIFNELPCEYVEPHELKEVSQTGDLRKVYGTVLSRHHHLVRKTDAVYDPAEYDKHPERYISRFNTDIAPYTTCLINGIYWEQNTPRLLTRQDAQSLLAPGKFSPAGVEGCPALPHKLVAICDISADTGGSIEFMTECTTIEHPFCMYDADQHIIHDSVEGSGILMCSIDNLPAQLPIEATECFGDMLYPYVEEMILSDATQPLESQNFSPVVRDAVITSNGTLPDKYKYIQTLRESRERAQSLSMGTRRKVLVLGSGYISEPVLEYLSRDGNIEITDLT

SEQ ID NO: 34678 - protein, 44 aa, Artificial Sequence
  Synthetic polypeptide
SQHFGRLRRADHLRPGVQDQPDQHDICMPLDRRFGKDGKNVTLF

SEQ ID NO: 34679 - protein, 34 aa, Artificial Sequence
  Synthetic polypeptide
GQEFKTSLTNMISVCPWTEGLEKMEKTLLCSSSG

SEQ ID NO: 34680 - protein, 2 aa, Artificial Sequence
  Synthetic polypeptide
PG

SEQ ID NO: 34681 - protein, 113 aa, Artificial Sequence
  Synthetic polypeptide
DHPGQHGKTLSLLKIEKIARLRILYTKILDVLEEIPKNAAYRKYTEQITNEKLAMVKAEPDVKKLEDQLQGGQLEEVILQAEHELNLARKMREWKLWEPLVEEPPADQWKWPI

SEQ ID NO: 34682 - protein, 54 aa, Artificial Sequence
  Synthetic polypeptide
MGGLTPVIPALWEAEVGGSPEVRSLRPSWPTWQNPVSTKNRKNSQAKNIVHKDS

SEQ ID NO: 34683 - protein, 67 aa, Artificial Sequence
  Synthetic polypeptide
DHPGQHGKTLSLLKIEKIARLRILYTKILDVLEEIPKNAAYRKYTEQITNEKLAMVKAPIIMQIISS

SEQ ID NO: 34684 - protein, 80 aa, Artificial Sequence
  Synthetic polypeptide
DHPGQHGKTLSLLKIEKIARLRILYTKILDVLEEIPKNAAYRKYTEQITNEKLAMVKAEPDVKKLEDQLQGGQLEEVILQ

SEQ ID NO: 34685 - protein, 9 aa, Artificial Sequence
  Synthetic polypeptide
SQHFGRLRG

SEQ ID NO: 34686 - protein, 109 aa, Artificial Sequence
  Synthetic polypeptide
MGGLTPVIPALWEAERLRILYTKILDVLEEIPKNAAYRKYTEQITNEKLAMVKAEPDVKKLEDQLQGGQLEEVILQAEHELNLARKMREWKLWEPLVEEPPADQWKWPI

SEQ ID NO: 34687 - protein, 63 aa, Artificial Sequence
  Synthetic polypeptide
MGGLTPVIPALWEAERLRILYTKILDVLEEIPKNAAYRKYTEQITNEKLAMVKAPIIMQIISS

SEQ ID NO: 34688 - protein, 76 aa, Artificial Sequence
  Synthetic polypeptide
MGGLTPVIPALWEAERLRILYTKILDVLEEIPKNAAYRKYTEQITNEKLAMVKAEPDVKKLEDQLQGGQLEEVILQ

SEQ ID NO: 34689 - protein, 134 aa, Artificial Sequence
  Synthetic polypeptide
WFYKGQVPCTCSLASCHVRQAFAPLSSSAMIVRPLQPCGTRLRILYTKILDVLEEIPKNAAYRKYTEQITNEKLAMVKAEPDVKKLEDQLQGGQLEEVILQAEHELNLARKMREWKLWEPLVEEPPADQWKWPI

SEQ ID NO: 34690 - protein, 9 aa, Artificial Sequence
  Synthetic polypeptide
GLSSHVELG

SEQ ID NO: 34691 - protein, 88 aa, Artificial Sequence
  Synthetic polypeptide
WFYKGQVPCTCSLASCHVRQAFAPLSSSAMIVRPLQPCGTRLRILYTKILDVLEEIPKNAAYRKYTEQITNEKLAMVKAPIIMQIISS

SEQ ID NO: 34692 - protein, 101 aa, Artificial Sequence
  Synthetic polypeptide
WFYKGQVPCTCSLASCHVRQAFAPLSSSAMIVRPLQPCGTRLRILYTKILDVLEEIPKNAAYRKYTEQITNEKLAMVKAEPDVKKLEDQLQGGQLEEVILQ

SEQ ID NO: 34693 - protein, 121 aa, Artificial Sequence
  Synthetic polypeptide
LPLNACHSLHLVFFSSQATRVSLLKYERLRILYTKILDVLEEIPKNAAYRKYTEQITNEKLAMVKAEPDVKKLEDQLQGGQLEEVILQAEHELNLARKMREWKLWEPLVEEPPADQWKWPI

SEQ ID NO: 34694 - protein, 4 aa, Artificial Sequence
  Synthetic polypeptide
NMRG

SEQ ID NO: 34695 - protein, 75 aa, Artificial Sequence
  Synthetic polypeptide
LPLNACHSLHLVFFSSQATRVSLLKYERLRILYTKILDVLEEIPKNAAYRKYTEQITNEKLAMVKAPIIMQIISS

SEQ ID NO: 34696 - protein, 88 aa, Artificial Sequence
  Synthetic polypeptide
LPLNACHSLHLVFFSSQATRVSLLKYERLRILYTKILDVLEEIPKNAAYRKYTEQITNEKLAMVKAEPDVKKLEDQLQGGQLEEVILQ

SEQ ID NO: 34697 - protein, 466 aa, Artificial Sequence
  Synthetic polypeptide
VKSLALCPVYCSAGTPVTFNENGDAPGRYDIFQYQITNKSTEYKVIGHWTNQLHLKVEDMQWAHREHTHPASVCSLPCKPGERKKTVKGVPCCWHCERCEGYNYQVDELSCELCPLDQRPNMNRTGCQLIPIIKLEWHSPWAVVPVFVAILGIIATTFVIVTFVRYNDTPIVRASGRELSYVLLTGIFLCYSITFLMIAAPDTIICSFRRVFLGLGMCFSYAALLTKTNRIHRIFEQGKKSVTAPKFISPASQLVITFSLISVQLLGVFVWFVVDPPHIIIDYGEQRTLDPEKARGVLKCDISDLSLICSLGYSILLMVTCTVYAIKTRGVPETFNEAKPIGFTMYTTCIIWLAFIPIFFGTAQSAEKMYIQTTTLTVSMSLSASVSLGMLYMPKVYIIIFHPEQNVQKRKRSFKAVVTAATMQSKLIQKGNDRPNGEVKSELCESLETNTSSTKTTYISYSNHSI

SEQ ID NO: 34698 - protein, 31 aa, Artificial Sequence
  Synthetic polypeptide
HSAQCTAVLALLSLLMKTEMLLDVMISSSIK

SEQ ID NO: 34699 - protein, 18 aa, Artificial Sequence
  Synthetic polypeptide
EEPSTLPSVLQCWHSCHF

SEQ ID NO: 34700 - protein, 466 aa, Artificial Sequence
  Synthetic polypeptide
VKSLALCPVYCSAGTPVTFNENGDAPGRYDIFQYQITNKSTEYKVIGHWTNQLHLKVEDMQWAHREHTHPASVCSLPCKPGERKKTVKGVPCCWHCERCEGYNYQVDELSCELCPLDQRPNMNRTGCQLIPIIKLEWHSPWAVVPVFVAILGIIATTFVIVTFVRYNDTPIVRASGRELSYVLLTGIFLCYSITFLMIAAPDTIICSFRRVFLGLGMCFSYAALLTKTNRIHRIFEQGKKSVTAPKFISPASQLVITFSLISVQLLGVFVWFVVDPPHIIIDYGEQRTLDPEKARGVLKCDISDLSLICSLGYSILLMVTCTVYAIKTRGVPETFNEAKPIGFTMYTTCIIWLAFIPIFFGTAQSAEKMYIQTTTLTVSMSLSASVSLGMLYMPKVYIIIFHPEQNVQKRKRSFKAVVTAATMQSKLIQKGNDRPNGEVKSELCESLETNSKSSVEFPMVKSGSTS

SEQ ID NO: 34701 - protein, 36 aa, Artificial Sequence
  Synthetic polypeptide
VKSLALCPVYCSAGTPVTFNENGDAPGRYDIFQYQI

SEQ ID NO: 34702 - protein, 537 aa, Artificial Sequence
  Synthetic polypeptide
SQEFKTSLSNIDKNKKLRPLYDIPYMFEAREFLRKKLIGKKVNVTVDYIRPASPATETVPAFSERTCATVTIGGINIAEALVSKGLATVIRYRQDDDQRSSHYDELLAAEARAIKNGKGLHSKKEVPIHRVADISGDTQKAKQFLPFLQRAGRSEAVVEYVFSGSRLKLYLPKETCLITFLLAGIECPRGARNLPGLVQEGEPFSEEATLFTKELVLQREVEVEVESMDKAGNFIGWLHIDGANLSVLLVEHALSKVHFTAERSSYYKSLLSAEEAAKQKKEKVWAHYEEQPVEEVMPVLEEKERSASYKPVFVTEITDDLHFYVQDVETGTQLEKLMENMRNDIASHPPVEGSYAPRRGEFCIAKFVDGEWYRARVEKVESPAKIHVFYIDYGNREVLPSTRLGTLSPAFSTRVLPAQATEYAFAFIQVPQDDDARTDAVDSVVRDIQNTQCLLNVEHLSAGCPHVTLQFADSKGDVGLGLVKEGLVMVEVRKEKQFQKVITEYLNAQESAKSARLNLWRYGDFRADDADEFGYSR

SEQ ID NO: 34703 - protein, 5 aa, Artificial Sequence
  Synthetic polypeptide
PEQHR

SEQ ID NO: 34704 - protein, 17 aa, Artificial Sequence
  Synthetic polypeptide
HKPVAGQILHDSSYARH

SEQ ID NO: 34705 - protein, 420 aa, Artificial Sequence
  Synthetic polypeptide
FKQPKWPSRNQWIKKMWYIPTMECYLALGKKKEILPFTTTWMNLQVIMLSDTSQSQDKYCMIPVTRGIECPRGARNLPGLVQEGEPFSEEATLFTKELVLQREVEVEVESMDKAGNFIGWLHIDGANLSVLLVEHALSKVHFTAERSSYYKSLLSAEEAAKQKKEKVWAHYEEQPVEEVMPVLEEKERSASYKPVFVTEITDDLHFYVQDVETGTQLEKLMENMRNDIASHPPVEGSYAPRRGEFCIAKFVDGEWYRARVEKVESPAKIHVFYIDYGNREVLPSTRLGTLSPAFSTRVLPAQATEYAFAFIQVPQDDDARTDAVDSVVRDIQNTQCLLNVEHLSAGCPHVTLQFADSKGDVGLGLVKEGLVMVEVRKEKQFQKVITEYLNAQESAKSARLNLWRYGDFRADDADEFGYSR

SEQ ID NO: 34706 - protein, 117 aa, Artificial Sequence
  Synthetic polypeptide
FQLREALNAPEEPETSQAWCRKESPSARKLHFSPRNWCCSERWRWRWRAWTRPATLSAGCTSTVPTCPSCWWSTRSPRSTSPPNAAPTTSPCCLPRRPQSRRKRRSGPTMRSSPWRR

SEQ ID NO: 34707 - protein, 192 aa, Artificial Sequence
  Synthetic polypeptide
FKQPKWPSRNQWIKKMWYIPTMECYLALGKKKEILPFTTTWMNLQVIMLSDTSQSQDKYCMIPVTRGIECPRGARNLPGLVQEGEPFSEEATLFTKELVLQREVWAHYEEQPVEEVMPVLEEKERSASYKPVFVTEITDDLHFYVQDVETGTQLEKLMENMRNDIASHPPVEGSYAPRRGEFCIAKFVDGEW

SEQ ID NO: 34708 - protein, 54 aa, Artificial Sequence
  Synthetic polypeptide
FQLREALNAPEEPETSQAWCRKESPSARKLHFSPRNWCCSERSGPTMRSSPWRR

SEQ ID NO: 34709 - protein, 50 aa, Artificial Sequence
  Synthetic polypeptide
GAPLPGRPVWEVRSASSRLPSCLGSEERLCLAAHRLGCGERLCPAALSRS

SEQ ID NO: 34710 - protein, 337 aa, Artificial Sequence
  Synthetic polypeptide
EVRSVSAWPPIVWDVGSASARPPCLGVDYEINAHKYWNDFYKIHENGFFKDRHWLFTEFPELAPSQNQNHLKDWFLENKSEVCECRNNEDGPGLIMEEQHKCSSKSLEHKTQTPPVEENVTQKISDLEICADEFPGSSATYRILEVGCGVGNTVFPILQTNNDPGLFVYCCDFSSTAIELVQTNSEYDPSRCFAFVHDLCDEEKSYPVPKGSLDIIILIFVLSAVVPDKMQKAINRLSRLLKPGGMVLLRDYGRYDMAQLRFKKGQCLSGNFYVRGDGTRVYFFTQEELDTLFTTAGLEKVQNLVDRRLQVNRGKQLTMYRVWIQCKYCKPLLSSTS

SEQ ID NO: 34711 - protein, 45 aa, Artificial Sequence
  Synthetic polypeptide
ELIMRSMPTNTGMTSTKSTKMGFSRIDIGFLPNSLSWHLAKIKII

SEQ ID NO: 34712 - protein, 17 aa, Artificial Sequence
  Synthetic polypeptide
CHNEMRLLKVLEEDPVC

SEQ ID NO: 34713 - protein, 491 aa, Artificial Sequence
  Synthetic polypeptide
KRIQFADQKQEFNKRPTKIGRRSLSRSISQSSTDSYSSAASYTDSSDDETSPRDKQQKNSKGSSDFCVKNIKQAEFGRREIEIAEQEMPALMALRKRAQGEKPLAGAKIVGCTHITAQTAVLMETLGALGAQCRWAACNIYSTLNEVAAALAESGFPVFAWKGESEDDFWWCIDRCVNVEGWQPNMILDDGGDLTHWIYKKYPNMFKKIKGIVEESVTGVHRLYQLSKAGKLCVPAMNVNDSVTKQKFDNLYCCRESILDGLKRTTDMMFGGKQVVVCGYGEVGKGCCAALKAMGSIVYVTEIDPICALQACMDGFRLVKLNEVIRQVDIVITCTGNKNVVTREHLDRMKNSCIVCNMGHSNTEIDVASLRTPELTWERVRSQVDHVIWPDGKRIVLLAEGRLLNLSCSTVPTFVLSITATTQALALIELYNAPEGRYKQDVYLLPKKMDEYVASLHLPTFDAHLTELTDEQAKYLGLNKNGPFKPNYYRY

SEQ ID NO: 34714 - protein, 98 aa, Artificial Sequence
  Synthetic polypeptide
NETFEGLRRGSSLLTRSKNSTNVPPKLDVALCLVPFLSHLLTATAQRLHIQIALMMRHRPGTSSKRTLREAVTSVLRTSNRQSLDEEKLKLLNKKCLH

SEQ ID NO: 34715 - protein, 57 aa, Artificial Sequence
  Synthetic polypeptide
KRIQFADQKQEFNKRPTKIGRRSLSRSISQSSTDSYSSAASYTDSSDDETSPRDKQQ

SEQ ID NO: 34716 - protein, 65 aa, Artificial Sequence
  Synthetic polypeptide
NETFEGLRRGSSLLTRSKNSTNVPPKLDVALCLVPFLSHLLTATAQRLHIQIALMMRHRPGTSSK

SEQ ID NO: 34717 - protein, 164 aa, Artificial Sequence
  Synthetic polypeptide
KRIQFADQKQEFNKRPTKIGRRSLSRSISQSSTDSYSSAASYTDSSDDETSPRDKQQKNSKGSSDFCVKNIKQAEFGRREIEIAEQEMPALMALRKRAQGEKPLAGAKIVGCTHITAQTAVLMETLGALGAQCRWAACNIYSTLNEVAAALAESGFPVFAWKGE

SEQ ID NO: 34718 - protein, 40 aa, Artificial Sequence
  Synthetic polypeptide
ITLKTEFCSNASPCIMRSLLPFYSSPWLPSSAVAWLLTSP

SEQ ID NO: 34719 - protein, 11 aa, Artificial Sequence
  Synthetic polypeptide
KLSSVQMLLHA

SEQ ID NO: 34720 - protein, 603 aa, Artificial Sequence
  Synthetic polypeptide
VLFKCFSMHNEEPFALLLFSMVTKFCSGLAPHFPIKKVLLLLWKVVMFTLGGFEHLQTLKVQKRAELGLPPLAEDSIQVVKSMRAASPPSYTLDLGESQLAPPPSKLRGRRGSRRQLLTKQDSLDIYNERDLFKTEEPATEEEEESAGDGERTLDGELDLLEQDPLVPPPPSQAPLSAERVAFPKGLPWAPKVRQKDIEHFLEMSRNKFIGFTLGQDTDTLVGLPRPIHESVKTLKQHKYISIADVQIKNEEELEKCPMSLGEEVVPETPCEILYQGMLYSLPQYMIALLKILLAAAPTSKAKTDSINILADVLPEEMPITVLQSMKLGIDVNRHKEIIVKSISTLLLLLLKHFKLNHIYQFEYVSQHLVFANCIPLILKFFNQNILSYITAKNSISVLDYPCCTIQDLPELTTESLEAGDNSQFCWRNLFSCINLLRLLNKLTKWKHSRTMMLVVFKSAPILKRALKVKQAMLQLYVLKLLKLQTKYLGRQWRKSNMKTMSAIYQKVRHRMNDDWAYGNDIDARPWDFQAEECTLRANIEAFNSRRYDRPQDSEFSPVDNCLQSVLGQRLDLPEDFHYSYELWLEREVFSQPICWEELLQNH

SEQ ID NO: 34721 - protein, 527 aa, Artificial Sequence
  Synthetic polypeptide
VLFKCFSMHNEEPFALLLFSMVTKFCSGLAPHFPIKKVLLLLWKVVMFTLGGFEHLQTLKVQKRAELGLPPLAEDSIQVVKSMRAASPPSYTLDLGESQLAPPPSKLRGRRGSRRQLLTKQDSLDIYNERDLFKTEEPATEEEEESAGDGERTLDGELDLLEQDPLVPPPPSQAPLSAERVAFPKGLPWAPKVRQKDIEHFLEMSRNKFIGFTLGQDTDTLVGLPRPIHESVKTLKQHKYISIADVQIKNEEELEKCPMSLGEEVVPETPCEILYQGMLYSLPQYMIALLKILLAAAPTSKAKTDSINILADVLPEEMPITVLQSMKLGIDVNRHKEIIVKSISTLLLLLLKHFKLNHIYQFEYVSQHLVFANCIPLILKFFNQNILSYITAKNSISVLDYPCCTIQDLPELTTESLEAGDNSQFCWRNLFSCINLLRLLNKLTKWKHSRTMMLVVFKSAPILKRALKVKQAMLQLYVLKLLKLQTKYLGRQWRKSNMKTMSAIYQKVRHRMNDDWAYGNGESSQSS

SEQ ID NO: 34722 - protein, 55 aa, Artificial Sequence
  Synthetic polypeptide
GRAWWLTPVIPALWEAEAGGSRGQEIKTILANTSLSEKSRKVFRIFRQWESLCSC

SEQ ID NO: 34723 - protein, 46 aa, Artificial Sequence
  Synthetic polypeptide
SQHFGRPRQADHEVRRSRPSWLTRVSLRNQGKYSEYFGSGNLCAHA

SEQ ID NO: 34724 - protein, 4 aa, Artificial Sequence
  Synthetic polypeptide
HESL

SEQ ID NO: 34725 - protein, 60 aa, Artificial Sequence
  Synthetic polypeptide
FQHFGRPRWADHLSSGVQDQPEQHGETPSLPKNTKISWVWWRAPVVPATWEAEISNDVLS

SEQ ID NO: 34726 - protein, 40 aa, Artificial Sequence
  Synthetic polypeptide
VQEFKTSLSNMVKPHLYQKIQKLAGCGGVHLWSQQLGRLR

SEQ ID NO: 34727 - protein, 54 aa, Artificial Sequence
  Synthetic polypeptide
FQHFGRPRWADHLSSGVQDQPEQHGETPSLPKNTKISWVWWRAPVVPATWEAEI

SEQ ID NO: 34728 - protein, 435 aa, Artificial Sequence
  Synthetic polypeptide
FQHFGRPRWADHLSSGVQDQPEQHGKPFELSPLVCAKYGWVTVECDMLKCSSCQAFLCASLQPAFDFDRYKQRCAELKKALCTAHEKFCFWPDSPSPDRFGMLPLDEPAILVSEFLDRFQSLCHLDLQLPSLRPEDLKTMCLTEDKISLLLHLLEDELDHRTDERKTTIKLGSDIQVHVTACILSVCGWACSSSLESMQLSLITCSQCMRKVGLWGFQQIESSMTDLDASFGLTSSPIPGLEGRPERLPLVPESPRRMMTRSQDATFSPGSEQAEKSPGPIVSRTRSWDSSSPVDRPEPEAASPTTRTRPVTRSMGTGDTPGLEVPSSPLRKAKRARLCSSSSSDTSSRSFFDPTSQHRDWCPWVNITLGKESRENGGTEPDASAPAEPGWKAVLTILLAHKQSSQPAETDSMSLSEKSRKVFRIFRQWESLCSC

SEQ ID NO: 34729 - protein, 63 aa, Artificial Sequence
  Synthetic polypeptide
VQEFKTSLSNMVSPLSCLHSSVQNMAGSQWNVICSSALAVKLFSVPVYNQLLTLTDISNDVLS

SEQ ID NO: 34730 - protein, 3 aa, Artificial Sequence
  Synthetic polypeptide
ATW

SEQ ID NO: 34731 - protein, 364 aa, Artificial Sequence
  Synthetic polypeptide
FQHFGRPRWADHLSSGVQDQPEQHGKPFELSPLVCAKYGWVTVECDMLKCSSCQAFLCASLQPAFDFDRYKQRCAELKKALCTAHEKFCFWPDSPSPDRFGMLPLDEPAILVSEFLDRFQSLCHLDLQLPSLRPEDLKTMCLTEDKISLLLHLLEDELDHRTDERKTTIKLGSDIQVHVTACILSVCGWACSSSLESMQLSLITCSQCMRKVGLWGFQQIESSMTDLDASFGLTSSPIPGLEGRPERLPLVPESPRRMMTRSQDATFSPGSEQDTSSRSFFDPTSQHRDWCPWVNITLGKESRENGGTEPDASAPAEPGWKAVLTILLAHKQSSQPAETDSMSLSEKSRKVFRIFRQWESLCSC

SEQ ID NO: 34732 - protein, 392 aa, Artificial Sequence
  Synthetic polypeptide
FQHFGRPRWADHLSSGVQDQPEQHGKPFELSPLVCAKYGWVTVECDMLKCSSCQAFLCASLQPAFDFDRYKQRCAELKKALCTAHEKFCFWPDSPSPDRFGMLPLDEPAILVSEFLDRFQSLCHLDLQLPSLRPEDLKTMCLTEDKISLLLHLLEDELDHRTDERKTTIKLGSDIQVHVTACILSVCGWACSSPIPGLEGRPERLPLVPESPRRMMTRSQDATFSPGSEQAEKSPGPIVSRTRSWDSSSPVDRPEPEAASPTTRTRPVTRSMGTGDTPGLEVPSSPLRKAKRARLCSSSSSDTSSRSFFDPTSQHRDWCPWVNITLGKESRENGGTEPDASAPAEPGWKAVLTILLAHKQSSQPAETDSMSLSEKSRKVFRIFRQWESLCSC

SEQ ID NO: 34733 - protein, 119 aa, Artificial Sequence
  Synthetic polypeptide
FQHFGRPRWADHLSSGVQDQPEQHGKPFELSPLVCAKYGWVTVECDMLKCSSCQAFLCASLQPAFDFDRYKQRCAELKKALCTAHEKFCFWPDSPSPDGVSLLLPRLEYSGAILAHCNL

SEQ ID NO: 34734 - protein, 8 aa, Artificial Sequence
  Synthetic polypeptide
FQHFGRPR

SEQ ID NO: 34735 - protein, 376 aa, Artificial Sequence
  Synthetic polypeptide
TCDSSTLGGQDKQRCAELKKALCTAHEKFCFWPDSPSPDRFGMLPLDEPAILVSEFLDRFQSLCHLDLQLPSLRPEDLKTMCLTEDKISLLLHLLEDELDHRTDERKTTIKLGSDIQVHVTACILSVCGWACSSSLESMQLSLITCSQCMRKVGLWGFQQIESSMTDLDASFGLTSSPIPGLEGRPERLPLVPESPRRMMTRSQDATFSPGSEQAEKSPGPIVSRTRSWDSSSPVDRPEPEAASPTTRTRPVTRSMGTGDTPGLEVPSSPLRKAKRARLCSSSSSDTSSRSFFDPTSQHRDWCPWVNITLGKESRENGGTEPDASAPAEPGWKAVLTILLAHKQSSQPAETDSMSLSEKSRKVFRIFRQWESLCSC

SEQ ID NO: 34736 - protein, 17 aa, Artificial Sequence
  Synthetic polypeptide
PVIPALWEAKISNDVLS

SEQ ID NO: 34737 - protein, 305 aa, Artificial Sequence
  Synthetic polypeptide
TCDSSTLGGQDKQRCAELKKALCTAHEKFCFWPDSPSPDRFGMLPLDEPAILVSEFLDRFQSLCHLDLQLPSLRPEDLKTMCLTEDKISLLLHLLEDELDHRTDERKTTIKLGSDIQVHVTACILSVCGWACSSSLESMQLSLITCSQCMRKVGLWGFQQIESSMTDLDASFGLTSSPIPGLEGRPERLPLVPESPRRMMTRSQDATFSPGSEQDTSSRSFFDPTSQHRDWCPWVNITLGKESRENGGTEPDASAPAEPGWKAVLTILLAHKQSSQPAETDSMSLSEKSRKVFRIFRQWESLCSC

SEQ ID NO: 34738 - protein, 333 aa, Artificial Sequence
  Synthetic polypeptide
TCDSSTLGGQDKQRCAELKKALCTAHEKFCFWPDSPSPDRFGMLPLDEPAILVSEFLDRFQSLCHLDLQLPSLRPEDLKTMCLTEDKISLLLHLLEDELDHRTDERKTTIKLGSDIQVHVTACILSVCGWACSSPIPGLEGRPERLPLVPESPRRMMTRSQDATFSPGSEQAEKSPGPIVSRTRSWDSSSPVDRPEPEAASPTTRTRPVTRSMGTGDTPGLEVPSSPLRKAKRARLCSSSSSDTSSRSFFDPTSQHRDWCPWVNITLGKESRENGGTEPDASAPAEPGWKAVLTILLAHKQSSQPAETDSMSLSEKSRKVFRIFRQWESLCSC

SEQ ID NO: 34739 - protein, 11 aa, Artificial Sequence
  Synthetic polypeptide
TCDSSTLGGQD

SEQ ID NO: 34740 - protein, 11 aa, Artificial Sequence
  Synthetic polypeptide
PVIPALWEAKI

SEQ ID NO: 34741 - protein, 60 aa, Artificial Sequence
  Synthetic polypeptide
TCDSSTLGGQDKQRCAELKKALCTAHEKFCFWPDSPSPDGVSLLLPRLEYSGAILAHCNL

SEQ ID NO: 34742 - protein, 8 aa, Artificial Sequence
  Synthetic polypeptide
FQHFGRPR

SEQ ID NO: 34743 - protein, 421 aa, Artificial Sequence
  Synthetic polypeptide
TCDSSTLGGQGKPFELSPLVCAKYGWVTVECDMLKCSSCQAFLCASLQPAFDFDRYKQRCAELKKALCTAHEKFCFWPDSPSPDRFGMLPLDEPAILVSEFLDRFQSLCHLDLQLPSLRPEDLKTMCLTEDKISLLLHLLEDELDHRTDERKTTIKLGSDIQVHVTACILSVCGWACSSSLESMQLSLITCSQCMRKVGLWGFQQIESSMTDLDASFGLTSSPIPGLEGRPERLPLVPESPRRMMTRSQDATFSPGSEQAEKSPGPIVSRTRSWDSSSPVDRPEPEAASPTTRTRPVTRSMGTGDTPGLEVPSSPLRKAKRARLCSSSSSDTSSRSFFDPTSQHRDWCPWVNITLGKESRENGGTEPDASAPAEPGWKAVLTILLAHKQSSQPAETDSMSLSEKSRKVFRIFRQWESLCSC

SEQ ID NO: 34744 - protein, 62 aa, Artificial Sequence
  Synthetic polypeptide
PVIPALWEAKVSPLSCLHSSVQNMAGSQWNVICSSALAVKLFSVPVYNQLLTLTDISNDVLS

SEQ ID NO: 34745 - protein, 350 aa, Artificial Sequence
  Synthetic polypeptide
TCDSSTLGGQGKPFELSPLVCAKYGWVTVECDMLKCSSCQAFLCASLQPAFDFDRYKQRCAELKKALCTAHEKFCFWPDSPSPDRFGMLPLDEPAILVSEFLDRFQSLCHLDLQLPSLRPEDLKTMCLTEDKISLLLHLLEDELDHRTDERKTTIKLGSDIQVHVTACILSVCGWACSSSLESMQLSLITCSQCMRKVGLWGFQQIESSMTDLDASFGLTSSPIPGLEGRPERLPLVPESPRRMMTRSQDATFSPGSEQDTSSRSFFDPTSQHRDWCPWVNITLGKESRENGGTEPDASAPAEPGWKAVLTILLAHKQSSQPAETDSMSLSEKSRKVFRIFRQWESLCSC

SEQ ID NO: 34746 - protein, 378 aa, Artificial Sequence
  Synthetic polypeptide
TCDSSTLGGQGKPFELSPLVCAKYGWVTVECDMLKCSSCQAFLCASLQPAFDFDRYKQRCAELKKALCTAHEKFCFWPDSPSPDRFGMLPLDEPAILVSEFLDRFQSLCHLDLQLPSLRPEDLKTMCLTEDKISLLLHLLEDELDHRTDERKTTIKLGSDIQVHVTACILSVCGWACSSPIPGLEGRPERLPLVPESPRRMMTRSQDATFSPGSEQAEKSPGPIVSRTRSWDSSSPVDRPEPEAASPTTRTRPVTRSMGTGDTPGLEVPSSPLRKAKRARLCSSSSSDTSSRSFFDPTSQHRDWCPWVNITLGKESRENGGTEPDASAPAEPGWKAVLTILLAHKQSSQPAETDSMSLSEKSRKVFRIFRQWESLCSC

SEQ ID NO: 34747 - protein, 105 aa, Artificial Sequence
  Synthetic polypeptide
TCDSSTLGGQGKPFELSPLVCAKYGWVTVECDMLKCSSCQAFLCASLQPAFDFDRYKQRCAELKKALCTAHEKFCFWPDSPSPDGVSLLLPRLEYSGAILAHCNL

SEQ ID NO: 34748 - protein, 41 aa, Artificial Sequence
  Synthetic polypeptide
MSTVTHACNPSTLGGRGRRIAGAQELKTSLGNILCCMETTC

SEQ ID NO: 34749 - protein, 30 aa, Artificial Sequence
  Synthetic polypeptide
RPAWATYCAAWKQPVSIWRYGHPIWREQRQ

SEQ ID NO: 34750 - protein, 308 aa, Artificial Sequence
  Synthetic polypeptide
SQHFGRPRQEDRWSPGVEDQLGQHIVLHGNNLLVFGGTGIPFGESNGNDVHVCNVKYKRWALLSCRGKKPSRIYGQAMAIINGSLYVFGGTTGYIYSTDLHKLDLNTREWTQLKPNNLSCDLPEERYRHEIAHDGQRIYILGGGTSWTAYSLNKIHAYNLETNAWEEIATKPHEKIGFPAARRCHSCVQIKNDVFICGGYNGEVILGDIWKLNLQTFQWVKLPATMPEPVYFHCAAVTPAGCMYIHGGVVNIHENKRTGSLFKIWLVVPSLLELAWEKLLAAFPNLANLSRTQLLHLGLTQGLIERLK

SEQ ID NO: 34751 - protein, 40 aa, Artificial Sequence
  Synthetic polypeptide
MSTVTHACNPSTLGGRGRRIAGAQELKTSLGNILCCMETT

SEQ ID NO: 34752 - protein, 13 aa, Artificial Sequence
  Synthetic polypeptide
RPAWATYCAAWKQ

SEQ ID NO: 34753 - protein, 31 aa, Artificial Sequence
  Synthetic polypeptide
SQHFGRPRQEDRWSPGVEDQLGQHIVLHGNN

SEQ ID NO: 34754 - protein, 153 aa, Artificial Sequence
  Synthetic polypeptide
SQHFGRPRQEDRWSPGVEDQLGQHIVLHGNNLLVFGGTGIPFGESNGNDVHVCNVKYKRWALLSCRGKKPSRIYGQAMAIINGSLYVFGGTTGYIYSTDLHKLDLNTREWTQLKPNNLSCDLPEERYRHEIAHDGQRIYILGGGTSWTAYSLN

SEQ ID NO: 34755 - protein, 35 aa, Artificial Sequence
  Synthetic polypeptide
GGRMAGAQEVEAAEAVIMPLHSSLGDRLCCMETTC

SEQ ID NO: 34756 - protein, 34 aa, Artificial Sequence
  Synthetic polypeptide
SCHCIPAWVTDCAAWKQPVSIWRYGHPIWREQRQ

SEQ ID NO: 34757 - protein, 285 aa, Artificial Sequence
  Synthetic polypeptide
QIVLHGNNLLVFGGTGIPFGESNGNDVHVCNVKYKRWALLSCRGKKPSRIYGQAMAIINGSLYVFGGTTGYIYSTDLHKLDLNTREWTQLKPNNLSCDLPEERYRHEIAHDGQRIYILGGGTSWTAYSLNKIHAYNLETNAWEEIATKPHEKIGFPAARRCHSCVQIKNDVFICGGYNGEVILGDIWKLNLQTFQWVKLPATMPEPVYFHCAAVTPAGCMYIHGGVVNIHENKRTGSLFKIWLVVPSLLELAWEKLLAAFPNLANLSRTQLLHLGLTQGLIERLK

SEQ ID NO: 34758 - protein, 34 aa, Artificial Sequence
  Synthetic polypeptide
GGRMAGAQEVEAAEAVIMPLHSSLGDRLCCMETT

SEQ ID NO: 34759 - protein, 17 aa, Artificial Sequence
  Synthetic polypeptide
SCHCIPAWVTDCAAWKQ

SEQ ID NO: 34760 - protein, 8 aa, Artificial Sequence
  Synthetic polypeptide
QIVLHGNN

SEQ ID NO: 34761 - protein, 130 aa, Artificial Sequence
  Synthetic polypeptide
QIVLHGNNLLVFGGTGIPFGESNGNDVHVCNVKYKRWALLSCRGKKPSRIYGQAMAIINGSLYVFGGTTGYIYSTDLHKLDLNTREWTQLKPNNLSCDLPEERYRHEIAHDGQRIYILGGGTSWTAYSLN

SEQ ID NO: 34762 - protein, 63 aa, Artificial Sequence
  Synthetic polypeptide
IGQGTTQIWIQILILLTTSAMCCVFGQVINPLSLRFFISKMVIVRPSSCDLLRRLRIKCPFRQ

SEQ ID NO: 34763 - protein, 332 aa, Artificial Sequence
  Synthetic polypeptide
EDSGLNALLDNEDDEMQHNEGQERSSNNFNYGAYHSLEAIYHEMDNIAADFPDLARRVKIGHSFENRPMYVLKFSTGKGVRRPAVWLNAGIHSREWISQATAIWTARKIVSDYQRDPAITSILEKMDIFLLPVANPDGYVYTQTQNRLWRKTRSRNPGSSCIGADPNRNWNASFAGKGASDNPCSEVYHGPHANSEVEVKSVVDFIQKHGNFKGFIDLHSYSQLLMYPYGYSVKKAPDAEELDKVARLAAKALASVSGTEYQVGPTCTTVYPASGSSIDWAYDNGIKFAFTFELRDTGTYGFLLPANQIIPTAEETWLGLKTIMEHVRDNLY

SEQ ID NO: 34764 - protein, 75 aa, Artificial Sequence
  Synthetic polypeptide
EDSGLNALLDNEDDEMQHNEGQERSSNNFNYGAYHSLEAIYHEMDNIAADFPDLARRVKIGHSFENRPISALGKA

SEQ ID NO: 34765 - protein, 82 aa, Artificial Sequence
  Synthetic polypeptide
EDSGLNALLDNEDDEMQHNEGQERSSNNFNYGAYHSLEAIYHEMDNIAADFPDLARRVKIGHSFENRPMYVLKIVSDYQRDP

SEQ ID NO: 34766 - protein, 366 aa, Artificial Sequence
  Synthetic polypeptide
FGLNYLMKRIPQNPRYQHIKSRLDTGNSMTKYTEKLEEIKKNYRYKKDELFKRLKVTTFAQLIIQVASLSDQTLEVTAEEIQRLEDNDSAASDPDAETTARTNGKGNPGEQSPSPEQFINNAGAGDSSRSTLQSVISGVGELDLDKGPVKKAEPHTKDKPYPDCPFLLLDVRDRDSYQQCHIVGAYSYPIATLSRTMNPYSNDILEYKNAHGKIIILYDDDERLASQAATTMCERGFENLFMLSGGLKVLAQKFPEGLITGSLPASCQQALPPGSARKRSSPKGPPLPAENKWRFTPEDLKKIEYYLEEEQGPADHPSRLNQANSSGRESKVPGARSAQNLPGGGPASHSNPRSLSSGHLQGKPWK

SEQ ID NO: 34767 - protein, 12 aa, Artificial Sequence
  Synthetic polypeptide
MKIGKTDLGSII

SEQ ID NO: 34768 - protein, 31 aa, Artificial Sequence
  Synthetic polypeptide
KLERLIWAQLSDEKDTTEPKIPAYQIKTGHW

SEQ ID NO: 34769 - protein, 278 aa, Artificial Sequence
  Synthetic polypeptide
FGLNYLMKRIPQNPRYQHIKSRLDTDYRYKKDELFKRLKVTTFAQLIIQVASLSDQTLEVTAEEIQRLEDNDSAASDPDAETTARTNGKGNPGEQSPSPEQFINNAGAGDSSRSTLQSVISGVGELDLDKGPVKKAEPHTKDKPYPDCPFLLLDVRDRDSYQQCHIVGAYSYPIATLSRTMNPYSNDILEYKNAHGKIIILYDDDERLASQAATTMCERGFENLFMLSGGRLNQANSSGRESKVPGARSAQNLPGGGPASHSNPRSLSSGHLQGKPWK

SEQ ID NO: 34770 - protein, 30 aa, Artificial Sequence
  Synthetic polypeptide
KLERLIWAQLSDEKDTTEPKIPAYQIKTGH

SEQ ID NO: 34771 - protein, 118 aa, Artificial Sequence
  Synthetic polypeptide
FGLNYLMKRIPQNPRYQHIKSRLDTGNSMTKYTEKLEEIKKNYRYKKDELFKRLKVTTFAQLIIQVASLSDQTLEVTAEEIQRLEDNDSAASDPDAETTARTNGKGNPVSSVVLGNWI

SEQ ID NO: 34772 - protein, 294 aa, Artificial Sequence
  Synthetic polypeptide
FGLNYLMKRIPQNPRYQHIKSRLDTGNSMTKYTEKLEEIKKNYRYKKDELFKRLKVTTFAQLIIQVASLSDQTLEVTAEEIQRLEDNDSAASDPDAETTARTNGKGNPGEQSPSPEQFINNAGAGDSSRSTLQSVISGVGELDLDKGPVKKAEPHTKDKPYPDCPFLLLDVRDRDSYQQCHIVGAYSYPIATLSRTMNPYSNDILEYKNAHGKIIILYDDDERLASQAATTMCERGFENLFMLSGGRLNQANSSGRESKVPGARSAQNLPGGGPASHSNPRSLSSGHLQGKPWK

SEQ ID NO: 34773 - protein, 177 aa, Artificial Sequence
  Synthetic polypeptide
FGLNYLMKRIPQNPRYQHIKSRLDTGNSMTKYTEKLEEIKKNYRYKKDELFKRLKVTTFAQLIIQVASLSDQTLEVTAEEIQRLEDNDSAASDPDAETTARTNGKGNPGEQSPSPEQFINNAGAGDSSRSTLQSVISGVGELDLDKGPVKKAEPHTKDKPYPDCPFLLLDVRDRDSY

SEQ ID NO: 34774 - protein, 62 aa, Artificial Sequence
  Synthetic polypeptide
FGLNYLMKRIPQNPRYQHIKSRLDTGRTVPVFPPSLVSSATKTLSSFISTHLTPNCNCDPPF

SEQ ID NO: 34775 - protein, 59 aa, Artificial Sequence
  Synthetic polypeptide
KLERLIWAQLSDEKDTTEPKIPAYQIKTGHWPYCSCISPKPCFFCHKNPQLFHLYPSNP

SEQ ID NO: 34776 - protein, 47 aa, Artificial Sequence
  Synthetic polypeptide
FGLNYLMKRIPQNPRYQHIKSRLDTGACVYLTSSPALPDCAMNGLCF

SEQ ID NO: 34777 - protein, 53 aa, Artificial Sequence
  Synthetic polypeptide
KLERLIWAQLSDEKDTTEPKIPAYQIKTGHWCLCVSYQLPSTARLCHEWIMLL

SEQ ID NO: 34778 - protein, 337 aa, Artificial Sequence
  Synthetic polypeptide
SHHCTPAWETGMREWWVQVGLLAVPLLAAYLHIPPPQLSPALHSWKSSGKFFTYKGLRIFYQDSVGVVGSPEIVVLLHGFPTSSYDWYKIWEGLTLRFHRVIALDFLGFGFSDKPRPHHYSIFEQASIVEALLRHLGLQNRRINLLSHDYGDIVAQELLYRYKQNRSGRLTIKSLCLSNGGIFPETHRPLLLQKLLKDGGVLSPILTRLMNFFVFSRGLTPVFGPYTRPSESELWDMWAGIRNNDGNLVIDSLLQYINQRKKFRRRWVGALASVTIPIHFIYGPLDPVNPYPEFLELYRKTLPRSTVSILDDHISHYPQLEDPMGFLNAYMGFINSF

SEQ ID NO: 34779 - protein, 22 aa, Artificial Sequence
  Synthetic polypeptide
AQEFEAAASYDRTTALQPGRQG

SEQ ID NO: 34780 - protein, 123 aa, Artificial Sequence
  Synthetic polypeptide
EAEAGGFLELRSLRLQQAMIAPLHSSLGDRDEGVVGPGGAAGRAPACCVPAHPTPSALPCPSLMEVFRQVFHLQGTAYLLPRLCGCGWKSRDSCAFTRFSNIQLRLVQDLGRSDLEVSSGDCP

SEQ ID NO: 34781 - protein, 298 aa, Artificial Sequence
  Synthetic polypeptide
SHHCTPAWETGMREWWVQVGLLAVPLLAAYLHIPPPQLSPALHSWKSSGKFFTYKGLRIFYQDSVGVVGSPEIVVLLHGFPTSSYDWYKIWEGLTLRFHRVIALDFLGFGFSDKPRPHHYSIFEQASIVEALLRHLGLQNRRINLLSHDYGDIVAQELLYRYKQNRSGRLTIKSLCLSNGGIFPETHRPLLLQKLLKDGGVLSPILTRLMNFFVFSRGLTPVFGPYTRPSESELWDMWAGIRNNDGNLVIDSLLQYINQRKKFRRRWVGALASVTIPRKRCRGPQCRFWMTTLATIHS

SEQ ID NO: 34782 - protein, 9 aa, Artificial Sequence
  Synthetic polypeptide
IEHFSGQTK

SEQ ID NO: 34783 - protein, 45 aa, Artificial Sequence
  Synthetic polypeptide
FSSASATLRQKGRSLLFLLLSLLNVKMTTMKTFVMIHFHLMNRTF

SEQ ID NO: 34784 - protein, 1525 aa, Artificial Sequence
  Synthetic polypeptide
GAETHRLWRKETCGPVFSAMSLHLPTQLLTIDDNFCGLDMNAPLGVSDMVRGIPVFTEDRDRMTSVIAYVYKNHSLAFVGTKSGKLKKIRVDGPRGNALQYETVQVVDPGPVLRDMAFSKDHEQLYIMSERQLTRVPVESCGQYQSCGECLGSGDPHCGWCVLHNTCTRKERCERSKEPRRFASEMKQCVRLTVHPNNISVSQYNVLLVLETYNVPELSAGVNCTFEDLSEMDGLVVGNQIQCYSPAAKEVPRIITENGDHHVVQLQLKSKETGMTFASTSFVFYNCSVHNSCLSCVESPYRCHWCKYRHVCTHDPKTCSFQEGRVKLPEDCPQLLRVDKILVPVEVIKPITLKAKNLPQPQSGQRGYECILNIQGSEQRVPALRFNSSSVQCQNTSYSYEGMEINNLPVELTVVWNGHFNIDNPAQNKVHLYKCGAMRESCGLCLKADPDFACGWCQGPGQCTLRQHCPAQESQWLELSGAKSKCTNPRITEIIPVTGPREGGTKVTIRGENLGLEFRDIASHVKVAGVECSPLVDGYIPAEQIVCEMGEAKPSQHAGFVEICVAVCRPEFMARSSQLYYFMTLTLSDLKPSRGPMSGGTQVTITGTNLNAGSNVVVMFGKQPCLFHRRSPSYIVCNTTSSDEVLEMKVSVQVDRAKIHQDLVFQYVEDPTIVRIEPEWSIVSGNTPIAVWGTHLDLIQNPQIRAKHGGKEHINICEVLNATEMTCQAPALALGPDHQSDLTERPEEFGFILDNVQSLLILNKTNFTYYPNPVFEAFGPSGILELKPGTPIILKGKNLIPPVAGGNVKLNYTVLVGEKPCTVTVSDVQLLCESPNLIGRHKVMARVGGMEYSPGMVYIAPDSPLSLPAIVSIAVAGGLLIIFIVAVLIAYKRKSRESDLTLKRLQMQMDNLESRVALECKEAFAELQTDIHELTSDLDGAGIPFLDYRTYTMRVLFPGIEDHPVLRDLEVPGYRQERVEKGLKLFAQLINNKVFLLSFIRTLESQRSFSMRDRGNVASLIMTVLQSKLEYATDVLKQLLADLIDKNLESKNHPKLLLRRTESVAEKMLTNWFTFLLYKFLKECAGEPLFSLFCAIKQQMEKGPIDAITGEARYSLSEDKLIRQQIDYKTLVLSCVSPDNANSPEVPVKILNCDTITQVKEKILDAIFKNVPCSHRPKAADMDLEWRQGSGARMILQDEDITTKIENDWKRLNTLAHYQVPDGSVVALVSKQVTAYNAVNNSTVSRTSASKYENMIRYTGSPDSLRSRTPMITPDLESGVKMWHLVKNHEHGDQKEGDRGSKMVSEIYLTRLLATKGTLQKFVDDLFETIFSTAHRGSALPLAIKYMFDFLDEQADKHGIHDPHVRHTWKSNCLPLRFWVNMIKNPQFVFDIHKNSITDACLSVVAQTFMDSCSTSEHRLGKDSPSNKLLYAKDIPSYKNWVERYYSDIGKMPAISDQDMNAYLAEQSRMHMNEFNTMSALSEIFSYVGKYSEEILGPLDHDDQCGKQKLAYKLEQVITLMSLDS

SEQ ID NO: 34785 - protein, 34 aa, Artificial Sequence
  Synthetic polypeptide
WEGLDEGQRHTDYGERRPADLCFLPCPCTCPLSS

SEQ ID NO: 34786 - protein, 36 aa, Artificial Sequence
  Synthetic polypeptide
GRGWMRGRDTQIMEKGDLRTCVFCHVPAPAHSALNH

SEQ ID NO: 34787 - protein, 123 aa, Artificial Sequence
  Synthetic polypeptide
GAETHRLWRKETCGPVFSAMSLHLPTQLLTIDDNFCGLDMNAPLGVSDMVRGIPVFTEDRDRMTSVIAYVYKNHSLAFVGTKSGKLKKMPGTSLCPTLELQTGPRSHRATVTLELLFSSCSSN

SEQ ID NO: 34788 - protein, 153 aa, Artificial Sequence
  Synthetic polypeptide
GAETHRLWRKETCGPVFSAMSLHLPTQLLTIDDNFCGLDMNAPLGVSDMVRGIPVFTEDRDRMTSVIAYVYKNHSLAFVGTKSGKLKKSFGTGPQGGITQEWIGVEGDPPGANIASQEQMLCVYLQCSSHKAISDQRVQPLLCCFLNVPGNSS

SEQ ID NO: 34789 - protein, 28 aa, Artificial Sequence
  Synthetic polypeptide
EIQCEASRMWEHCDICTIFIYCCGRLPL

SEQ ID NO: 34790 - protein, 364 aa, Artificial Sequence
  Synthetic polypeptide
ETPCQETCSCHLGDQPFQAFRELQPQPTSDCNCMRTPRGQSSCVLGTVSTQNLSEKYSVKHPGCGNIVTFAQFLFIAVEGFLFEADLGRKPPAIPIRYYAIMVTMFFTVSVVNNYALNLNIAMPLHMIFRSGSLIANMILGIIILKKRYSIFKYTSIALVSVGIFICTFMSAKQVTSQSSLSENDGFQAFVWWLLGIGALTFALLMSARMGIFQETLYKRFGKHSKEALFYNHALPLPGFVFLASDIYDHAVLFNKSELYEIPVIGVTLPIMWFYLLMNIITQYVCIRGVFILTTECASLTVTLVVTLRKFVSLIFSILYFQNPFTLWHWLGTLFVFIGTLMYTEVWNNLGTTKSEPQKDSKKN

SEQ ID NO: 34791 - protein, 165 aa, Artificial Sequence
  Synthetic polypeptide
ETPCQETCSCHLGDQPFQAFRELQPQPTSDCNCMRTPRGQSSCVLGTVSTQNLSEKYSVKHPGCGNIVTFAQFLFIAVEGFLFEADLGRKPPAIPIRYYAIMVTMFFTVSVVNNYALNLNIAMPLHMIFRSIQYIQIYLHCPGVCGDIYLHFYVSKAGDFPVQLE

SEQ ID NO: 34792 - protein, 60 aa, Artificial Sequence
  Synthetic polypeptide
SQHFGRPRRADHEVSQMKTSSTLLFLLESPFFWNWMKTCVLLGLISSWVTKRRSKQPLRK

SEQ ID NO: 34793 - protein, 81 aa, Artificial Sequence
  Synthetic polypeptide
GRARWLTPVISALWEAEAGRSRGISDEDIINITLPTGVPILLELDENLRAVGPHQFLGDQEAIQAAIKKVEDQGKVKQAKK

SEQ ID NO: 34794 - protein, 25 aa, Artificial Sequence
  Synthetic polypeptide
PGAVAHTCNLSTLGGRGGQITRYLR

SEQ ID NO: 34795 - protein, 24 aa, Artificial Sequence
  Synthetic polypeptide
GRARWLTPVIPALRKAEAGGSRGG

SEQ ID NO: 34796 - protein, 608 aa, Artificial Sequence
  Synthetic polypeptide
SQHFGRPRRVDHEVDKIVDQLQQLMQVYDLAALRDYWSYLERRLFSRLEDIYRPTIHKLKTSLFRFYLVYTIQTNRNDKAQEFFAKQATELQNQAEWKDWFVLPFLPSPDTNPTFATYFSRQWADTFIVSLHNFLSVLFQCMPVPVILNFDAECQRTNQVQEENEVLRQKLFALQAEIHRLKKEEQQPEEEEALVQHKLPPYVSNMDRLGDSELAMVCSQRNASLSQSPRVGFLSSLLPQSKKSPSRLSPAQGPPQPQSSAKKESFGGQGTKGKDPTSGAKDGKSLLSGLATGESGWSQHRQRRLQDHGKERKELFSTTTSQCAEKKPEASGPEAEPCPELHTEPVEPLTRASSAGPEGGGVRPEQPFIVLGQEEYGEHHSSIMHCRVDCSGRRVASLDVDGVIKVWSFNPIMQTKASSISKSPLLSLEWATKRDRLLLLGSGVGTVRLYDTEAKKNLCEININDNMPRILSLACSPNGASFVCSAAAPSLTSQVDFSAPDIGSKGMNQVPGRLLLWDTKTMKQQLQFSLDPEPIAINCTAFNHNGNLLVTGAADGVIRLFVHPVEHPQEWPQGIRVQPPLRCHGPLCAVWIQRLQAGSSPQGPTLRF

SEQ ID NO: 34797 - protein, 32 aa, Artificial Sequence
  Synthetic polypeptide
PGAVAHACNPSTSEGRGGWITRWIRLWTSCSS

SEQ ID NO: 34798 - protein, 719 aa, Artificial Sequence
  Synthetic polypeptide
SQHFGRPRRVDHEVDKIVDQLQQLMQVYDLAALRDYWSYLERRLFSRLEDIYRPTIHKLKTSLFRFYLVYTIQTNRNDKAQEFFAKQATELQNQAEWKDWFVLPFLPSPDTNPTFATYFSRQWADTFIVSLHNFLSVLFQCMPVPVILNFDAECQRTNQVQEENEVLRQKLFALQAEIHRLKKEEQQPEEEEALVQHKLPPYVSNMDRLGDSELAMVCSQRNASLSQSPRVGFLSSLLPQSKKSPSRLSPAQGPPQPQSSAKKESFGGQGTKGKDPTSGAKDGKSLLSGLATGESGWSQHRQRRLQDHGKERKELFSTTTSQCAEKKPEASGPEAEPCPELHTEPVEPLTRASSAGPEGGGVRPEQPFIVLGQEEYGEHHSSIMHCRVDCSGRRVASLDVDGVIKVWSFNPIMQTKASSISKSPLLSLEWATKRDRLLLLGSGVGTVRLYDTEAKKNLCEININDNMPRILSLACSPNGASFVCSAAAPSLTSQVDFSAPDIGSKGMNQVPGRLLLWDTKTMKQQLQFSLDPEPIAINCTAFNHNGNLLVTGAADGVIRLFDMQQHECAMSWRAHYGEVYSVEFSYDENTVYSIGEDGKFIQWNIHKSGLKVSEYSLPSDATGPFVLSGYSGYKQVQVPRGRLFAFDSEGNYMLTCSATGGVIYKLGGDEKVLESCLSLGGHRAPVVTVDWSTAMDCGTCLTASMDGKIKLTTLLAHKA

SEQ ID NO: 34799 - protein, 24 aa, Artificial Sequence
  Synthetic polypeptide
QLCPSHIQKTQQFINHSPRKSCKG

SEQ ID NO: 34800 - protein, 37 aa, Artificial Sequence
  Synthetic polypeptide
RTENHGIKETGDPTQERSPWGKDDSCAQAISRRPSSL

SEQ ID NO: 34801 - protein, 676 aa, Artificial Sequence
  Synthetic polypeptide
RKQEIQHRREAPGERMTAVPKPYPEDPAVYKPLSQEELQRIKNEKKQKQNERKQKISENRKHLASVRVVQKNLVFVVGLSQRLADPEVLKRPEYFGKFGKIHKVVINNSTSYAGSQGPSASAYVTYIRSEDALRAIQCVNNVVVDGRTLKASLGTTKYCSYFLKNMQCPKPDCMYLHELGDEAASFTKEEMQAGKHQEYEQKLLQELYKLNPNFLQLSTGSVDKNKNKVTPLQRYDTPIDKPSDSLSIGNGDNSQQISNSDTPSPPPGLSKSNPVIPISSSNHSARSPFEGAVTESQSLFSDNFRHPNPIPSGLPPFPSSPQTSSDWPTAPEPQSLFTSETIPVSSSTDWQAAFGFGSSKQPEDDLGFDPFDVTRKALADLIEKELSVQDQPSLSPTSLQNSSSHTTTAKGPGSGFLHPAAATNANSLNSTFSVLPQRFPQFQQHRAVYNSFSFPGQAARYPWMAFPRNSIMHLNHTANPTSNSNFLDLNLPPQHNTGLGGIPVADNSSSVESLNMKEWQDGLRALLPNININFGGLPNSSSPSNANHSAPTSNTATTDSLSWDSPGSWTDPAIITGIPASSGNSLDSLQDDNPPHWLKSLQALTEMDGPSAAPSQTHHSAPFSTQIPLHRASWNPYPPPSNPSSFHSPPPGFQTAFRPPSKTPTDLLQSSTLDRH

SEQ ID NO: 34802 - protein, 673 aa, Artificial Sequence
  Synthetic polypeptide
RKQEIQHRREAPGERMTAVPKPYPEDPAVYKPLSQEELQRIKNEKKQKQNERKQKISENRKHLASVRVVQKNLVFVVGLSQRLADPEVLKRPEYFGKFGKIHKVVINNSTSYAGSQGPSASAYVTYIRSEDALRAIQCVNNVVVDGRTLKASLGTTKYCSYFLKNMQCPKPDCMYLHELGDEAASFTKEEMQAGKHQEYEQKLLQELYKLNPNFLQLSTGSVDKNKNKVTPLQSPIDKPSDSLSIGNGDNSQQISNSDTPSPPPGLSKSNPVIPISSSNHSARSPFEGAVTESQSLFSDNFRHPNPIPSGLPPFPSSPQTSSDWPTAPEPQSLFTSETIPVSSSTDWQAAFGFGSSKQPEDDLGFDPFDVTRKALADLIEKELSVQDQPSLSPTSLQNSSSHTTTAKGPGSGFLHPAAATNANSLNSTFSVLPQRFPQFQQHRAVYNSFSFPGQAARYPWMAFPRNSIMHLNHTANPTSNSNFLDLNLPPQHNTGLGGIPVADNSSSVESLNMKEWQDGLRALLPNININFGGLPNSSSPSNANHSAPTSNTATTDSLSWDSPGSWTDPAIITGIPASSGNSLDSLQDDNPPHWLKSLQALTEMDGPSAAPSQTHHSAPFSTQIPLHRASWNPYPPPSNPSSFHSPPPGFQTAFRPPSKTPTDLLQSSTLDRH

SEQ ID NO: 34803 - protein, 605 aa, Artificial Sequence
  Synthetic polypeptide
RKQEIQHRREAPGERMTAVPKPYPEDPAVYKPLSQEELQRIKNEKKQKQNERKQKISENRKHLASVRVVQKNLVFVVGLSQRLADPEVLKRPEYFGKFGKIHKVVINNSTSYAGSQGPSASAYVTYIRSEDALRAIQCVNNVVVDGRTLKASLGTTKYCSYFLKNMQCPKPDCMYLHELGDEAASFTKEEMQAGKHQEYEQKLLQELYKLNPNFLQLSTGSVDKNKNKVTPLQRYDTPIDKPSDSLSIGNGDNSQQISNSDTPSPPPGLSKSNPVIPISSSNHSARSPFEGAVTESQSLFSDNFRHPNPIPSGLPPFPSSPQTSSDWPTAPEPQSLFTSETIPVSSSTDWQAAFGFGSSKQPEDDLGFDPFDVTRKALADLIEKELSVQDQPSLSPTSLQNSSSHTTTAKGPGSGFLHPAAATNANSLNSTFSVLPQRFPQFQQHRAVYNSFSFPGQAARYPWMAFPRNSIMHLNHTANPTSNSNFLDLNLPPQHNTGLGGIPVAGIPASSGNSLDSLQDDNPPHWLKSLQALTEMDGPSAAPSQTHHSAPFSTQIPLHRASWNPYPPPSNPSSFHSPPPGFQTAFRPPSKTPTDLLQSSTLDRH

SEQ ID NO: 34804 - protein, 602 aa, Artificial Sequence
  Synthetic polypeptide
RKQEIQHRREAPGERMTAVPKPYPEDPAVYKPLSQEELQRIKNEKKQKQNERKQKISENRKHLASVRVVQKNLVFVVGLSQRLADPEVLKRPEYFGKFGKIHKVVINNSTSYAGSQGPSASAYVTYIRSEDALRAIQCVNNVVVDGRTLKASLGTTKYCSYFLKNMQCPKPDCMYLHELGDEAASFTKEEMQAGKHQEYEQKLLQELYKLNPNFLQLSTGSVDKNKNKVTPLQSPIDKPSDSLSIGNGDNSQQISNSDTPSPPPGLSKSNPVIPISSSNHSARSPFEGAVTESQSLFSDNFRHPNPIPSGLPPFPSSPQTSSDWPTAPEPQSLFTSETIPVSSSTDWQAAFGFGSSKQPEDDLGFDPFDVTRKALADLIEKELSVQDQPSLSPTSLQNSSSHTTTAKGPGSGFLHPAAATNANSLNSTFSVLPQRFPQFQQHRAVYNSFSFPGQAARYPWMAFPRNSIMHLNHTANPTSNSNFLDLNLPPQHNTGLGGIPVAGIPASSGNSLDSLQDDNPPHWLKSLQALTEMDGPSAAPSQTHHSAPFSTQIPLHRASWNPYPPPSNPSSFHSPPPGFQTAFRPPSKTPTDLLQSSTLDRH

SEQ ID NO: 34805 - protein, 396 aa, Artificial Sequence
  Synthetic polypeptide
RKQEIQHRREAPGERMTAVPKPYPEDPAVYKPLSQEELQRIKNEKKQKQNERKQKISENRKHLASVRVVQKNLVFVVGLSQRLADPEVLKRPEYFGKFGKIHKVVINNSTSYAGSQGPSASAYVTYIRSEDALRAIQCVNNVVVDGRTLKASLGTTKYCSYFLKNMQCPKPDCMYLHELGDEAASFTKEEMQAGKHQEYEQKLLQELYKLNPNFLQLSTGSVDKNKNKVTPLQRYDTPIDKPSDSLSIGNGDNSQQISNSDTPSPPPGLSKSNPVIPISSSNHSARSPFEGAVTESQSLFSDNFRHPNPIPSGLPPFPSSPQTSSDWPTAPEPQSLFTSETIPVSSSTDWQAAFGFGSSKQPEDDLGFDPFDVTRKALADLTEPIERKRLAVLKRR

SEQ ID NO: 34806 - protein, 535 aa, Artificial Sequence
  Synthetic polypeptide
RKQEIQHRREAPGERMTAVPKPYPEDPAVYKPLSQEELQRIKNEKKQKQNERKQKISENRKHLASVRVVQKNLVFVVGLSQRLADPEVLKRPEYFGKFGKIHKVVINNSTSYAGSQGPSASAYVTYIRSEDALRAIQCVNNVVVDGRTLKASLGTTKYCSYFLKNMQCPKPDCMYLHELGDEAASFTKEEMQAGKHQEYEQKLLQELYKLNPNFLQLSTGSVDKNKNKVTPLQSPIDKPSDSLSIGNGDNSQQISNSDTPSPPPGLSKSNPVIPISSSNHSARSPFEGAVTESQSLFSDNFRHPNPIPSGLPPFPSSPQTSSDWPTAPEPQSLFTSETIPVSSSTDWQAAFGFGSSKQPEDDLGFDPFDVTRKALADLIEKELSVQDQPSLSPTSLQNSSSHTTTAKGPGSGFLHPAAATNANSLNSTFSVLPQRFPQFQQHRAVYNSFSFPGQAARYPWMAFPRNSIMHLNHTANPTSNSNFLDLNLPPQHNTGLGGIPVAGEEEVKVSTMPLSTSSHSLQQGQQPTSLHTTVA

SEQ ID NO: 34807 - protein, 538 aa, Artificial Sequence
  Synthetic polypeptide
RKQEIQHRREAPGERMTAVPKPYPEDPAVYKPLSQEELQRIKNEKKQKQNERKQKISENRKHLASVRVVQKNLVFVVGLSQRLADPEVLKRPEYFGKFGKIHKVVINNSTSYAGSQGPSASAYVTYIRSEDALRAIQCVNNVVVDGRTLKASLGTTKYCSYFLKNMQCPKPDCMYLHELGDEAASFTKEEMQAGKHQEYEQKLLQELYKLNPNFLQLSTGSVDKNKNKVTPLQRYDTPIDKPSDSLSIGNGDNSQQISNSDTPSPPPGLSKSNPVIPISSSNHSARSPFEGAVTESQSLFSDNFRHPNPIPSGLPPFPSSPQTSSDWPTAPEPQSLFTSETIPVSSSTDWQAAFGFGSSKQPEDDLGFDPFDVTRKALADLIEKELSVQDQPSLSPTSLQNSSSHTTTAKGPGSGFLHPAAATNANSLNSTFSVLPQRFPQFQQHRAVYNSFSFPGQAARYPWMAFPRNSIMHLNHTANPTSNSNFLDLNLPPQHNTGLGGIPVAGEEEVKVSTMPLSTSSHSLQQGQQPTSLHTTVA

SEQ ID NO: 34808 - protein, 27 aa, Artificial Sequence
  Synthetic polypeptide
AEIEPLYSRLDDRIPKLQWFHTGACLV

SEQ ID NO: 34809 - protein, 60 aa, Artificial Sequence
  Synthetic polypeptide
SQLLGRLRQENRLKPGGGGCSEPRSNHCTPGWMTEYPSSSGSILAPAWFRHYHLPAETEC

SEQ ID NO: 34810 - protein, 216 aa, Artificial Sequence
  Synthetic polypeptide
QNTQAPVVPYWRLPGLGIIIYLLKQSANDFFSYYDSHRQSVSKLQNVEQLPPDEIKELCQSVMPAGVDKISTAQKYVLARRRLVKVINNRAKLLSLCSFIIETCLFILWRHLEYYLLHCMPTDSQDSLFASRTLFKSRRLQDSFASETNLDFRSGLAIVSQHDLDQLQADAINAFGESLQKKLLDIEGLYSKVRSRYSFIQALVRRIRGLLRISRN

SEQ ID NO: 34811 - protein, 40 aa, Artificial Sequence
  Synthetic polypeptide
TCRTESNLPGRPPASGSCTSPQPSCGKWSSQGAQSDFGLE

SEQ ID NO: 34812 - protein, 947 aa, Artificial Sequence
  Synthetic polypeptide
VSGDLPVMLPVKPAELKAISRAGLQHLAPAHPLSLPVANGPAKEPRATLDWSENAVNGEHLWLETNVSGDLCYLGEENCQVRFAKSALRRKCAVCKIVVHTACIEQLEKINFRCKPTFREGGSRSPRENFVRHHWVHRRRQEGKCKQCGKGFQQKFSFHSKEIVAISCSWCKQAFHNKVTCFMLHHIEEPCSLGAHAAVIVPPTWIIKVKKPQNSLKASNRKKKRTSFKRKASKRGMEQENKGRPFVIKPISSPLMKPLLVFVNPKSGGNQGTKVLQMFMWYLNPRQVFDLSQEGPKDALELYRKVPNLRILACGGDGTVGWILSILDELQLSPQPPVGVLPLGTGNDLARTLNWGGGYTDEPVSKILCQVEDGTVVQLDRWNLHVERNPDLPPEELEDGVCKLPLNVFNNYFSLGFDAHVTLEFHESREANPEKFNSRFRNKMFYAGAAFSDFLQRSSRDLSKHVKVVCDGTDLTPKIQELKFQCIVFLNIPRYCAGTMPWGNPGDHHDFEPQRHDDGYIEVIGFTMASLAALQVGGHGERLHQCREVMLLTYKSIPMQVDGEPCRLAPAMIRISLRNQANMVQKSKRRTSMPLLNDPQSVPDRLRIRVNKISLQDYEGFHYDKEKLREASISDWLRTIAGELVQSFGAIPLGILVVRGDCDLETCRMYIDRLQEDLQSVSSGSQRVHYQDHETSFPRALSAQRLSPRWCFLDDRSQEHLHFVMEISQDEIFILDPDMVVSQPAGTPPGMPDLVVEQASGISDWWNPALRKRMLSDSGLGMIAPYYEDSDLKDLSHSRVLQSPVSSEDHAILQAVIAGDLMKLIESYKNGGSLLIQGPDHCSLLHYAAKTGNGEIVKYILDHGPSELLDMADSETGETALHKAACQRNRAVCQLLVDAGASLRKTDSKGKTPQERAQQAGDPDLAAYLESRQNYKVIGHEDLETAV

SEQ ID NO: 34813 - protein, 960 aa, Artificial Sequence
  Synthetic polypeptide
VSGDLPVMLPVKPAELKAISRAGLQHLAPAHPLSLPVANGPAKEPRATLDWSENAVNGEHLWLETNVSGDLCYLGEENCQVRFAKSALRRKCAVCKIVVHTACIEQLEKINFRCKPTFREGGSRSPRENFVRHHWVHRRRQEGKCKQCGKGFQQKFSFHSKEIVAISCSWCKQAFHNKVTCFMLHHIEEPCSLGAHAAVIVPPTWIIKVKKPQNSLKASNRKKKRTSFKRKASKRGMEQENKGRPFVIKPISSPLMKPLLVFVNPKSGGNQGTKVLQMFMWYLNPRQVFDLSQEGPKDALELYRKVPNLRILACGGDGTVGWILSILDELQLSPQPPVGVLPLGTGNDLARTLNWGGGYTDEPVSKILCQVEDGTVVQLDRWNLHVERNPDLPPEELEDGVCKLPLNVFNNYFSLGFDAHVTLEFHESREANPEKFNSRFRNKMFYAGAAFSDFLQRSSRDLSKHVKVVCDGTDLTPKIQELKFQCIVFLNIPRYCAGTMPWGNPGDHHDFEPQRHDDGYIEVIGFTMASLAALQVGGHGERLHQCREVMLLTYKSIPMQVDGEPCRLAPAMIRISLRNQANMVQKSKRRTSMPLLNDIHQVQTADLRRVSAPPGSFTIPQSVPDRLRIRVNKISLQDYEGFHYDKEKLREASIPLGILVVRGDCDLETCRMYIDRLQEDLQSVSSGSQRVHYQDHETSFPRALSAQRLSPRWCFLDATSADRFYRIDRSQEHLHFVMEISQDEIFILDPDMVVSQPAGTPPGMPDLVVEQASGISDWWNPALRKRMLSDSGLGMIAPYYEDSDLKDLSHSRVLQSPVSSEDHAILQAVIAGDLMKLIESYKNGGSLLIQGPDHCSLLHYAAKTGNGEIVKYILDHGPSELLDMADSETGETALHKAACQRNRAVCQLLVDAGASLRKTDSKGKTPQERAQQAGDPDLAAYLESRQNYKVIGHEDLETAV

SEQ ID NO: 34814 - protein, 929 aa, Artificial Sequence
  Synthetic polypeptide
VSGDLPVMLPVKPAELKAISRAGLQHLAPAHPLSLPVANGPAKEPRATLDWSENAVNGEHLWLETNVSGDLCYLGEENCQVRFAKSALRRKCAVCKIVVHTACIEQLEKINFRCKPTFREGGSRSPRENFVRHHWVHRRRQEGKCKQCGKGFQQKFSFHSKEIVAISCSWCKQAFHNKVTCFMLHHIEEPCSLGAHAAVIVPPTWIIKVKKPQNSLKASNRKKKRTSFKRKASKRGMEQENKGRPFVIKPISSPLMKPLLVFVNPKSGGNQGTKVLQMFMWYLNPRQVFDLSQEGPKDALELYRKVPNLRILACGGDGTVGWILSILDELQLSPQPPVGVLPLGTGNDLARTLNWGGGYTDEPVSKILCQVEDGTVVQLDRWNLHVERNPDLPPEELEDGVCKLPLNVFNNYFSLGFDAHVTLEFHESREANPEKFNSRFRNKMFYAGAAFSDFLQRSSRDLSKHVKVVCDGTDLTPKIQELKFQCIVFLNIPRYCAGTMPWGNPGDHHDFEPQRHDDGYIEVIGFTMASLAALQVGGHGERLHQCREVMLLTYKSIPMQVDGEPCRLAPAMIRISLRNQANMVQKSKRRTSMPLLNDPQSVPDRLRIRVNKISLQDYEGFHYDKEKLREASIPLGILVVRGDCDLETCRMYIDRLQEDLQSVSSGSQRVHYQDHETSFPRALSAQRLSPRWCFLDDRSQEHLHFVMEISQDEIFILDPDMVVSQPAGTPPGMPDLVVEQASGISDWWNPALRKRMLSDSGLGMIAPYYEDSDLKDLSHSRVLQSPVSSEDHAILQAVIAGDLMKLIESYKNGGSLLIQGPDHCSLLHYAAKTGNGEIVKYILDHGPSELLDMADSETGETALHKAACQRNRAVCQLLVDAGASLRKTDSKGKTPQERAQQAGDPDLAAYLESRQNYKVIGHEDLETAV

SEQ ID NO: 34815 - protein, 30 aa, Artificial Sequence
  Synthetic polypeptide
KNLDDALAYAVPLESFVAQFAAKNVQRDTS

SEQ ID NO: 34816 - protein, 31 aa, Artificial Sequence
  Synthetic polypeptide
KILMMLWLMLFLWSHSLPSLQPRMCRETHHR

SEQ ID NO: 34817 - protein, 936 aa, Artificial Sequence
  Synthetic polypeptide
CFGLCCSFGVIRCPVCSQECAERHIIDNFFVKDTTEVPSSTVEKSNQVCTSCEDNAEANGFCVECVEWLCKTCIRAHQRVKFTKDHTVRQKEEVSPEAVGVTSQRPVFCPFHKKEQLKLYCETCDKLTCRDCQLLEHKEHRYQFIEEAFQNQKVIIDTLITKLMEKTKYIKFTGNQIQNRIIEVNQNQKQVEQDIKVAIFTLMVEINKKGKALLHQLESLAKDHRMKLMQQQQEVAGLSKQLEHVMHFSKWAVSSGSSTALLYSKRLITYRLRHLLRARCDASPVTNNTIQFHCDPSFWAQNIINLGSLVIEDKESQPQMPKQNPVVEQNSQPPSGLSSNQLSKFPTQISLAQLRLQHMQQQVMAQRQQVQRRPAPVGLPNPRMQGPIQQPSISHQQPPPRLINFQNHSPKPNGPVLPPHPQQLRYPPNQNIPRQAIKPNPLQMAFLAQQAIKQWQISSGQGTPSTTNSTSSTPSSPTITSAAGYDGKAFGSPMIDLSSPVGGSYNLPSLPDIDCSSTIMLDNIVRKDTNIDHGQPRPPSNRTVQSPNSSVPSPGLAGPVTMTSVHPPIRSPSASSVGSRGSSGSSSKPAGADSTHKVPVVMLEPIRIKQENSGPPENYDFPVVIVKQESDEESRPQNANYPRSILTSLLLNSSQSSTSEETVLRSDAPDSTGDQPGLHQDNSSNGKSEWLDPSQKSPLHVGETRKEDDPNEDWCAVCQNGGELLCCEKCPKVFHLSCHVPTLTNFPSGEWICTFCRDLSKPEVEYDCDAPSHNSEKKKTEGLVKLTPIDKRKCERLLLFLYCHEMSLAFQDPVPLTVPDYYKIIKNPMDLSTIKKRLQEDYSMYSKPEDFVADFRLIFQNCAEFNEPDSEVANAGIKLENYFEELLKNLYPEKRFPKPEFRNESEDNKFSDDSDDDFVQPRKKRLKSIEERQLLK

SEQ ID NO: 34818 - protein, 902 aa, Artificial Sequence
  Synthetic polypeptide
CFGLCCSFGVIRCPVCSQECAERHIIDNFFVKDTTEVPSSTVEKSNQVCTSCEDNAEANGFCVECVEWLCKTCIRAHQRVKFTKDHTVRQKEEVSPEAVGVTSQRPVFCPFHKKEQLKLYCETCDKLTCRDCQLLEHKEHRYQFIEEAFQNQKVIIDTLITKLMEKTKYIKFTGNQIQNRIIEVNQNQKQVEQDIKVAIFTLMVEINKKGKALLHQLESLAKDHRMKLMQQQQEVAGLSKQLEHVMHFSKWAVSSGSSTALLYSKRLITYRLRHLLRARCDASPVTNNTIQFHCDPSFWAQNIINLGSLVIEDKESQPQMPKQNPVVEQNSQPPSGLSSNQLSKFPTQISLAQLRLQHMQQQQPPPRLINFQNHSPKPNGPVLPPHPQQLRYPPNQNIPRQAIKPNPLQMAFLAQQAIKQWQISSGQGTPSTTNSTSSTPSSPTITSAAGYDGKAFGSPMIDLSSPVGGSYNLPSLPDIDCSSTIMLDNIVRKDTNIDHGQPRPPSNRTVQSPNSSVPSPGLAGPVTMTSVHPPIRSPSASSVGSRGSSGSSSKPAGADSTHKVPVVMLEPIRIKQENSGPPENYDFPVVIVKQESDEESRPQNANYPRSILTSLLLNSSQSSTSEETVLRSDAPDSTGDQPGLHQDNSSNGKSEWLDPSQKSPLHVGETRKEDDPNEDWCAVCQNGGELLCCEKCPKVFHLSCHVPTLTNFPSGEWICTFCRDLSKPEVEYDCDAPSHNSEKKKTEGLVKLTPIDKRKCERLLLFLYCHEMSLAFQDPVPLTVPDYYKIIKNPMDLSTIKKRLQEDYSMYSKPEDFVADFRLIFQNCAEFNEPDSEVANAGIKLENYFEELLKNLYPEKRFPKPEFRNESEDNKFSDDSDDDFVQPRKKRLKSIEERQLLK

SEQ ID NO: 34819 - protein, 850 aa, Artificial Sequence
  Synthetic polypeptide
LHACNPNNLGEAVGVTSQRPVFCPFHKKEQLKLYCETCDKLTCRDCQLLEHKEHRYQFIEEAFQNQKVIIDTLITKLMEKTKYIKFTGNQIQNRIIEVNQNQKQVEQDIKVAIFTLMVEINKKGKALLHQLESLAKDHRMKLMQQQQEVAGLSKQLEHVMHFSKWAVSSGSSTALLYSKRLITYRLRHLLRARCDASPVTNNTIQFHCDPSFWAQNIINLGSLVIEDKESQPQMPKQNPVVEQNSQPPSGLSSNQLSKFPTQISLAQLRLQHMQQQVMAQRQQVQRRPAPVGLPNPRMQGPIQQPSISHQQPPPRLINFQNHSPKPNGPVLPPHPQQLRYPPNQNIPRQAIKPNPLQMAFLAQQAIKQWQISSGQGTPSTTNSTSSTPSSPTITSAAGYDGKAFGSPMIDLSSPVGGSYNLPSLPDIDCSSTIMLDNIVRKDTNIDHGQPRPPSNRTVQSPNSSVPSPGLAGPVTMTSVHPPIRSPSASSVGSRGSSGSSSKPAGADSTHKVPVVMLEPIRIKQENSGPPENYDFPVVIVKQESDEESRPQNANYPRSILTSLLLNSSQSSTSEETVLRSDAPDSTGDQPGLHQDNSSNGKSEWLDPSQKSPLHVGETRKEDDPNEDWCAVCQNGGELLCCEKCPKVFHLSCHVPTLTNFPSGEWICTFCRDLSKPEVEYDCDAPSHNSEKKKTEGLVKLTPIDKRKCERLLLFLYCHEMSLAFQDPVPLTVPDYYKIIKNPMDLSTIKKRLQEDYSMYSKPEDFVADFRLIFQNCAEFNEPDSEVANAGIKLENYFEELLKNLYPEKRFPKPEFRNESEDNKFSDDSDDDFVQPRKKRLKSIEERQLLK

SEQ ID NO: 34820 - protein, 43 aa, Artificial Sequence
  Synthetic polypeptide
NPIYKKKLAGRDSYMPVIPTTWERQLVSPASDQCFVLFIKRSS

SEQ ID NO: 34821 - protein, 21 aa, Artificial Sequence
  Synthetic polypeptide
SQQPGRGSWCHQPATSVLSFS

SEQ ID NO: 34822 - protein, 816 aa, Artificial Sequence
  Synthetic polypeptide
LHACNPNNLGEAVGVTSQRPVFCPFHKKEQLKLYCETCDKLTCRDCQLLEHKEHRYQFIEEAFQNQKVIIDTLITKLMEKTKYIKFTGNQIQNRIIEVNQNQKQVEQDIKVAIFTLMVEINKKGKALLHQLESLAKDHRMKLMQQQQEVAGLSKQLEHVMHFSKWAVSSGSSTALLYSKRLITYRLRHLLRARCDASPVTNNTIQFHCDPSFWAQNIINLGSLVIEDKESQPQMPKQNPVVEQNSQPPSGLSSNQLSKFPTQISLAQLRLQHMQQQQPPPRLINFQNHSPKPNGPVLPPHPQQLRYPPNQNIPRQAIKPNPLQMAFLAQQAIKQWQISSGQGTPSTTNSTSSTPSSPTITSAAGYDGKAFGSPMIDLSSPVGGSYNLPSLPDIDCSSTIMLDNIVRKDTNIDHGQPRPPSNRTVQSPNSSVPSPGLAGPVTMTSVHPPIRSPSASSVGSRGSSGSSSKPAGADSTHKVPVVMLEPIRIKQENSGPPENYDFPVVIVKQESDEESRPQNANYPRSILTSLLLNSSQSSTSEETVLRSDAPDSTGDQPGLHQDNSSNGKSEWLDPSQKSPLHVGETRKEDDPNEDWCAVCQNGGELLCCEKCPKVFHLSCHVPTLTNFPSGEWICTFCRDLSKPEVEYDCDAPSHNSEKKKTEGLVKLTPIDKRKCERLLLFLYCHEMSLAFQDPVPLTVPDYYKIIKNPMDLSTIKKRLQEDYSMYSKPEDFVADFRLIFQNCAEFNEPDSEVANAGIKLENYFEELLKNLYPEKRFPKPEFRNESEDNKFSDDSDDDFVQPRKKRLKSIEERQLLK

SEQ ID NO: 34823 - protein, 895 aa, Artificial Sequence
  Synthetic polypeptide
AEIAPLHSSLGDRAAKLFDEEGRKKFFTQDMNNILLDIELQLQELGPVIRSGVYSHLEAFVPCNKETLVKRLKKLHLNVQDDRLREPLQKLKLAVSNVMPEQLFKYQEDCQARSQAKCAKLQTDEEREKNGSEEDDDEKPGKRVIGPRKKFHWDDTIRTLLCNLVEIKLGCYELEPNKSQSAEDYLKSFMETEVKPLWPKGWMQARMLFKESRSVHNHLTSAPAKKKVIPAPKPKVKEVMVKTLPLHSFPTMLKECSPKKDQKTPTSLVASVSGPPTSSSTAAIAAASSSSAPAQETICLDDSLDEDLSFHSPSLDLVSEALAVINNGNKGPPVGSRISMPTTKPRPGLREEKLASIMSKLPLATPKKLDSTQTTHSSSLIAGHTGPVPKKPQDLAHTGISSGLIAGSSIQNPKVSLEPLPARLLQQGLQRSSQIHTSSSSQTHVSSSSQAQIAASSHALGTSEAQDASSLTQVTKVHQHSAVQQNYVSPLQATISKSQTNPVVKLSNNPQLSCSSSLIKTSDKPLMYRLPLSTPSPGNGSQGSHPLVSRTVPSTTTSSNYLAKAMVSQISTQGFKSPFSMAASPKLAASPKPATSPKPLPSPKPSASPKPSLSAKPSVSTKLISKSNPTPKPTVSPSSSSPNALVAQGSHSSTNSPVHKQPSGMNISRQSPTLNLLPSSRTSGLPPTKNLQAPSKLTNSSSTGTVGKNSLSGIAMNVPASRGSNLNSSGANRTSLSGGTGSGTQGATKPLSTPHRPSTASGSSVVTASVQSTAGASLLANASPLTLMTSPLSVTNQNVTPFGMLGGLVPVTMPFQFPLEIFGFGTDTAGVTTTSGSTSAAFHHSLTQNLLKGLQPGGAQHAATLSHSPLPAHLQQAFHDGGQSKGDTKLPRKSQ

SEQ ID NO: 34824 - protein, 52 aa, Artificial Sequence
  Synthetic polypeptide
SQLLGRLRQEDHLNPGGGDCSKPRSRHCTPAWATELPNFLMKKEGKNSLHRI

SEQ ID NO: 34825 - protein, 26 aa, Artificial Sequence
  Synthetic polypeptide
TREVEIAVSRDRATALQPGRQSCQTF

SEQ ID NO: 34826 - protein, 223 aa, Artificial Sequence
  Synthetic polypeptide
AEIAPLHSSLGDRAAKLFDEEGRKKFFTQDMNNILLDIELQLQELGPVIRSGVYSHLEAFVPCNKETLVKRLKKLHLNVQDDRLREPLQKLKLAVSNVMPEQLFKYQEDCQARSQAKCAKLQTDEEREKNGSEEDDDEKPGKRVIGPRKKFHWDDTIRTLLCNLVEIKLGCYELEPNKSQSAEDYLKSFMETEVKPLWPKGWMQARMLFKESRSVHNHLTSAP

SEQ ID NO: 34827 - protein, 58 aa, Artificial Sequence
  Synthetic polypeptide
GKEHWAETQETWFLAPAVPLIVTLGSMYLCLPTSICKGVSERPRIRQAQKGDTSAGTK

SEQ ID NO: 34828 - protein, 36 aa, Artificial Sequence
  Synthetic polypeptide
PWVQCIYACLPQSARECQKGPAFAKPKRETLQLEQN

SEQ ID NO: 34829 - protein, 52 aa, Artificial Sequence
  Synthetic polypeptide
DSGDLVSSPSCTSNCNLGFNVSMPAYLNLQGSVRKAPHSPSPKGRHFSWNKI

SEQ ID NO: 34830 - protein, 87 aa, Artificial Sequence
  Synthetic polypeptide
GKEHWAETQETWFLAPAVPLIVTLGSMYLCLPTSICKGVSERPRIRQAEIQLVNESNSVMTEYARVTFSTVVLMMSFLELEWILENV

SEQ ID NO: 34831 - protein, 36 aa, Artificial Sequence
  Synthetic polypeptide
PWVQCIYACLPQSARECQKGPAFAKPRYNSSTNQIQ

SEQ ID NO: 34832 - protein, 81 aa, Artificial Sequence
  Synthetic polypeptide
DSGDLVSSPSCTSNCNLGFNVSMPAYLNLQGSVRKAPHSPSRDTTRQRIKFSDDRVCKSHLLNCCPHDVLSGTRMDLGECL

SEQ ID NO: 34833 - protein, 42 aa, Artificial Sequence
  Synthetic polypeptide
AKITPLHSSLGDRQYQVSRPEEHPRLLGLLCPARPRLSEDHP

SEQ ID NO: 34834 - protein, 249 aa, Artificial Sequence
  Synthetic polypeptide
AQGGQGRSEPRSHHCTPAWVTDNTKFPGPKSIPDYWDSSALPDPGFQKITLSSSSEEYQKVWNLFNRTLPFYFVQKIERVQNLALWEVYQWQKGQMQKQNGGKAVDERQLFHGTSAIFVDAICQQNFDWRVCGVHGTSYGKGSYFARDAAYSHHYSKSDTQTHTMFLARVLVGEFVRGNASFVRPPAKEGWSNAFYDSCVNSVSDPSIFVIFEKHQVYPEYVIQYTTSSKPSVTPSILLALGSLFSSRQ

SEQ ID NO: 34835 - protein, 179 aa, Artificial Sequence
  Synthetic polypeptide
QTIPSFQARRASQTIGTPLPCQTQAFRRSPLVLPRKSIRRSGTSLTARCLSTLFRRLSEYRTWPSGKSTSGKKDRCRSRTEGRPWTSGSCSTAPAPFLWTPSASRTLTGGSVVFMALPTARGATLPEMLHIPTTTANPTRRPTRCSWPGCWWASSSGAMPPLSVRRPRRAGATPSMIAA

SEQ ID NO: 34836 - protein, 75 aa, Artificial Sequence
  Synthetic polypeptide
AKITPLHSSLGDRQYQVSRPEEHPRLLGLLCPARPRLSGKKDRCRSRTEGRPWTSGSCSTAPAPFLWTPSASRTL

SEQ ID NO: 34837 - protein, 83 aa, Artificial Sequence
  Synthetic polypeptide
AQGGQGRSEPRSHHCTPAWVTDNTKFPGPKSIPDYWDSSALPDPGFQAKRTDAEAERREGRGRAAAVPRHQRHFCGRHLPAEL

SEQ ID NO: 34838 - protein, 63 aa, Artificial Sequence
  Synthetic polypeptide
QTIPSFQARRASQTIGTPLPCQTQAFRQKGQMQKQNGGKAVDERQLFHGTSAIFVDAICQQNF

SEQ ID NO: 34839 - protein, 235 aa, Artificial Sequence
  Synthetic polypeptide
SQLLRRLSNTKFPGPKSIPDYWDSSALPDPGFQKITLSSSSEEYQKVWNLFNRTLPFYFVQKIERVQNLALWEVYQWQKGQMQKQNGGKAVDERQLFHGTSAIFVDAICQQNFDWRVCGVHGTSYGKGSYFARDAAYSHHYSKSDTQTHTMFLARVLVGEFVRGNASFVRPPAKEGWSNAFYDSCVNSVSDPSIFVIFEKHQVYPEYVIQYTTSSKPSVTPSILLALGSLFSSRQ

SEQ ID NO: 34840 - protein, 66 aa, Artificial Sequence
  Synthetic polypeptide
LTPVIPTVQEAEAGRLLEPRSSRPACAPVVPATQETEQYQVSRPEEHPRLLGLLCPARPRLSEDHP

SEQ ID NO: 34841 - protein, 69 aa, Artificial Sequence
  Synthetic polypeptide
SQLLRRLSNTKFPGPKSIPDYWDSSALPDPGFQAKRTDAEAERREGRGRAAAVPRHQRHFCGRHLPAEL

SEQ ID NO: 34842 - protein, 99 aa, Artificial Sequence
  Synthetic polypeptide
LTPVIPTVQEAEAGRLLEPRSSRPACAPVVPATQETEQYQVSRPEEHPRLLGLLCPARPRLSGKKDRCRSRTEGRPWTSGSCSTAPAPFLWTPSASRTL

SEQ ID NO: 34843 - protein, 14 aa, Artificial Sequence
  Synthetic polypeptide
AKVTLLHSSLGDRI

SEQ ID NO: 34844 - protein, 380 aa, Artificial Sequence
  Synthetic polypeptide
EIEYEHSKPLKQEEATATELTTKSSLAASSSLSSIVGPLVEMNTGEAESRNSNFATVGAGSEDWVNAIEFVPGQPYCGRTAPSCTEAPLQGSVTKEESEKEQTAVETKKQLCPYAAVGECRYGENCVYLHGDSCDMCGLQVLHPMDAAQRSQHIKSCIEAHEKDMELSFAVQRSKDMVCGICMEVVYEKANPSERRFGILSNCNHTYCLKCIRKWRSAKQFESKIIKSCPECRITSNFVIPSEYWVEEKEEKQKLILKYKEAMSNKACRYFDEGRGSCPFGGNCFYKHAYPDGRREEPQRQKVGTSSRYRAQRRNHFWELIEERENSNPFDNDEEEVVTFELGEMLLMLLAAGGDDELTDSEDEWDLFHDELEDFYDLDL

SEQ ID NO: 34845 - protein, 227 aa, Artificial Sequence
  Synthetic polypeptide
EIEYEHSKPLKQEEATATELTTKSSLAASSSLSSIVGPLVEMNTGEAESRNSNFATVGAGSEDWVNAIEFVPGQPYCGRTAPSCTEAPLQGSVTKEESEKEQTAVETKKQLCPYAAVGECRYGENCVYLHGDSCDMCGLQVLHPMDAAQRSQHIKSCIEAHEKDMELSFAVQRSKDMVCGICMEVVYEKANPSERRFGILSNCNHTYCLKCIRKWRSAKQFESKIIK

SEQ ID NO: 34846 - protein, 155 aa, Artificial Sequence
  Synthetic polypeptide
EIEYEHSKPLKQEEATATELTTKSSLAASSSLSSIVGPLVEMNTGEAESRNSNFATVGAGSEDWVNAIEFVPGQPYCGRTAPSCTEAPLQGSVTKEESEKEQTAVETKKQLCPYAAVGECRYGENCVYLHGDSCDMCGLQVLHPMDAAQRSQHIK

SEQ ID NO: 34847 - protein, 127 aa, Artificial Sequence
  Synthetic polypeptide
EIEYEHSKPLKQEEATATELTTKSSLAASSSLSSIVGPLVEMNTGEAESRNSNFATVGAGSEDWVNAIEFVPGQPYCGRTAPSCTEAPLQGSVTKEESEKEQTAVETKKQLCPYAAVGECRYGENCV

SEQ ID NO: 34848 - protein, 98 aa, Artificial Sequence
  Synthetic polypeptide
EIEYEHSKPLKQEEATATELTTKSSLAASSSLSSIVGPLVEMNTGEAESRNSNFATVGAGSEDWVNAIEFVPGQPYCGRTAPSCTEAPLQGSVTKEES

SEQ ID NO: 34849 - protein, 49 aa, Artificial Sequence
  Synthetic polypeptide
EIEYEHSKPLKQEEATATELTTKSSLAASSSLSSIVGPLVEMNTGEAES

SEQ ID NO: 34850 - protein, 52 aa, Artificial Sequence
  Synthetic polypeptide
NSRKCKLFYSDNRFVFAWAQDYGRMEDLHRSTRNLSESDGYLQGVELQSETV

SEQ ID NO: 34851 - protein, 93 aa, Artificial Sequence
  Synthetic polypeptide
LHVLKFSLHKILENANSSIVTTDLYLPGHRTMAGWKIYIGAQGTFQKVMGTCKVWSYSPRQSKESTDDERSNPRVLCCLQNSGWREETNWLGH

SEQ ID NO: 34852 - protein, 599 aa, Artificial Sequence
  Synthetic polypeptide
WVPARCGVTVRDSLKKALMMRGLIPECCAVYRIQDGEKKPIGWDTDISWLTGEELHVEVLENVPLTTHNFVRKTFFTLAFCDFCRKLLFQGFRCQTCGYKFHQRCSTEVPLMCVNYDQLDLLFVSKFFEHHPIPQEEASLAETALTSGSSPSAPASDSIGPQILTSPSPSKSIPIPQPFRPADEDHRNQFGQRDRSSSAPNVHINTIEPVNIDDLIRDQGFRGDGGSTTGLSATPPASLPGSLTNVKALQKSPGPQRERKSSSSSEDRNRMKTLGRRDSSDDWEIPDGQITVGQRIGSGSFGTVYKGKWHGDVAVKMLNVTAPTPQQLQAFKNEVGVLRKTRHVNILLFMGYSTKPQLAIVTQWCEGSSLYHHLHIIETKFEMIKLIDIARQTAQGMDYLHAKSIIHRDLKSNNIFLHEDLTVKIGDFGLATVKSRWSGSHQFEQLSGSILWMAPEVIRMQDKNPYSFQSDVYAFGIVLYELMTGQLPYSNINNRDQIIFMVGRGYLSPDLSKVRSNCPKAMKRLMAECLKKKRDERPLFPQILASIELLARSLPKIHRSASEPSLNRAGFQTEDFSLYACASPKTPIQAGGYGAFPVH

SEQ ID NO: 34853 - protein, 91 aa, Artificial Sequence
  Synthetic polypeptide
LHVLKFSLHKILENANSSIVTTDLYLPGHRTMAGWKIYIGAQGTFQKVMGTCKVWSYSPRQSKESTDDERSNPRVLCCLQNSGWVFSGADL

SEQ ID NO: 34854 - protein, 42 aa, Artificial Sequence
  Synthetic polypeptide
WVPARCGVTVRDSLKKALMMRGLIPECCAVYRIQDGSFLELT

SEQ ID NO: 34855 - protein, 147 aa, Artificial Sequence
  Synthetic polypeptide
DVPFTFQHDCEASPATWNYLRRMTAGFMGMAVAIILFGWIIGVLGCCWDRGLMQYVAGLLFLMGGTFCIISLCTCVAGINFELSRYPRYLYGLPDDISHGYGWSMFCAWGGLGLTLISGFFCTLAPSVQPVPRTNYPKSRPENGTVC

SEQ ID NO: 34856 - protein, 51 aa, Artificial Sequence
  Synthetic polypeptide
CISLMRFDHSIRGNPFPLVLILSCLLLCETCLSPSSMIVRPPQPRGTTCAE

SEQ ID NO: 34857 - protein, 70 aa, Artificial Sequence
  Synthetic polypeptide
GLPSHVELPAQNDGWLHGHGGGHHPLWLDHRRAGLLLGPRPYAVRGRAALPHGRNLLHHFTVHLCGRDQL

SEQ ID NO: 34858 - protein, 14 aa, Artificial Sequence
  Synthetic polypeptide
VLATKVKRNSLYLQ

SEQ ID NO: 34859 - protein, 5 aa, Artificial Sequence
  Synthetic polypeptide
SWQQR

SEQ ID NO: 34860 - protein, 230 aa, Artificial Sequence
  Synthetic polypeptide
LGNKGEKEQPVFAMTGLRWGSFRDAGVKVSKYWYLGPLKIKAAHFFSTLKEWPQTHQASISYTGPTERPPNEPEETPVQRPSLYRRILRRLASYWAQPQDALSQEVSPEVWKDVQLSTIELSITTRNNQLDPTSKEDFLNICIEPDTISKGDFITIGSRKVRNPKLHVEGTECLQASQCTLLIPEGAGGSFSIDSEEYEAMPVEVKLLPRKLQFFCDPRKREQMLTSPTQ

SEQ ID NO: 34861 - protein, 55 aa, Artificial Sequence
  Synthetic polypeptide
LGNKGEKEQPVFAMTGLRWGSFRDAGVKVSKYWYLGPLKIKAAHFFSTLKPFPKR

SEQ ID NO: 34862 - protein, 263 aa, Artificial Sequence
  Synthetic polypeptide
YNITFICTGKPKSFFDSFYCDTHFTAVVRNRTCNICEGEKEQPVFAMTGLRWGSFRDAGVKVSKYWYLGPLKIKAAHFFSTLKEWPQTHQASISYTGPTERPPNEPEETPVQRPSLYRRILRRLASYWAQPQDALSQEVSPEVWKDVQLSTIELSITTRNNQLDPTSKEDFLNICIEPDTISKGDFITIGSRKVRNPKLHVEGTECLQASQCTLLIPEGAGGSFSIDSEEYEAMPVEVKLLPRKLQFFCDPRKREQMLTSPTQ

SEQ ID NO: 34863 - protein, 43 aa, Artificial Sequence
  Synthetic polypeptide
LLYALENQKVFLTHFIVILTLLQWSGTEPATFVRVKRNSLYLQ

SEQ ID NO: 34864 - protein, 88 aa, Artificial Sequence
  Synthetic polypeptide
YNITFICTGKPKSFFDSFYCDTHFTAVVRNRTCNICEGEKEQPVFAMTGLRWGSFRDAGVKVSKYWYLGPLKIKAAHFFSTLKPFPKR

SEQ ID NO: 34865 - protein, 229 aa, Artificial Sequence
  Synthetic polypeptide
LIQGEKEQPVFAMTGLRWGSFRDAGVKVSKYWYLGPLKIKAAHFFSTLKEWPQTHQASISYTGPTERPPNEPEETPVQRPSLYRRILRRLASYWAQPQDALSQEVSPEVWKDVQLSTIELSITTRNNQLDPTSKEDFLNICIEPDTISKGDFITIGSRKVRNPKLHVEGTECLQASQCTLLIPEGAGGSFSIDSEEYEAMPVEVKLLPRKLQFFCDPRKREQMLTSPTQ

SEQ ID NO: 34866 - protein, 11 aa, Artificial Sequence
  Synthetic polypeptide
FRVKRNSLYLQ

SEQ ID NO: 34867 - protein, 9 aa, Artificial Sequence
  Synthetic polypeptide
ITCVIIDSG

SEQ ID NO: 34868 - protein, 54 aa, Artificial Sequence
  Synthetic polypeptide
LIQGEKEQPVFAMTGLRWGSFRDAGVKVSKYWYLGPLKIKAAHFFSTLKPFPKR

SEQ ID NO: 34869 - protein, 1404 aa, Artificial Sequence
  Synthetic polypeptide
VSTFSPPTHSAADCGLLPSPLTSLIPLWQKAPVTFSLVWPGQTVFPDYTNPNCAVWWTKEFELFHNQVEFDGIWIDMNEVSNFVDGSVSGCSTNNLNNPPFTPRILDGYLFCKTLCMDAVQHWGKQYDIHNLYGYSMAVATAEAAKTVFPNKRSFILTRSTFAGSGKFAAHWLGDNTATWDDLRWSIPGVLEFNLFGIPMVGPDICGFALDTPEELCRRWMQLGAFYPFSRNHNGQGYKDQDPASFGADSLLLNSSRHYLNIRYTLLPYLYTLFFRAHSRGDTVARPLLHEFYEDNSTWDVHQQFLWGPGLLITPVLDEGAEKVMAYVPDAVWYDYETGSQVRWRKQKVEMELPGDKIGLHLRGGYIFPTQQPNTTTLASRKNPLGLIIALDENKEAKGELFWDNGETKDTVANKVYLLCEFSVTQNRLEVNISQSTYKDPNNLAFNEIKILGTEEPSNVTVKHNGVPSQTSPTVTYDSNLKVAIITDIDLLLGEAYTVEWSIKIRDEEKIDCYPDENGASAENCTARGCIWEASNSSGVPFCYFVNDLYSVSDVQYNSHGATADISLKSSVYANAFPSTPVNPLRLDVTYHKNEMLQFKIYDPNKNRYEVPVPLNIPSMPSSTPEGQLYDVLIKKNPFGIEIRRKSTGTIIWDSQLLGFTFSDMFIRISTRLPSKYLYGFGETEHRSYRRDLEWHTWGMFSRDQPPGYKKNSYGVHPYYMGLEEDGSAHGVLLLNSNAMDVTFQPLPALTYRTTGGVLDFYVFLGPTPELVTQQYTELIGRPVMVPYWSLGFQLCRYGYQNDSEIASLYDEMVAAQIPYDVQYSDIDYMERQLDFTLSPKFAGFPALINRMKADGMRVILILDPAISGNETQPYPAFTRGVEDDVFIKYPNDGDIVWGKVWPDFPDVVVNGSLDWDSQVELYRAYVAFPDFFRNSTAKWWKREIEELYNNPQNPERSLKFDGMWIDMNEPSSFVNGAVSPGCRDASLNHPPYMPHLESRDRGLSSKTLCMESQQILPDGSLVQHYNVHNLYGWSQTRPTYEAVQEVTGQRGVVITRSTFPSSGRWAGHWLGDNTAAWDQLKKSIIGMMEFSLFGISYTGADICGFFQDAEYEMCVRWMQLGAFYPFSRNHNTIGTRRQDPVSWDVAFVNISRTVLQTRYTLLPYLYTLMHKAHTEGVTVVRPLLHEFVSDQVTWDIDSQFLLGPAFLVSPVLERNARNVTAYFPRARWYDYYTGVDINARGEWKTLPAPLDHINLHVRGGYILPWQEPALNTHLSRQKFMGFKIALDDEGTAGGWLFWDDGQSIDTYGKGLYYLASFSASQNTMQSHIIFNNYITGTNPLKLGYIEIWGVGSVPVTSVSISVSGMVITPSFNNDPTTQVLSIDVTDRNISLHNFTSLTWISTL

SEQ ID NO: 34870 - protein, 43 aa, Artificial Sequence
  Synthetic polypeptide
YRSGKKHPLLSHWSGLDKLCFLIIPIPTVLFGGQRNLSFFTIK

SEQ ID NO: 34871 - protein, 33 aa, Artificial Sequence
  Synthetic polypeptide
LWSPSFPPHFPDTALAKSTRYFLTGLAWTNCVS

SEQ ID NO: 34872 - protein, 2300 aa, Artificial Sequence
  Synthetic polypeptide
VSTFSPPTHSAADCGLLPSPLTSLIPLWQKAPVTFSLVWPGQTVFPDYTNPNCAVWWTKEFELFHNQVEFDGIWIDMNEVSNFVDGSVSGCSTNNLNNPPFTPRILDGYLFCKTLCMDAVQHWGKQYDIHNLYGYSMAVATAEAAKTVFPNKRSFILTRSTFAGSGKFAAHWLGDNTATWDDLRWSIPGVLEFNLFGIPMVGPDICGFALDTPEELCRRWMQLGAFYPFSRNHNGQGYKDQDPASFGADSLLLNSSRHYLNIRYTLLPYLYTLFFRAHSRGDTVARPLLHEFYEDNSTWDVHQQFLWGPGLLITPVLDEGAEKVMAYVPDAVWYDYETGSQVRWRKQKVEMELPGDKIGLHLRGGYIFPTQQPNTTTLASRKNPLGLIIALDENKEAKGELFWDNGETKDTVANKVYLLCEFSVTQNRLEVNISQSTYKDPNNLAFNEIKILGTEEPSNVTVKHNGVPSQTSPTVTYDSNLKVAIITDIDLLLGEAYTVEWSIKIRDEEKIDCYPDENGASAENCTARGCIWEASNSSGVPFCYFVNDLYSVSDVQYNSHGATADISLKSSVYANAFPSTPVNPLRLDVTYHKNEMLQFKIYDPNKNRYEVPVPLNIPSMPSSTPEGQLYDVLIKKNPFGIEIRRKSTGTIIWDSQLLGFTFSDMFIRISTRLPSKYLYGFGETEHRSYRRDLEWHTWGMFSRDQPPGYKKNSYGVHPYYMGLEEDGSAHGVLLLNSNAMDVTFQPLPALTYRTTGGVLDFYVFLGPTPELVTQQYTELIGRPVMVPYWSLGFQLCRYGYQNDSEIASLYDEMVAAQIPYDVQYSDIDYMERQLDFTLSPKFAGFPALINRMKADGMRVILILDPAISGNETQPYPAFTRGVEDDVFIKYPNDGDIVWGKVWPDFPDVVVNGSLDWDSQVELYRAYVAFPDFFRNSTAKWWKREIEELYNNPQNPERSLKFDGMWIDMNEPSSFVNGAVSPGCRDASLNHPPYMPHLESRDRGLSSKTLCMESQQILPDGSLVQHYNVHNLYGWSQTRPTYEAVQEVTGQRGVVITRSTFPSSGRWAGHWLGDNTAAWDQLKKSIIGMMEFSLFGISYTGADICGFFQDAEYEMCVRWMQLGAFYPFSRNHNTIGTRRQDPVSWDAAFVNISRNVLQTRYTLLPYLYTLMQKAHTEGVTVVRPLLHEFVSDQVTWDIDSQFLLGPAFLVSPVLERNARNVTAYFPRARWYDYYTGVDINARGEWKTLPAPLDHINLHVRGGYILPWQEPALNTHLSRKNPLGLIIALDENKEAKGELFWDDGQTKDTVAKKVYLLCEFSVTQNHLEVTISQSTYKDPNNLAFNEIKILGMEEPSNVTVKHNGVPSQTSPTVTYDSNLKVAIITDINLFLGEAYTVEWSIKIRDEEKIDCYPDENGDSAENCTARGCIWEASNSSGVPFCYFVNDLYSVSDVQYNSHGATADISLKSSVHANAFPSTPVNPLRLDVTYHKNEMLQFKIYDPNNNRYEVPVPLNIPSVPSSTPEGQLYDVLIKKNPFGIEIRRKSTGTIIWDSQLLGFTFNDMFIRISTRLPSKYLYGFGETEHTSYRRDLEWHTWGMFSRDQPPGYKKNSYGVHPYYMGLEEDGSAHGVLLLNSNAMDVTFQPLPALTYRTTGGVLDFYVFLGPTPELVTQQYTELIGRPVMVPYWSLGFQLCRYGYQNDSEISSLYDEMVAAQIPYDVQYSDIDYMERQLDFTLSPKFAGFPALINRMKADGMRVILILDPAISGNETQPYPAFTRGVEDDVFIKYPNDGDIVWGKVWPDFPDVVVNGSLDWDSQVELYRAYVAFPDFFRNSTAKWWKREIEELYNNPQNPERSLKFDGMWIDMNEPSSFVNGAVSPGCRDASLNHPPYMPYLESRDRGLSSKTLCMESQQILPDGSPVQHYNVHNLYGWSQTRPTYEAVQEVTGQRGVVITRSTFPSSGRWAGHWLGDNTAAWDQLKKSIIGMMEFSLFGISYTGADICGFFQDAEYEMCVRWMQLGAFYPFSRNHNTIGTRRQDPVSWDVAFVNISRTVLQTRYTLLPYLYTLMHKAHTEGVTVVRPLLHEFVSDQVTWDIDSQFLLGPAFLVSPVLERNARNVTAYFPRARWYDYYTGVDINARGEWKTLPAPLDHINLHVRGGYILPWQEPALNTHLSRQKFMGFKIALDDEGTAGGWLFWDDGQSIDTYGKGLYYLASFSASQNTMQSHIIFNNYITGTNPLKLGYIEIWGVGSVPVTSVSISVSGMVITPSFNNDPTTQVLSIDVTDRNISLHNFTSLTWISTL

SEQ ID NO: 34873 - protein, 116 aa, Artificial Sequence
  Synthetic polypeptide
DVPFASCHDSEASPAMWNCPVNAGVTQTPKFQVLKTGQSMTLQCAQDMNHEYMSWYRQDPGMGLRLIHYSVGAGITDQGEVPNGYNVSRSTTEDFPLRLLSAAPSQTSVYFCASSY

SEQ ID NO: 34874 - protein, 62 aa, Artificial Sequence
  Synthetic polypeptide
TMGASLSHAILMIVNKSHEISWAYQGFPHLLLPHFLLPPPCKMCLLLPAMILRPPQPCGTVQ

SEQ ID NO: 34875 - protein, 39 aa, Artificial Sequence
  Synthetic polypeptide
GLPSHVELSSECWCHSDPKIPGPEDRTEHDTAVCPGYEP

SEQ ID NO: 34876 - protein, 656 aa, Artificial Sequence
  Synthetic polypeptide
GTSPWPVRNQNTQQDVSSGYGEDVRQDQQQLLEGISELDIRTGGVPSQLLVHGALAFPLGLDASLNCFLAAAHYGRGRVVLAAHECLLCAPKMGPFLLNAVRWLARGQTGKVGVNTNLKDLCPLLSEHGLQCSLEPHLNSDLCVYCCKAYSDKEAKQLQEFVAEGGGLLIGGQAWWWASQNPGHCPLAGFPGNIILNCFGLSILPQTLKAGCFPVPTPEMRSYHFRKALSQFQAILNHENGNLEKSCLAKLRVDGAAFLQIPAEGVPAYISLHRLLRKMLRGSGLPAVSRENPVASDSYEAAVLSLATGLAHSGTDCSQLAQGLGTWTCSSSLYPSKHPITVEINGINPGNNDCWVSTGLYLLEGQNAEVSLSEAAASAGLRVQIGCHTDDLTKARKLSRAPVVTHQCWMDRTERSVSCLWGGLLYVIVPKGSQLGPVPVTIRGAVPAPYYKLGKTSLEEWKRQMQENLAPWGELATDNIILTVPTTNLQALKDPEPVLRLWDEMMQAVARLAAEPFPFRRPERIVADVQISAGWMHSGYPIMCHLESVKEIINEMDMRSRGVWGPIHELGHNQQRHGWEFPPHTTEATCNLWSVYVHETVLGIPRAQAHEALSPPERERRIKAHLGKGAPLCDWNVWTALETYLQVLSRNSGRRG

SEQ ID NO: 34877 - protein, 97 aa, Artificial Sequence
  Synthetic polypeptide
AAGMGRMSGRTSSSSWRGSQSWTSGQGESPHSCLYMEPWPSLWGWMPHSTASWRLLTMAGAGWSWLPTSACSVLPRWGPSCSMRCAGWPEARQAKLG

SEQ ID NO: 34878 - protein, 143 aa, Artificial Sequence
  Synthetic polypeptide
EPEHTAGCEQRVWGGCQAGPAAAPGGDLRAGHQDRGSPLTAACTWSPGLPSGAGCLTQLLPGGCSLWPGPGGPGCPRVPALCSQDGALLAQCGALAGQRPDRQSWGEHKSKRSVSSPIGAWPAMQPGAPSEQRLVCLLLQGVQ

SEQ ID NO: 34879 - protein, 730 aa, Artificial Sequence
  Synthetic polypeptide
GTSPWPVRNQNTQQDVSSGYGEDVRQDQQQLLEGISELDIRTGGVPSQLLVHGALAFPLGLDASLNCFLAAAHYGRGRVVLAAHECLLCAPKMGPFLLNAVRWLARGQTGKVGVNTNLKDLCPLLSEHGLQCSLEPHLNSDLCVYCCKAYSDKEAKQLQEFVAEGGGLLIGGQAWWWASQNPGHCPLAGFPGNIILNCFGLSILPQTLKAGCFPVPTPEMRSYHFRKALSQFQAILNHENGNLEKSCLAKLRVDGAAFLQIPAEGVPAYISLHRLLRKMLRGSGLPAVSRENPVASDSYEAAVLSLATGLAHSGTDCSQLAQGLGTWTCSSSLYPSKHPITVEINGINPGNNDCWVSTGLYLLEGQNAEVSLSEAAASAGLRVQIGCHTDDLTKARKLSRAPVVTHQCWMDRTERSVSCLWGGLLYVIVPKGSQLGPVPVTIRGAVPAPYYKLGKTSLEEWKRQMQENLAPWGELATDNIILTVPTTNLQALKDPEPVLRLWDEMMQAVARLAAEPFPFRRPERIVADVQISAGWMHSGYPIMCHLESVKEIINEMDMRSRGVWGPIHELGHNQQRHGWEFPPHTTEATCNLWSVYVHETVLGIPRAQAHEALSPPERERRIKAHLGKGAPLCDWNVWTALETYLQLQEAFGWEPFTQLFAEYQTLSHLPKDNTGRMNLWVKKFSEKVKKNLVPFFEAWGWPIQKEVADSLASLPEWQENPMQVYLRARK

SEQ ID NO: 34880 - protein, 790 aa, Artificial Sequence
  Synthetic polypeptide
GTSPWPVRNQNTQQDVSSGYGEDVRQDQQQLLEGISELDIRTGGVPSQLLVHGALAFPLGLDASLNCFLAAAHYGRGRVVLAAHECLLCAPKMGPFLLNAVRWLARGQTGKVGVNTNLKDLCPLLSEHGLQCSLEPHLNSDLCVYCCKAYSDKEAKQLQEFVAEGGGLLIGGQAWWWASQNPGHCPLAGFPGNIILNCFGLSILPQTLKAGCFPVPTPEMRSYHFRKALSQFQAILNHENGNLEKSCLAKLRVDGAAFLQIPAEGVPAYISLHRLLRKMLRGSGLPAVSRENPVASDSYEAAVLSLATGLAHSGTDCSQLAQGLGTWTCSSSLYPSKHPITVEINGINPESHSVIQVGMQWRDLSSCNLHLLGLSNSSLSASCVAGTTGTRHHAWLIFVFLVEREFHRKGNNDCWVSTGLYLLEGQNAEVSLSEAAASAGLRVQIGCHTDDLTKARKLSRAPVVTHQCWMDRTERSVSCLWGGLLYVIVPKGSQLGPVPVTIRGAVPAPYYKLGKTSLEEWKRQMQENLAPWGELATDNIILTVPTTNLQALKDPEPVLRLWDEMMQAVARLAAEPFPFRRPERIVADVQISAGWMHSGYPIMCHLESVKEIINEMDMRSRGVWGPIHELGHNQQRHGWEFPPHTTEATCNLWSVYVHETVLGIPRAQAHEALSPPERERRIKAHLGKGAPLCDWNVWTALETYLQLQEAFGWEPFTQLFAEYQTLSHLPKDNTGRMNLWVKKFSEKVKKNLVPFFEAWGWPIQKEVADSLASLPEWQENPMQVYLRARK

SEQ ID NO: 34881 - protein, 656 aa, Artificial Sequence; identical to SEQ ID NO: 34876
  Synthetic polypeptide

SEQ ID NO: 34882 - protein, 97 aa, Artificial Sequence; identical to SEQ ID NO: 34877
  Synthetic polypeptide

SEQ ID NO: 34883 - protein, 143 aa, Artificial Sequence; identical to SEQ ID NO: 34878
  Synthetic polypeptide

SEQ ID NO: 34884 - protein, 730 aa, Artificial Sequence; identical to SEQ ID NO: 34879
  Synthetic polypeptide

SEQ ID NO: 34885 - protein, 790 aa, Artificial Sequence; identical to SEQ ID NO: 34880
  Synthetic polypeptide

SEQ ID NO: 34886 - protein, 16 aa, Artificial Sequence
  Synthetic polypeptide
ILSFLGTKNEEQILVF

SEQ ID NO: 34887 - protein, 197 aa, Artificial Sequence
  Synthetic polypeptide
ASWGQRMKNKFWYFEFGTSETFSATCKKLHESVEIECDGVQIDLINISLEGIAILNIPSMHGGSNLWGESKKRRSHRRIEKKGSDKRTTVTDAKELKFASQDLSDQLLEVVGLEGAMEMGQIYTGLKSAGRRLAQCSCVVIRTSKSLPMQIDGEPWMQTPCTIKITHKNQAPMLMGPPPKTGLFCSLVKRTRNRSKE

SEQ ID NO: 34888 - protein, 8 aa, Artificial Sequence
  Synthetic polypeptide
SELLGDKE

SEQ ID NO: 34889 - protein, 166 aa, Artificial Sequence
  Synthetic polypeptide
ASWGQRMKNKFWYFEFGTSETFSATCKKLHESVEIECDGVQIDLINISLEGIAILNIPSMHGGSNLWGESKKRRSHRRIEKKGSDKRTTVTDAKELKFASQDLSDQLLEVVGLEGAMEMGQIYTGLKSAGRRLAQCSCVVIRTSKSLPMQIDGEPWMQTPCTVSTE

SEQ ID NO: 34890 - protein, 31 aa, Artificial Sequence
  Synthetic polypeptide
EVPFASYHDSEASPAMWNWKAQVACRHWNGG

SEQ ID NO: 34891 - protein, 114 aa, Artificial Sequence
  Synthetic polypeptide
VSHGFPLLLLPHFLLPLPCKKCLLPPTMILRPPQPCGTGKHRLHVDTGMEGDWCGLIPVGQPCMQVTTTGLKWNLTNDVLAFGTLVSTSNTYDGSGVVTVETDHPLLWTMAIKS

SEQ ID NO: 34892 - protein, 14 aa, Artificial Sequence
  Synthetic polypeptide
GLPSHVELESTGCM

SEQ ID NO: 34893 - protein, 112 aa, Artificial Sequence
  Synthetic polypeptide
VSHGFPLLLLPHFLLPLPCKKCLLPPTMILRPPQPCGTGKHRLHVDTGMEGDWCGLIPVGQPCMQVTTTGLKWNLRTCDYTRTTWIAKDNPVPRLIRLIRLNHICKVPLAIK

SEQ ID NO: 34894 - protein, 17 aa, Artificial Sequence
  Synthetic polypeptide
GLPSHVELEFEVLPCNS

SEQ ID NO: 34895 - protein, 250 aa, Artificial Sequence
  Synthetic polypeptide
DVTLFLLAFHHDSEASPAMWNWNLKYCLVILNQPLDNYFRHLWNKALLRACADGGANRLYDITEGERESFLPEFINGDFDSIRPEVREYYATKGCELISTPDQDHTDFTKCLKMLQKKIEEKDLKVDVIVTLGGLAGRFDQIMASVNTLFQATHITPFPIIIIQEESLIYLLQPGKHRLHVDTGMEGDWCGLIPVGQPCMQVTTTGLKWNLTNDVLAFGTLVSTSNTYDGSGVVTVETDHPLLWTMAIKS

SEQ ID NO: 34896 - protein, 21 aa, Artificial Sequence
  Synthetic polypeptide
LCSSLPSTMIVRPPQPCGTGI

SEQ ID NO: 34897 - protein, 201 aa, Artificial Sequence
  Synthetic polypeptide
DVTLFLLAFHHDSEASPAMWNWNLKYCLVILNQPLDNYFRHLWNKALLRACADGGANRLYDITEGERESFLPEFINGDFDSIRPEVREYYATKGCELISTPDQDHTDFTKCLKMLQKKIEEKDLKGKHRLHVDTGMEGDWCGLIPVGQPCMQVTTTGLKWNLTNDVLAFGTLVSTSNTYDGSGVVTVETDHPLLWTMAIKS

SEQ ID NO: 34898 - protein, 128 aa, Artificial Sequence
  Synthetic polypeptide
DVTLFLLAFHHDSEASPAMWNWNLKYCLVILNQPLDNYFRHLWNKALLRACADGGANRLYDITEGERESFLPEFINGDFDSIRPEVREYYATKGCELISTPDQDHTDFTKCLKMLQKKIEEKDLKKKQ

SEQ ID NO: 34899 - protein, 173 aa, Artificial Sequence
  Synthetic polypeptide
DVTLFLLAFHHDSEASPAMWNWNLKYCLVILNQPLDNYFRHLWNKALLRACADGGANRLYDITEGERESFLPEFINGDFDSIRPEVREYYATKGCELISTPDQDHTDFTKCLKMLQKKIEEKDLKVDVIVTLGGLAGRFDQIMASVNTLFQATHITPFPIIIIQEESLIYLLQ

SEQ ID NO: 34900 - protein, 43 aa, Artificial Sequence
  Synthetic polypeptide
PWSQASPRLSFKSPTSWLCVLSQGAAAGAGAAGAVREHRERPQ

SEQ ID NO: 34901 - protein, 86 aa, Artificial Sequence
  Synthetic polypeptide
VSNLPPPGCVSSAKERRREQELLEQYVSTVNDRSDIVDSLDEDRLREQEEDQMLRDMIEKLGLQRKKSKFRLSKIWSPKSKSSPSQ

SEQ ID NO: 34902 - protein, 35 aa, Artificial Sequence
  Synthetic polypeptide
MEPGEPTFEFQISHLLAVCPQPRSGGGSRSCWSST

SEQ ID NO: 34903 - protein, 46 aa, Artificial Sequence
  Synthetic polypeptide
PWSQASPRLSFKSPTSWLCVLSQVTAGAAAGAGAAGAVREHRERPQ

SEQ ID NO: 34904 - protein, 89 aa, Artificial Sequence
  Synthetic polypeptide
VSNLPPPGCVSSAKSLQERRREQELLEQYVSTVNDRSDIVDSLDEDRLREQEEDQMLRDMIEKLGLQRKKSKFRLSKIWSPKSKSSPSQ

SEQ ID NO: 34905 - protein, 38 aa, Artificial Sequence
  Synthetic polypeptide
MEPGEPTFEFQISHLLAVCPQPSHCRSGGGSRSCWSST

SEQ ID NO: 34906 - protein, 556 aa, Artificial Sequence
  Synthetic polypeptide
LLPVPESLSRLLDYWLNSRGNYWNAASFPNPSSYLHFSTFQGETSADISFYFKTLTPWGVFLENMGKEDFIKLELKSATEVSFSFDVGNGPVEIVVRSPTPLNDDQWHRVTAERNVKQASLQVDRLPQQIRKAPTEGHTRLELYSQLFVGGAGGQQGFLGCIRSLRMNGVTLDLEERAKVTSGFISGCSGHCTSYGTNCENGGKCLERYHGYSCDCSNTAYDGTFCNKDVGAFFEEGMWLRYNFQAPATNARDSSSRVDNAPDQQNSHPDLAQEEIRFSFSTTKAPCILLYISSFTTDFLAVLVKPTGSLQIRYNLGGTREPYNIDVDHRNMANGQPHSVNITRHEKTIFLKLDHYPSVSYHLPSSSDTLFNSPKSLFLGKVIETGKIDQEIHKYNTPGFTGCLSRVQFNQIAPLKAALRQTNASAHVHIQGELVESNCGASPLTLSPMSSATDPWHLDHLDSASADFPYNPGQGQAIRNGVNRNSAIIGGVIAVVIFTILCTLVFLIRYMFRHKGTYHTNEAKGAESAESADAAIMNNDPNFTETIDESKKEWLI

SEQ ID NO: 34907 - protein, 75 aa, Artificial Sequence
  Synthetic polypeptide
NLTPSHQRLEPAICPAYPRGSCYLFLSHLVDFWIIGSTVEGIIGMPPLSQTHPPTCTSLLSKGKLALTFLSTSKH

SEQ ID NO: 34908 - protein, 49 aa, Artificial Sequence
  Synthetic polypeptide
ARTSSLQNLFTSQTKHEELEFLLLSRKRGRHLEELSLLAWNYINDLRNF

SEQ ID NO: 34909 - protein, 27 aa, Artificial Sequence
  Synthetic polypeptide
QYLELGPLVSRTCSPVKPSTRSWSSSF

SEQ ID NO: 34910 - protein, 725 aa, Artificial Sequence
  Synthetic polypeptide
SPELVHQSNQARGAGVPPSKSKKGQTPGGAQFVGLELYKRLKEFLKNYLTNLLKDGEDLMDESVLKFYTQQWEDYRFSSKVLNGICAYLNRHWVRRECDEGRKGIYEIYSLALVTWRDCLFRPLNKQVTNAVLKLIEKERNGETINTRLISGVVQSYVELGLNEDDAFAKGPTLTVYKESFESQFLADTERFYTRESTEFLQQNPVTEYMKKAEARLLEEQRRVQVYLHESTQDELARKCEQVLIEKHLEIFHTEFQNLLDADKNEDLGRMYNLVSRIQDGLGELKKLLETHIHNQGLAAIEKCGEAALNDPKMYVQTVLDVHKKYNALVMSAFNNDAGFVAALDKACGRFINNNAVTKMAQSSSKSPELLARYCDSLLKKSSKNPEEAELEDTLNQVMVVFKYIEDKDVFQKFYAKMLAKRLVHQNSASDDAEASMISKLKQACGFEYTSKLQRMFQDIGVSKDLNEQFKKHLTNSEPLDLDFSIQVLSSGSWPFQQSCTFALPSELERSYQRFTAFYASRHSGRKLTWLYQLSKGELVTNCFKNRYTLQASTFQMAILLQYNTEDAYTVQQLTDSTQIKMDILAQVLQILLKSKLLVLEDENANVDEVELKPDTLIKLYLGYKNKKLRVNINVPMKTEQKQEQETTHKNIEEDRKLLIQAAIVRIMKMRKVLKHQQLLGEVLTQLSSRFKPRVPVIKKCIDILIEKEYLERVDGEKDTYSYLA

SEQ ID NO: 34911 - protein, 52 aa, Artificial Sequence
  Synthetic polypeptide
NYVAPATLLSLPPASATYNVLASPLLSTVMISFLRLPQPCFLYSLLNLFGDQ

SEQ ID NO: 34912 - protein, 253 aa, Artificial Sequence
  Synthetic polypeptide
TCSVTSDLDFPTQVIPLKTLNAVASVPIMYSWSPLQQNFMVEDETVLHNIPYMGDEVLDQDGTFIEELIKNYDGKVHGDRECGFINDEIFVELVNALGQYNDDDDDDDGDDPEEREEKQKDLEDHRDDKESRPPRKFPSDKIFEAISSMFPDKGTAEELKEKYKELTEQQLPGALPPECTPNIDGPNAKSVQREQSLHSFHTLFCRRCFKYDCFLHPFHATPNTYKRKNTETALDNKPCGPQCYQHLPLLPRN

SEQ ID NO: 34913 - protein, 6 aa, Artificial Sequence
  Synthetic polypeptide
PAELVR

SEQ ID NO: 34914 - protein, 623 aa, Artificial Sequence
  Synthetic polypeptide
TCSVTSDLDFPTQVIPLKTLNAVASVPIMYSWSPLQQNFMVEDETVLHNIPYMGDEVLDQDGTFIEELIKNYDGKVHGDRECGFINDEIFVELVNALGQYNDDDDDDDGDDPEEREEKQKDLEDHRDDKESRPPRKFPSDKIFEAISSMFPDKGTAEELKEKYKELTEQQLPGALPPECTPNIDGPNAKSVQREQSLHSFHTLFCRRCFKYDCFLHPFHATPNTYKRKNTETALDNKPCGPQCYQHLEGAKEFAAALTAERIKTPPKRPGGRRRGRLPNNSSRPSTPTINVLESKDTDSDREAGTETGGENNDKEEEEKKDETSSSSEANSRCQTPIKMKPNIEPPENVEWSGAEASMFRVLIGTYYDNFCAIARLIGTKTCRQVYEFRVKESSIIAPAPAEDVDTPPRKKKRKHRLWAAHCRKIQLKKGQNRFPGCRCKAQCNTKQCPCYLAVRECDPDLCLTCGAADHWDSKNVSCKNCSIQRGSKKHLLLAPSDVAGWGIFIKDPVQKNEFISEYCGEIISQDEADRRGKVYDKYMCSFLFNLNNDFVVDATRKGNKIRFANHSVNPNCYAKVMMVNGDHRIGIFAKRAIQTGEELFFDYRYSQADALKYVGIEREMEIP

SEQ ID NO: 34915 - protein, 665 aa, Artificial Sequence
  Synthetic polypeptide
TCSVTSDLDFPTQVIPLKTLNAVASVPIMYSWSPLQQNFMVEDETVLHNIPYMGDEVLDQDGTFIEELIKNYDGKVHGDRECGFINDEIFVELVNALGQYNDDDDDDDGDDPEEREEKQKDLEDHRDDKESRPPRKFPSDKIFEAISSMFPDKGTAEELKEKYKELTEQQLPGALPPECTPNIDGPNAKSVQREQSLHSFHTLFCRRCFKYDCFLHPFHATPNTYKRKNTETALDNKPCGPQCYQHLEGAKEFAAALTAERIKTPPKRPGGRRRGRLPNNSSRPSTPTINVLESKDTDSDREAGTETGGENNDKEEEEKKDETSSSSEANSRCQTPIKMKPNIEPPENVEWSGAEASMFRVLIGTYYDNFCAIARLIGTKTCRQVYEFRVKESSIIAPAPAEDVDTPPRKKKRKHRLWAAHCRKIQLKKDGSSNHVYNYQPCDHPRQPCDSSCPCVIAQNFCEKFCQCSSECQNRFPGCRCKAQCNTKQCPCYLAVRECDPDLCLTCGAADHWDSKNVSCKNCSIQRGSKKHLLLAPSDVAGWGIFIKDPVQKNEFISEYCGEIISQDEADRRGKVYDKYMCSFLFNLNNDFVVDATRKGNKIRFANHSVNPNCYAKVMMVNGDHRIGIFAKRAIQTGEELFFDYRYSQADALKYVGIEREMEIP

SEQ ID NO: 34916 - protein, 670 aa, Artificial Sequence
  Synthetic polypeptide
TCSVTSDLDFPTQVIPLKTLNAVASVPIMYSWSPLQQNFMVEDETVLHNIPYMGDEVLDQDGTFIEELIKNYDGKVHGDRECGFINDEIFVELVNALGQYNDDDDDDDGDDPEEREEKQKDLEDHRDDKESRPPRKFPSDKIFEAISSMFPDKGTAEELKEKYKELTEQQLPGALPPECTPNIDGPNAKSVQREQSLHSFHTLFCRRCFKYDCFLHRKCNYSFHATPNTYKRKNTETALDNKPCGPQCYQHLEGAKEFAAALTAERIKTPPKRPGGRRRGRLPNNSSRPSTPTINVLESKDTDSDREAGTETGGENNDKEEEEKKDETSSSSEANSRCQTPIKMKPNIEPPENVEWSGAEASMFRVLIGTYYDNFCAIARLIGTKTCRQVYEFRVKESSIIAPAPAEDVDTPPRKKKRKHRLWAAHCRKIQLKKDGSSNHVYNYQPCDHPRQPCDSSCPCVIAQNFCEKFCQCSSECQNRFPGCRCKAQCNTKQCPCYLAVRECDPDLCLTCGAADHWDSKNVSCKNCSIQRGSKKHLLLAPSDVAGWGIFIKDPVQKNEFISEYCGEIISQDEADRRGKVYDKYMCSFLFNLNNDFVVDATRKGNKIRFANHSVNPNCYAKVMMVNGDHRIGIFAKRAIQTGEELFFDYRYSQADALKYVGIEREMEIP

SEQ ID NO: 34917 - protein, 50 aa, Artificial Sequence
  Synthetic polypeptide
NYVAPATLLSLPPASATYNVLASPLLSTVMISFLRLPQPCFLYSLLNLFG

SEQ ID NO: 34918 - protein, 4 aa, Artificial Sequence
  Synthetic polypeptide
TCSV

SEQ ID NO: 34919 - protein, 296 aa, Artificial Sequence
  Synthetic polypeptide
TSMFSSNRQKILERTEILNQEWKQRRIQPVHILTSVSSLRGTRECSVTSDLDFPTQVIPLKTLNAVASVPIMYSWSPLQQNFMVEDETVLHNIPYMGDEVLDQDGTFIEELIKNYDGKVHGDRECGFINDEIFVELVNALGQYNDDDDDDDGDDPEEREEKQKDLEDHRDDKESRPPRKFPSDKIFEAISSMFPDKGTAEELKEKYKELTEQQLPGALPPECTPNIDGPNAKSVQREQSLHSFHTLFCRRCFKYDCFLHPFHATPNTYKRKNTETALDNKPCGPQCYQHLPLLPRN

SEQ ID NO: 34920 - protein, 20 aa, Artificial Sequence
  Synthetic polypeptide
PAELVCLVPIVRKFWKERKS

SEQ ID NO: 34921 - protein, 657 aa, Artificial Sequence
  Synthetic polypeptide
TSMFSSNRQKILERTEILNQEWKQRRIQPVHILTSCSVTSDLDFPTQVIPLKTLNAVASVPIMYSWSPLQQNFMVEDETVLHNIPYMGDEVLDQDGTFIEELIKNYDGKVHGDRECGFINDEIFVELVNALGQYNDDDDDDDGDDPEEREEKQKDLEDHRDDKESRPPRKFPSDKIFEAISSMFPDKGTAEELKEKYKELTEQQLPGALPPECTPNIDGPNAKSVQREQSLHSFHTLFCRRCFKYDCFLHPFHATPNTYKRKNTETALDNKPCGPQCYQHLEGAKEFAAALTAERIKTPPKRPGGRRRGRLPNNSSRPSTPTINVLESKDTDSDREAGTETGGENNDKEEEEKKDETSSSSEANSRCQTPIKMKPNIEPPENVEWSGAEASMFRVLIGTYYDNFCAIARLIGTKTCRQVYEFRVKESSIIAPAPAEDVDTPPRKKKRKHRLWAAHCRKIQLKKGQNRFPGCRCKAQCNTKQCPCYLAVRECDPDLCLTCGAADHWDSKNVSCKNCSIQRGSKKHLLLAPSDVAGWGIFIKDPVQKNEFISEYCGEIISQDEADRRGKVYDKYMCSFLFNLNNDFVVDATRKGNKIRFANHSVNPNCYAKVMMVNGDHRIGIFAKRAIQTGEELFFDYRYSQADALKYVGIEREMEIP

SEQ ID NO: 34922 - protein, 708 aa, Artificial Sequence
  Synthetic polypeptide
TSMFSSNRQKILERTEILNQEWKQRRIQPVHILTSVSSLRGTRECSVTSDLDFPTQVIPLKTLNAVASVPIMYSWSPLQQNFMVEDETVLHNIPYMGDEVLDQDGTFIEELIKNYDGKVHGDRECGFINDEIFVELVNALGQYNDDDDDDDGDDPEEREEKQKDLEDHRDDKESRPPRKFPSDKIFEAISSMFPDKGTAEELKEKYKELTEQQLPGALPPECTPNIDGPNAKSVQREQSLHSFHTLFCRRCFKYDCFLHPFHATPNTYKRKNTETALDNKPCGPQCYQHLEGAKEFAAALTAERIKTPPKRPGGRRRGRLPNNSSRPSTPTINVLESKDTDSDREAGTETGGENNDKEEEEKKDETSSSSEANSRCQTPIKMKPNIEPPENVEWSGAEASMFRVLIGTYYDNFCAIARLIGTKTCRQVYEFRVKESSIIAPAPAEDVDTPPRKKKRKHRLWAAHCRKIQLKKDGSSNHVYNYQPCDHPRQPCDSSCPCVIAQNFCEKFCQCSSECQNRFPGCRCKAQCNTKQCPCYLAVRECDPDLCLTCGAADHWDSKNVSCKNCSIQRGSKKHLLLAPSDVAGWGIFIKDPVQKNEFISEYCGEIISQDEADRRGKVYDKYMCSFLFNLNNDFVVDATRKGNKIRFANHSVNPNCYAKVMMVNGDHRIGIFAKRAIQTGEELFFDYRYSQADALKYVGIEREMEIP

SEQ ID NO: 34923 - protein, 669 aa, Artificial Sequence
  Synthetic polypeptide
TSMFSSNRQKILERTEILNQEWKQRRIQPVHILTSVSSLRGTREVEDETVLHNIPYMGDEVLDQDGTFIEELIKNYDGKVHGDRECGFINDEIFVELVNALGQYNDDDDDDDGDDPEEREEKQKDLEDHRDDKESRPPRKFPSDKIFEAISSMFPDKGTAEELKEKYKELTEQQLPGALPPECTPNIDGPNAKSVQREQSLHSFHTLFCRRCFKYDCFLHPFHATPNTYKRKNTETALDNKPCGPQCYQHLEGAKEFAAALTAERIKTPPKRPGGRRRGRLPNNSSRPSTPTINVLESKDTDSDREAGTETGGENNDKEEEEKKDETSSSSEANSRCQTPIKMKPNIEPPENVEWSGAEASMFRVLIGTYYDNFCAIARLIGTKTCRQVYEFRVKESSIIAPAPAEDVDTPPRKKKRKHRLWAAHCRKIQLKKDGSSNHVYNYQPCDHPRQPCDSSCPCVIAQNFCEKFCQCSSECQNRFPGCRCKAQCNTKQCPCYLAVRECDPDLCLTCGAADHWDSKNVSCKNCSIQRGSKKHLLLAPSDVAGWGIFIKDPVQKNEFISEYCGEIISQDEADRRGKVYDKYMCSFLFNLNNDFVVDATRKGNKIRFANHSVNPNCYAKVMMVNGDHRIGIFAKRAIQTGEELFFDYRYSQADALKYVGIEREMEIP

SEQ ID NO: 34924 - protein, 713 aa, Artificial Sequence
  Synthetic polypeptide
TSMFSSNRQKILERTEILNQEWKQRRIQPVHILTSVSSLRGTRECSVTSDLDFPTQVIPLKTLNAVASVPIMYSWSPLQQNFMVEDETVLHNIPYMGDEVLDQDGTFIEELIKNYDGKVHGDRECGFINDEIFVELVNALGQYNDDDDDDDGDDPEEREEKQKDLEDHRDDKESRPPRKFPSDKIFEAISSMFPDKGTAEELKEKYKELTEQQLPGALPPECTPNIDGPNAKSVQREQSLHSFHTLFCRRCFKYDCFLHRKCNYSFHATPNTYKRKNTETALDNKPCGPQCYQHLEGAKEFAAALTAERIKTPPKRPGGRRRGRLPNNSSRPSTPTINVLESKDTDSDREAGTETGGENNDKEEEEKKDETSSSSEANSRCQTPIKMKPNIEPPENVEWSGAEASMFRVLIGTYYDNFCAIARLIGTKTCRQVYEFRVKESSIIAPAPAEDVDTPPRKKKRKHRLWAAHCRKIQLKKDGSSNHVYNYQPCDHPRQPCDSSCPCVIAQNFCEKFCQCSSECQNRFPGCRCKAQCNTKQCPCYLAVRECDPDLCLTCGAADHWDSKNVSCKNCSIQRGSKKHLLLAPSDVAGWGIFIKDPVQKNEFISEYCGEIISQDEADRRGKVYDKYMCSFLFNLNNDFVVDATRKGNKIRFANHSVNPNCYAKVMMVNGDHRIGIFAKRAIQTGEELFFDYRYSQADALKYVGIEREMEIP

SEQ ID NO: 34925 - protein, 699 aa, Artificial Sequence
  Synthetic polypeptide
TSMFSSNRQKILERTEILNQEWKQRRIQPVHILTSCSVTSDLDFPTQVIPLKTLNAVASVPIMYSWSPLQQNFMVEDETVLHNIPYMGDEVLDQDGTFIEELIKNYDGKVHGDRECGFINDEIFVELVNALGQYNDDDDDDDGDDPEEREEKQKDLEDHRDDKESRPPRKFPSDKIFEAISSMFPDKGTAEELKEKYKELTEQQLPGALPPECTPNIDGPNAKSVQREQSLHSFHTLFCRRCFKYDCFLHPFHATPNTYKRKNTETALDNKPCGPQCYQHLEGAKEFAAALTAERIKTPPKRPGGRRRGRLPNNSSRPSTPTINVLESKDTDSDREAGTETGGENNDKEEEEKKDETSSSSEANSRCQTPIKMKPNIEPPENVEWSGAEASMFRVLIGTYYDNFCAIARLIGTKTCRQVYEFRVKESSIIAPAPAEDVDTPPRKKKRKHRLWAAHCRKIQLKKDGSSNHVYNYQPCDHPRQPCDSSCPCVIAQNFCEKFCQCSSECQNRFPGCRCKAQCNTKQCPCYLAVRECDPDLCLTCGAADHWDSKNVSCKNCSIQRGSKKHLLLAPSDVAGWGIFIKDPVQKNEFISEYCGEIISQDEADRRGKVYDKYMCSFLFNLNNDFVVDATRKGNKIRFANHSVNPNCYAKVMMVNGDHRIGIFAKRAIQTGEELFFDYRYSQADALKYVGIEREMEIP

SEQ ID NO: 34926 - protein, 106 aa, Artificial Sequence
  Synthetic polypeptide
TSMFSSNRQKILERTEILNQEWKQRRIQPVHILTSVSSLRGTREAIHLLFPLRFSITQFLLGTSLLPRVSVWLCTPTTTIFGLTSLSSSQWSSHTVAYCTSWLIVR

SEQ ID NO: 34927 - protein, 778 aa, Artificial Sequence
  Synthetic polypeptide
SRRKRQTVIYSYNQDYQTNEAKCSKMEKFSKYNLRREEQVAVQCDDGLPKPELISWIEHGGEPFRKWRESQKSGNIICSSVDMHFDPGFEEQLFWGSQQAMNSGKTKSHFQLDPESQCSFGSFVSFRPDQGITLGSPQRHDARAPPPLACGPSESTLKEGIPGPRNLDLPGLWDVPAWESTQHPWPVCGESCWENNHLVMHQRGHSKDRTRRAWEKFNKRAETQMPWSSPRVQRHFRCGVCGKSFRRKLCLLRHLAAHTGRGPFRNADGEMCFRHELTHPSHRLPQQGEKPAQCTPCGKRSLPVDSTQARRCQHSREGPASWREGRGASSSVHSGQKPGSRLPQEGNSHQEGDTEALQHGAEGPCSCSECGERSPMSARLASPCRAHTGEKPFQCAHCTKRFRLRRLLQVHQHAHGGERPFSCRKCGKGFAKQCKLTEHIRVHSGEKPFRCAKCGRNFRQRGQLLRHQRLHTDEKPFQCPECGLSFRLESMLRAHRLRHGGERPFSCSECGRGFTHQCKLREHLRVHSGERPFQCLKCDKRFRLKGILKAHQHTHSKERPFSCGECGKGFTRQSKLTEHLRVHSGERPFQCPECNRSFRLKGQLLSHQRLHTGERPFQCPECDKRYRVKADMKAHQLLHSGEMPFSCECGKGFVKHSKLIEHIRTHTGEKPFQCPKCDKSFRLKAQLLSHQGLHTGERPFHCPECDKNFRERGHMLRHQRIHRPERPFACGDCGKGFIYKSKLAEHIRVHTKSCPAPNELDIKKRLSQLFAMIEADWS

SEQ ID NO: 34928 - protein, 18 aa, Artificial Sequence
  Synthetic polypeptide
GEKSKLQYNVMMDFQNQN

SEQ ID NO: 34929 - protein, 781 aa, Artificial Sequence
  Synthetic polypeptide
KIPYRLPLTFEDVAIYFSEQEWQDLEAWQKELYKHVMRSNYETLVSLDDGLPKPELISWIEHGGEPFRKWRESQKSGNIICSSVDMHFDPGFEEQLFWGSQQAMNSGKTKSHFQLDPESQCSFGSFVSFRPDQGITLGSPQRHDARAPPPLACGPSESTLKEGIPGPRNLDLPGLWDVPAWESTQHPWPVCGESCWENNHLVMHQRGHSKDRTRRAWEKFNKRAETQMPWSSPRVQRHFRCGVCGKSFRRKLCLLRHLAAHTGRGPFRNADGEMCFRHELTHPSHRLPQQGEKPAQCTPCGKRSLPVDSTQARRCQHSREGPASWREGRGASSSVHSGQKPGSRLPQEGNSHQEGDTEALQHGAEGPCSCSECGERSPMSARLASPCRAHTGEKPFQCAHCTKRFRLRRLLQVHQHAHGGERPFSCRKCGKGFAKQCKLTEHIRVHSGEKPFRCAKCGRNFRQRGQLLRHQRLHTDEKPFQCPECGLSFRLESMLRAHRLRHGGERPFSCSECGRGFTHQCKLREHLRVHSGERPFQCLKCDKRFRLKGILKAHQHTHSKERPFSCGECGKGFTRQSKLTEHLRVHSGERPFQCPECNRSFRLKGQLLSHQRLHTGERPFQCPECDKRYRVKADMKAHQLLHSGEMPFSCECGKGFVKHSKLIEHIRTHTGEKPFQCPKCDKSFRLKAQLLSHQGLHTGERPFHCPECDKNFRERGHMLRHQRIHRPERPFACGDCGKGFIYKSKLAEHIRVHTKSCPAPNELDIKKRLSQLFAMIEADWS

SEQ ID NO: 34930 - protein, 26 aa, Artificial Sequence
  Synthetic polypeptide
ITDIGAYLKVEAGRRMRTEKFLIGYL

SEQ ID NO: 34931 - protein, 12 aa, Artificial Sequence
  Synthetic polypeptide
GLKNSLSATSDF

SEQ ID NO: 34932 - protein, 801 aa, Artificial Sequence
  Synthetic polypeptide
IVLHKDTCLHMFIAALFTIAKMWNQPKCPSMADWIKKMYICTMEYYAAIKKIISFAERWMELEAIVLNDGLPKPELISWIEHGGEPFRKWRESQKSGNIICSSVDMHFDPGFEEQLFWGSQQAMNSGKTKSHFQLDPESQCSFGSFVSFRPDQGITLGSPQRHDARAPPPLACGPSESTLKEGIPGPRNLDLPGLWDVPAWESTQHPWPVCGESCWENNHLVMHQRGHSKDRTRRAWEKFNKRAETQMPWSSPRVQRHFRCGVCGKSFRRKLCLLRHLAAHTGRGPFRNADGEMCFRHELTHPSHRLPQQGEKPAQCTPCGKRSLPVDSTQARRCQHSREGPASWREGRGASSSVHSGQKPGSRLPQEGNSHQEGDTEALQHGAEGPCSCSECGERSPMSARLASPCRAHTGEKPFQCAHCTKRFRLRRLLQVHQHAHGGERPFSCRKCGKGFAKQCKLTEHIRVHSGEKPFRCAKCGRNFRQRGQLLRHQRLHTDEKPFQCPECGLSFRLESMLRAHRLRHGGERPFSCSECGRGFTHQCKLREHLRVHSGERPFQCLKCDKRFRLKGILKAHQHTHSKERPFSCGECGKGFTRQSKLTEHLRVHSGERPFQCPECNRSFRLKGQLLSHQRLHTGERPFQCPECDKRYRVKADMKAHQLLHSGEMPFSCECGKGFVKHSKLIEHIRTHTGEKPFQCPKCDKSFRLKAQLLSHQGLHTGERPFHCPECDKNFRERGHMLRHQRIHRPERPFACGDCGKGFIYKSKLAEHIRVHTKSCPAPNELDIKKRLSQLFAMIEADWS

SEQ ID NO: 34933 - protein, 41 aa, Artificial Sequence
  Synthetic polypeptide
MPINGRLDKENVHMHYGILCSHKENHILCRKMDGAGGHCLK

SEQ ID NO: 34934 - protein, 72 aa, Artificial Sequence
  Synthetic polypeptide
IVLHKDTCLHMFIAALFTIAKMWNQPKCPSMADWIKKMYICTMEYYAAIKKIISFAERWMELEAIVLTTSDF

SEQ ID NO: 34935 - protein, 43 aa, Artificial Sequence
  Synthetic polypeptide
MPINGRLDKENVHMHYGILCSHKENHILCRKMDGAGGHCLNYL

SEQ ID NO: 34936 - protein, 40 aa, Artificial Sequence
  Synthetic polypeptide
IVLHKDTCLHMFIAALFTIAKMWNQPKCPSMADWIKKIYL

SEQ ID NO: 34937 - protein, 7 aa, Artificial Sequence
  Synthetic polypeptide
RKSTSDF

SEQ ID NO: 34938 - protein, 787 aa, Artificial Sequence
  Synthetic polypeptide
MPINGRLDKENLPLTFEDVAIYFSEQEWQDLEAWQKELYKHVMRSNYETLVSLDDGLPKPELISWIEHGGEPFRKWRESQKSGNIICSSVDMHFDPGFEEQLFWGSQQAMNSGKTKSHFQLDPESQCSFGSFVSFRPDQGITLGSPQRHDARAPPPLACGPSESTLKEGIPGPRNLDLPGLWDVPAWESTQHPWPVCGESCWENNHLVMHQRGHSKDRTRRAWEKFNKRAETQMPWSSPRVQRHFRCGVCGKSFRRKLCLLRHLAAHTGRGPFRNADGEMCFRHELTHPSHRLPQQGEKPAQCTPCGKRSLPVDSTQARRCQHSREGPASWREGRGASSSVHSGQKPGSRLPQEGNSHQEGDTEALQHGAEGPCSCSECGERSPMSARLASPCRAHTGEKPFQCAHCTKRFRLRRLLQVHQHAHGGERPFSCRKCGKGFAKQCKLTEHIRVHSGEKPFRCAKCGRNFRQRGQLLRHQRLHTDEKPFQCPECGLSFRLESMLRAHRLRHGGERPFSCSECGRGFTHQCKLREHLRVHSGERPFQCLKCDKRFRLKGILKAHQHTHSKERPFSCGECGKGFTRQSKLTEHLRVHSGERPFQCPECNRSFRLKGQLLSHQRLHTGERPFQCPECDKRYRVKADMKAHQLLHSGEMPFSCECGKGFVKHSKLIEHIRTHTGEKPFQCPKCDKSFRLKAQLLSHQGLHTGERPFHCPECDKNFRERGHMLRHQRIHRPERPFACGDCGKGFIYKSKLAEHIRVHTKSCPAPNELDIKKRLSQLFAMIEADWS

SEQ ID NO: 34939 - protein, 791 aa, Artificial Sequence
  Synthetic polypeptide
VWWRTPVIPAPREAELPLTFEDVAIYFSEQEWQDLEAWQKELYKHVMRSNYETLVSLDDGLPKPELISWIEHGGEPFRKWRESQKSGNIICSSVDMHFDPGFEEQLFWGSQQAMNSGKTKSHFQLDPESQCSFGSFVSFRPDQGITLGSPQRHDARAPPPLACGPSESTLKEGIPGPRNLDLPGLWDVPAWESTQHPWPVCGESCWENNHLVMHQRGHSKDRTRRAWEKFNKRAETQMPWSSPRVQRHFRCGVCGKSFRRKLCLLRHLAAHTGRGPFRNADGEMCFRHELTHPSHRLPQQGEKPAQCTPCGKRSLPVDSTQARRCQHSREGPASWREGRGASSSVHSGQKPGSRLPQEGNSHQEGDTEALQHGAEGPCSCSECGERSPMSARLASPCRAHTGEKPFQCAHCTKRFRLRRLLQVHQHAHGGERPFSCRKCGKGFAKQCKLTEHIRVHSGEKPFRCAKCGRNFRQRGQLLRHQRLHTDEKPFQCPECGLSFRLESMLRAHRLRHGGERPFSCSECGRGFTHQCKLREHLRVHSGERPFQCLKCDKRFRLKGILKAHQHTHSKERPFSCGECGKGFTRQSKLTEHLRVHSGERPFQCPECNRSFRLKGQLLSHQRLHTGERPFQCPECDKRYRVKADMKAHQLLHSGEMPFSCECGKGFVKHSKLIEHIRTHTGEKPFQCPKCDKSFRLKAQLLSHQGLHTGERPFHCPECDKNFRERGHMLRHQRIHRPERPFACGDCGKGFIYKSKLAEHIRVHTKSCPAPNELDIKKRLSQLFAMIEADWS

SEQ ID NO: 34940 - protein, 10 aa, Artificial Sequence
  Synthetic polypeptide
SQLLGRLSYL

SEQ ID NO: 34941 - protein, 72 aa, Artificial Sequence
  Synthetic polypeptide
HKKAQEKTTLHTFNFFHTSFTSNREKLLFSDHRDFTLDGGGRYSGCGEEDGVPGCPATEPGGAHGDSREEAG

SEQ ID NO: 34942 - protein, 509 aa, Artificial Sequence
  Synthetic polypeptide
EKINVKEDKKVEKKDGINSTKKHRRKRRSTPLTSSTLPSQATEKSSYFQTTEISLWTVVAAIQAVEKKMESQAARLQSLEGRTGTAEKKLADCEKMAVEFGNQLEGKWAVLGTLLQEYGLLQRRLENVENLLRNRNFWILRLPPGSKGEAPKVSRSLENDGVCFTEQEWENLEDWQKELYRNVMESNYETLVSLKVLGQTEGEAELGTEMLGDLEEEGPGGAHPAGGVMIKQELQYTQEGPADLPGEFSCIAEEQAFLSPEQTELWGGQGSSVLLETGPGDSTLEEPVGSRVPSSSRTVGCPKQKSHRQVQLDQECGQGLKLKKDTSRPYECSECEITFRYKQQLATHLRSHSGWGSCTPEEPEESLRPRPRLKPQTKKAKLHQCDVCLRSFSCKVSLVTHQRCHLQEGPSAGQHVQERFSPNSLVALPGHIPWRKSRSSLICGYCGKSFSHPSDLVRHQRIHTGERPYSCTECEKSFVQKQHLLQHQKIHQRERGGLALEPGRPNGLL

SEQ ID NO: 34943 - protein, 14 aa, Artificial Sequence
  Synthetic polypeptide
IAQKSTGENDAPHL

SEQ ID NO: 34944 - protein, 45 aa, Artificial Sequence
  Synthetic polypeptide
GWALWLMPVIPATQEAGVGELLEARISRPAWATQRDPISEKERSG

SEQ ID NO: 34945 - protein, 69 aa, Artificial Sequence
  Synthetic polypeptide
SQRLRKLGWENCLRPGFQDQPGQHSETPSLKKRGVDDSEGEGGGRRSGGRRGGRMAPASIVTSQPLSRA

SEQ ID NO: 34946 - protein, 509 aa, Artificial Sequence
  Synthetic polypeptide
KREEWMIRKVKVEDEDQEAEEEVEWPQHLSLLPSPFPAPDLGHLAAAYKLEPGAPGALSGLALSGWGPMPEKPYGCGECERRFRDQLTLRLHQRLHRGEGPCACPDCGRSFTQRAHMLLHQRSHRGERPFPCSECDKRFSKKAHLTRHLRTHTGERPYPCAECGKRFSQKIHLGSHQKTHTGERPFPCTECEKRFRKKTHLIRHQRIHTGERPYQCAQCARSFTHKQHLVRHQRVHQTAGPARPSPDSSASPHSTAPSPTPSFPGPKPFACSDCGLSFGWKKNLATHQCLHRSEGRPFGCDECALGATVDAPAAKPLASAPGGPGCGPGSDPVVPQRAPSGERSFFCPDCGRGFSHGQHLARHPRVHTGERPFACTQCDRRFGSRPNLVAHSRAHSGARPFACAQCGRRFSRKSHLGRHQAVHTGSRPHACAVCARSFSSKTNLVRHQAIHTGSRPFSCPQCGKSFSRKTHLVRHQLIHGEAAHAAPDAALAAPAWSAPPEVAPPPLFF

SEQ ID NO: 34947 - protein, 38 aa, Artificial Sequence
  Synthetic polypeptide
GQEEAVARCAASPAWHCHLAANLHSIHQKTESILQKVM

SEQ ID NO: 34948 - protein, 50 aa, Artificial Sequence
  Synthetic polypeptide
ARRKLWQDVLRLLLGIAILLPTSTQYTRKQRVSCRRLCNWKLHQTHPDCR

SEQ ID NO: 34949 - protein, 192 aa, Artificial Sequence
  Synthetic polypeptide
PGGSCGKMCCVSCLALPSCCQPPLNTPENREYLAEGYVIGSCIKHIPIAGRDITYFIQQLLREREVGIPPEQSLETAKAIKEKYCYICPDIVKEFAKYDVDPQKWIKQYTGINAINQKKFVIDVGYERFLGPEIFFHPEFANPDSMESISDVVDEVIQNCPIDVRRPLYKMEQIPLSYPQGHGFHPLSPPFH

SEQ ID NO: 34950 - protein, 70 aa, Artificial Sequence
  Synthetic polypeptide
GQEEAVARCAASPAWHCHLAANLHSIHQKTESILQKLCSNHLTFQDSTLQFRQCWPWRHLGHLDKWVNVH

SEQ ID NO: 34951 - protein, 41 aa, Artificial Sequence
  Synthetic polypeptide
ARRKLWQDVLRLLLGIAILLPTSTQYTRKQRVSCRNYVRII

SEQ ID NO: 34952 - protein, 159 aa, Artificial Sequence
  Synthetic polypeptide
PGGSCGKMCCVSCLALPSCCQPPLNTPENREYLAEIMFESFNVPGLYIAVQAVLALAASWTSRQVGERTLTGIVIDSGDGVTHVIPVAEGYVIGSCIKHIPIAGRDITYFIQQLLREREVGIPPEQSLETAKAIKEKYCYICPDIVKEFAKYDVDPQKW

SEQ ID NO: 34953 - protein, 194 aa, Artificial Sequence
  Synthetic polypeptide
GQEEAVARCAASPAWHCHLAATEPPLNTPENREYLAEGYVIGSCIKHIPIAGRDITYFIQQLLREREVGIPPEQSLETAKAIKEKYCYICPDIVKEFAKYDVDPQKWIKQYTGINAINQKKFVIDVGYERFLGPEIFFHPEFANPDSMESISDVVDEVIQNCPIDVRRPLYKMEQIPLSYPQGHGFHPLSPPFH

SEQ ID NO: 34954 - protein, 39 aa, Artificial Sequence
  Synthetic polypeptide
ARRKLWQDVLRLLLGIAILLPQNLHSIHQKTESILQKVM

SEQ ID NO: 34955 - protein, 51 aa, Artificial Sequence
  Synthetic polypeptide
PGGSCGKMCCVSCLALPSCCHRTSTQYTRKQRVSCRRLCNWKLHQTHPDCR

SEQ ID NO: 34956 - protein, 161 aa, Artificial Sequence
  Synthetic polypeptide
GQEEAVARCAASPAWHCHLAATEPPLNTPENREYLAEIMFESFNVPGLYIAVQAVLALAASWTSRQVGERTLTGIVIDSGDGVTHVIPVAEGYVIGSCIKHIPIAGRDITYFIQQLLREREVGIPPEQSLETAKAIKEKYCYICPDIVKEFAKYDVDPQKW

SEQ ID NO: 34957 - protein, 71 aa, Artificial Sequence
  Synthetic polypeptide
ARRKLWQDVLRLLLGIAILLPQNLHSIHQKTESILQKLCSNHLTFQDSTLQFRQCWPWRHLGHLDKWVNVH

SEQ ID NO: 34958 - protein, 42 aa, Artificial Sequence
  Synthetic polypeptide
PGGSCGKMCCVSCLALPSCCHRTSTQYTRKQRVSCRNYVRII

SEQ ID NO: 34959 - protein, 33 aa, Artificial Sequence
  Synthetic polypeptide
PRTGCPASGTPSATWSSHTWTHASAGCTTWATR

SEQ ID NO: 34960 - protein, 93 aa, Artificial Sequence
  Synthetic polypeptide
HALAVLHLVRHRQHGAATHGLTHRLAAQPGRPDRQTLQQQRPGRPLHQGQVCDGALLHLQQPHQCGLRQRLSQHQLREDLLHLRHAHWLPHVC

SEQ ID NO: 34961 - protein, 599 aa, Artificial Sequence
  Synthetic polypeptide
THWLSCIWYAIGNMEQPHMDSRIGWLHNLGDQIGKPYNSSGLGGPSIKDKYVTALYFTFSSLTSVGFGNVSPNTNSEKIFSICVMLIGSLMYASIFGNVSAIIQRLYSGTARYHTQMLRVREFIRFHQIPNPLRQRLEEYFQHAWSYTNGIDMNAVLKGFPECLQADICLHLNRSLLQHCKPFRGATKGCLRALAMKFKTTHAPPGDTLVHAGDLLTALYFISRGSIEILRGDVVVAILGKNDIFGEPLNLYARPGKSNGDVRALTYCDLHKIHRDDLLEVLDMYPEFSDHFWSSLEITFNLRDTNMIPGSPGSTELEGGFSRQRKRKLSFRRRTDKDTEQPGEVSALGPGRAGAGPSSRGRPGGPWGESPSSGPSSPESSEDEGPGRSSSPLRLVPFSSPRPPGEPPGGEPLMEDCEKSSDTCNPLSGAFSGVSNIFSFWGDSRGRQYQELPRCPAPTPSLLNIPLSSPGRRPRGDVESRLDALQRQLNRLETRLSADMATVLQLLQRQMTLVPPAYSAVTTPGPGPTSTSPLLPVSPLPTLTLDSLSQVSQFMACEELPPGAPELPQEGPTRRLSLPGQLGALTSQPLHRHGSDPGS

SEQ ID NO: 34962 - protein, 328 aa, Artificial Sequence
  Synthetic polypeptide
THWLSCIWYAIGNMEQPHMDSRIGWLHNLGDQIGKPYNSSGLGGPSIKDKYVTALYFTFSSLTSVGFGNVSPNTNSEKIFSICVMLIGSLMYASIFGNVSAIIQRLYSGTARYHTQMLRVREFIRFHQIPNPLRQRLEEYFQHAWSYTNGIDMNAVLKGFPECLQADICLHLNRSLLQHCKPFRGATKGCLRALAMKFKTTHAPPGDTLVHAGDLLTALYFISRGSIEILRGDVVVAILGMGWGAGTGLEMPSAASRGASLLNMQSLGLWTWDCLQGHWAPLIHLNSGPPSGAMERSPTWGEAAELWGSHILLPFRIRHKQTLFASLK

SEQ ID NO: 34963 - protein, 132 aa, Artificial Sequence
  Synthetic polypeptide
RASGQSQRAWALGRLGSPSRRKTNFTAPWAWSGLRRSYRRPGLVEGRSQAAAMGRKTLSTTASPPTTSITHCPPTCLRMHAAARHPRAQDGSLEGAREPPRLEKPRPLRRGRKMRMRPARLRGPGLSLSRPL

SEQ ID NO: 34964 - protein, 33 aa, Artificial Sequence
  Synthetic polypeptide
ERAARARELGPWDAWVPRAGGRRTSPHPGRGAV

SEQ ID NO: 34965 - protein, 131 aa, Artificial Sequence
  Synthetic polypeptide
SERPEPESLGPGTPGFPEQEEDELHRTLGVERFEEILQEAGSRGGEEPGRSYGEEDFEYHRQSSHHIHHPLSTHLPPDARRRKTPQGPGRKPRRRPGASPTGETPTIEEGEEDEDEASEAEGARALTQPSP

SEQ ID NO: 34966 - protein, 230 aa, Artificial Sequence
  Synthetic polypeptide
RASGQSQRAWALGRLGSPSRRKTNFTAPWAWSGLRRSYRRPGLVEGRSQAAAMGRKTLSTTASPPTTSITHCPPTCLRMHAAARHPRAQDGSLEGAREPPRLEKPRPLRRGRKMRMRPARLRGPGLSLSRPLSPHPPRCSSFSKRMTVLTGRQRGPVHLPLHHCPTRRRLLGPPKGPRLEPRWRRRRRRRWRWPVALQGVTTGVPRGAPCPKPSLGTAATTFRRGGASGA

SEQ ID NO: 34967 - protein, 1227 aa, Artificial Sequence
  Synthetic polypeptide
SERPEPESLGPGTPGFPEQEEDELHRTLGVERFEEILQEAGSRGGEEPGRSYGEEDFEYHRQSSHHIHHPLSTHLPPDARRRKTPQGPGRKPRRRPGASPTGETPTIEEGEEDEDEASEAEGARALTQPSPVSTPSSVQFFLQEDDSADRKAERTSPSSPAPLPHQEATPRASKGAQAGTQVEEAEAEAVAVASGTAGGDDGGASGRPLPKAQPGHRSYNLQERRRIGSMTGAEQALLPRVPTDEIEAQTLATADLDLMKSHRFEDVPGVRRHLVRKNAKGSTQSGREGREPGPTPRARPRAPHKPHEVFVELNELLLDKNQEPQWRETARWIKFEEDVEEETERWGKPHVASLSFRSLLELRRTLAHGAVLLDLDQQTLPGVAHQVVEQMVISDQIKAEDRANVLRALLLKHSHPSDEKDFSFPRNISAGSLGSLLGHHHGQGAESDPHVTEPLMGGVPETRLEVERERELPPPAPPAGITRSKSKHELKLLEKIPENAEATVVLVGCVEFLSRPTMAFVRLREAVELDAVLEVPVPVRFLFLLLGPSSANMDYHEIGRSISTLMSDKQFHEAAYLADEREDLLTAINAFLDCSVVLPPSEVQGEELLRSVAHFQRQMLKKREEQGRLLPTGAGLEPKSAQDKALLQMVEAAGAAEDDPLRRTGRPFGGLIRDVRRRYPHYLSDFRDALDPQCLAAVIFIYFAALSPAITFGGLLGEKTQDLIGVSELIMSTALQGVVFCLLGAQPLLVIGFSGPLLVFEEAFFSFCSSNHLEYLVGRVWIGFWLVFLALLMVALEGSFLVRFVSRFTQEIFAFLISLIFIYETFYKLVKIFQEHPLHGCSASNSSEVDGGENMTWAGARPTLGPGNRSLAGQSGQGKPRGQPNTALLSLVLMAGTFFIAFFLRKFKNSRFFPGRIRRVIGDFGVPIAILIMVLVDYSIEDTYTQKLSVPSGFSVTAPEKRGWVINPLGEKSPFPVWMMVASLLPAILVFILIFMETQITTLIISKKERMLQKGSGFHLDLLLIVAMGGICALFGLPWLAAATVRSVTHANALTVMSKAVAPGDKPKIQEVKEQRVTGLLVALLVGLSIVIGDLLRQIPLAVLFGIFLYMGVTSLNGIQFYERLHLLLMPPKHHPDVTYVKKVRTLRMHLFTALQLLCLALLWAVMSTAASLAFPFILILTVPLRMVVLTRIFTDREMKCLDANEAEPVFDEREGVDEYNEMPMPV

SEQ ID NO: 34968 - protein, 155 aa, Artificial Sequence
  Synthetic polypeptide
RASGQSQRAWALGRLGSPSRRKTNFTAPWAWSGLRRSYRRPGLVEGRSQAAAMGRKTLSTTASPPTTSITHCPPTCLRMHAAARHPRAQDGSLEGAREPPRLEKPRPLRRGRKMRMRPARLRGPGLSLSRPLSPHPPRCSSFSKRMTVLTGRQRG

SEQ ID NO: 34969 - protein, 155 aa, Artificial Sequence
  Synthetic polypeptide
SERPEPESLGPGTPGFPEQEEDELHRTLGVERFEEILQEAGSRGGEEPGRSYGEEDFEYHRQSSHHIHHPLSTHLPPDARRRKTPQGPGRKPRRRPGASPTGETPTIEEGEEDEDEASEAEGARALTQPSPVSTPSSVQFFLQEDDSADRKAERT

SEQ ID NO: 34970 - protein, 114 aa, Artificial Sequence
  Synthetic polypeptide
RASGQSQRAWALGRLGSPSRRKTNFTAPWAWSGLRRSYRRPGLVEGRSQAAAMGRKTLSTTASPPTTSITHCPPTCLRMHAAARHPRAQDGSLEGAREPPRLEKPRPLRRGRKM

SEQ ID NO: 34971 - protein, 113 aa, Artificial Sequence
  Synthetic polypeptide
SERPEPESLGPGTPGFPEQEEDELHRTLGVERFEEILQEAGSRGGEEPGRSYGEEDFEYHRQSSHHIHHPLSTHLPPDARRRKTPQGPGRKPRRRPGASPTGETPTIEEGEED

SEQ ID NO: 34972 - protein, 137 aa, Artificial Sequence
  Synthetic polypeptide
RASGQSQRAWALGRLGSPSRRKTNFTAPWAWSGLRRSYRRPGLVEGRSQAAAMGRKTLSTTASPPTTSITHCPPTCLRMHAAARHPRAQDGSLEGAREPPRLEKPRPLRRGRKMRMRPARLRGPGLSLSRPLSPHPP

SEQ ID NO: 34973 - protein, 136 aa, Artificial Sequence
  Synthetic polypeptide
SERPEPESLGPGTPGFPEQEEDELHRTLGVERFEEILQEAGSRGGEEPGRSYGEEDFEYHRQSSHHIHHPLSTHLPPDARRRKTPQGPGRKPRRRPGASPTGETPTIEEGEEDEDEASEAEGARALTQPSPVSTPS

SEQ ID NO: 34974 - protein, 57 aa, Artificial Sequence
  Synthetic polypeptide
RASGQSQRAWALGRLGSPSRRKTNFTAPWAWSGLRRSYRRPGLVEGRSQAAAMGRKT

SEQ ID NO: 34975 - protein, 56 aa, Artificial Sequence
  Synthetic polypeptide
SERPEPESLGPGTPGFPEQEEDELHRTLGVERFEEILQEAGSRGGEEPGRSYGEED

SEQ ID NO: 34976 - protein, 43 aa, Artificial Sequence
  Synthetic polypeptide
NEAFHLMVPWCVPWNRSEGSASLRSHLPLCSPFSEVGKGWKLL

SEQ ID NO: 34977 - protein, 20 aa, Artificial Sequence
  Synthetic polypeptide
LNPFAALGLRFSTGEMRLSI

SEQ ID NO: 34978 - protein, 41 aa, Artificial Sequence
  Synthetic polypeptide
NEAFHLMVPWCVPWNRSEGSASLRSHLPLCSPFSERQGQRN

SEQ ID NO: 34979 - protein, 128 aa, Artificial Sequence
  Synthetic polypeptide
GQVPWLTPVIPVLWEAEAGRSLEIRSVRPAWPHATTHRWHDPKTLSCQDRALPSAFTRAAGLRSLTFGVHDEVLPRDQGEGRNEEDHWAIRSHWETTGEPNPELVRRAEVPSVSGLAGLAEPPHALPG

SEQ ID NO: 34980 - protein, 194 aa, Artificial Sequence
  Synthetic polypeptide
DQPGHMLLPTDGMIRKHSHVKIGRYHQHLQEQLDLDLSPLEYMMKCYPEIKEKEEMRKIIGRYGLTGKQQVSPIRNLSDGQKCRVCLAWLAWQNPHMLFLDEPTNHLDIETIDALADAINEFEGGMMLVSHDFRLIQQVAQEIWVCEKQTITKWPGDILAYKEHLKSKLVDEEPQLTKRTHNVCTLTLASLPRP

SEQ ID NO: 34981 - protein, 17 aa, Artificial Sequence
  Synthetic polypeptide
DQECETSLATCYYPQMA

SEQ ID NO: 34982 - protein, 183 aa, Artificial Sequence
  Synthetic polypeptide
DQPGHMLLPTDGMIRKHSHVKIGRYHQHLQEQLDLDLSPLEYMMKCYPEIKEKEEMRKIIGRYGLTGKQQVSPIRNLSDGQKCRVCLAWLAWQNPHMLFLDEPTNHLDIETIDALADAINEFEGGMMLVSHDFRLIQQVAQEIWVCEKQTITKWPGDILAYKEHLKSKLVDEEPQLTKRTHNV

SEQ ID NO: 34983 - protein, 39 aa, Artificial Sequence
  Synthetic polypeptide
EVLLTVFPLQTFIPWFNPPLLKLPSLTDSPKIGYYPQMA

SEQ ID NO: 34984 - protein, 106 aa, Artificial Sequence
  Synthetic polypeptide
NCHHSLIHQKLATTHRWHDPKTLSCQDRALPSAFTRAAGLRSLTFGVHDEVLPRDQGEGRNEEDHWAIRSHWETTGEPNPELVRRAEVPSVSGLAGLAEPPHALPG

SEQ ID NO: 34985 - protein, 193 aa, Artificial Sequence
  Synthetic polypeptide
FTKNWLLPTDGMIRKHSHVKIGRYHQHLQEQLDLDLSPLEYMMKCYPEIKEKEEMRKIIGRYGLTGKQQVSPIRNLSDGQKCRVCLAWLAWQNPHMLFLDEPTNHLDIETIDALADAINEFEGGMMLVSHDFRLIQQVAQEIWVCEKQTITKWPGDILAYKEHLKSKLVDEEPQLTKRTHNVCTLTLASLPRP

SEQ ID NO: 34986 - protein, 182 aa, Artificial Sequence
  Synthetic polypeptide
FTKNWLLPTDGMIRKHSHVKIGRYHQHLQEQLDLDLSPLEYMMKCYPEIKEKEEMRKIIGRYGLTGKQQVSPIRNLSDGQKCRVCLAWLAWQNPHMLFLDEPTNHLDIETIDALADAINEFEGGMMLVSHDFRLIQQVAQEIWVCEKQTITKWPGDILAYKEHLKSKLVDEEPQLTKRTHNV

SEQ ID NO: 34987 - protein, 323 aa, Artificial Sequence
  Synthetic polypeptide
PGHESYVTFCQLEDEAAFTCSADCTIRRWDVLTGQCLQVYRGHTSIVNRILVANNQLFSSSYDRTARVWSVDKGQMSREFRGHRNCVLTLAYSAPWDLPSTPCAEEAAAGGLLVTGSTDGTAKVWQVASGCCHQTLRGHTGAVLCLVLDTPGHTAFTGSTDATIRAWDILSGEQLRVFREHRGSVICLELVNRLVYSGSADRTVKCWLADTGECVRTFTAHRRNVSALKYHAGTLFTGSGDACARAFDAQSGELRRVFRGHTFIINCIQVHGQVLYTASHDGALRLWDVRGLRGAPRPPPPMRSLSRLFSNKVGCAAAPLQPA

SEQ ID NO: 34988 - protein, 20 aa, Artificial Sequence
  Synthetic polypeptide
HGETPSLLKIQRISQDMKAM

SEQ ID NO: 34989 - protein, 8 aa, Artificial Sequence
  Synthetic polypeptide
KYKELART

SEQ ID NO: 34990 - protein, 429 aa, Artificial Sequence
  Synthetic polypeptide
PGHESYVTFCQLEDEAAFTCSADCTIRRWDVLTGQCLQVYRGHTSIVNRILVANNQLFSSSYDRTARVWSVDKGQMSREFRGHRNCVLTLAYSAPWDLPSTPCAEEAAAGGLLVTGSTDGTAKVWQVASGCCHQTLRGHTGAVLCLVLDTPGHTAFTGSTDATIRAWDILSGEQLRVFREHRGSVICLERERSGGLQSCPSCRPSLLLLAAGEPTRVLWQRGQDRQVLAGRHRGVCAHVHGPQTQRERPQVPRGHLVHGQRGRLRPGLRRAVWRAAEGVPGPHIHHQLHPGARPGALHRLARRRPAPLGRARAPRCPAAPSAHAQPLAALQQQGGLRRRAPAAGLIPRGPCRRQPRHPAAPRAPRPATRGGGARWPARGEERGSPGGRRARRRRLVFLWWPGGAGSGSARPGDRPLFPFRVAPVLPPHP

SEQ ID NO: 34991 - protein, 30 aa, Artificial Sequence
  Synthetic polypeptide
SEEAPTVRPSPSCPTRALSECAKQKETETE

SEQ ID NO: 34992 - protein, 23 aa, Artificial Sequence
  Synthetic polypeptide
GQVPAVPPERCLNVPNKRRQKRS

SEQ ID NO: 34993 - protein, 308 aa, Artificial Sequence
  Synthetic polypeptide
NPVSTKNTKISRAWWHMPVIPATREAEVKKAFFALVANGVRAAPLWESKKQSFVGMLTITDFINILHRYYKSPMVQIYELEEHKIETWRELYLQETFKPLVNISPDASLFDAVYSLIKNKIHRLPVIDPISGNALYILTHKRILKFLQLFMSDMPKPAFMKQNLDELGIGTYHNIAFIHPDTPIIKALNIFVERRISALPVVDESGKVVDIYSKFDVINLAAEKTYNNLDITVTQALQHRSQYFEGVVKCNKLEILETIVDRIVRAEVHRLVVVNEADSIVGIISLSDILQALILTPAGAKQKETETE

SEQ ID NO: 34994 - protein, 61 aa, Artificial Sequence
  Synthetic polypeptide
SQHFGRPRWMDHLRSGVRDELSQHGETLFLPKIQKLAGHGGTCLSSQLLGRLRLKRPSLLW

SEQ ID NO: 34995 - protein, 143 aa, Artificial Sequence
  Synthetic polypeptide
NPVSTKNTKISRAWWHMPVIPATREAEVKKAFFALVANGVRAAPLWESKKQSFVGMLTITDFINILHRYYKSPMVQIYELEEHKIETWRELYLQETFKPLVNISPDASLFDAVYSLIKNKIHRLPVIDPISGNALYILTHKRI

SEQ ID NO: 34996 - protein, 324 aa, Artificial Sequence
  Synthetic polypeptide
DQLGQHTVEDSESGVYMRFMRSHKCYDIVPTSSKLVVFDTTLQVKKAFFALVANGVRAAPLWESKKQSFVGMLTITDFINILHRYYKSPMVQIYELEEHKIETWRELYLQETFKPLVNISPDASLFDAVYSLIKNKIHRLPVIDPISGNALYILTHKRILKFLQLFMSDMPKPAFMKQNLDELGIGTYHNIAFIHPDTPIIKALNIFVERRISALPVVDESGKVVDIYSKFDVINLAAEKTYNNLDITVTQALQHRSQYFEGVVKCNKLEILETIVDRIVRAEVHRLVVVNEADSIVGIISLSDILQALILTPAGAKQKETETE

SEQ ID NO: 34997 - protein, 12 aa, Artificial Sequence
  Synthetic polypeptide
AWEFETSLGNIQ

SEQ ID NO: 34998 - protein, 49 aa, Artificial Sequence
  Synthetic polypeptide
WLTPVIPEVWEAKAGGSLEPGSLRPAWATYSRRLRKWCLHAIHEVTQVL

SEQ ID NO: 34999 - protein, 8 aa, Artificial Sequence
  Synthetic polypeptide
DQLGQHTV

SEQ ID NO: 35000 - protein, 31 aa, Artificial Sequence
  Synthetic polypeptide
WLTPVIPEVWEAKAGGSLEPGSLRPAWATYS

SEQ ID NO: 35001 - protein, 159 aa, Artificial Sequence
  Synthetic polypeptide
DQLGQHTVEDSESGVYMRFMRSHKCYDIVPTSSKLVVFDTTLQVKKAFFALVANGVRAAPLWESKKQSFVGMLTITDFINILHRYYKSPMVQIYELEEHKIETWRELYLQETFKPLVNISPDASLFDAVYSLIKNKIHRLPVIDPISGNALYILTHKRI

SEQ ID NO: 35002 - protein, 2 aa, Artificial Sequence
  Synthetic polypeptide
PV

SEQ ID NO: 35003 - protein, 318 aa, Artificial Sequence
  Synthetic polypeptide
PVEDSESGVYMRFMRSHKCYDIVPTSSKLVVFDTTLQVKKAFFALVANGVRAAPLWESKKQSFVGMLTITDFINILHRYYKSPMVQIYELEEHKIETWRELYLQETFKPLVNISPDASLFDAVYSLIKNKIHRLPVIDPISGNALYILTHKRILKFLQLFMSDMPKPAFMKQNLDELGIGTYHNIAFIHPDTPIIKALNIFVERRISALPVVDESGKVVDIYSKFDVINLAAEKTYNNLDITVTQALQHRSQYFEGVVKCNKLEILETIVDRIVRAEVHRLVVVNEADSIVGIISLSDILQALILTPAGAKQKETETE

SEQ ID NO: 35004 - protein, 23 aa, Artificial Sequence
  Synthetic polypeptide
KKLASRRLRKWCLHAIHEVTQVL

SEQ ID NO: 35005 - protein, 5 aa, Artificial Sequence
  Synthetic polypeptide
KKLAS

SEQ ID NO: 35006 - protein, 153 aa, Artificial Sequence
  Synthetic polypeptide
PVEDSESGVYMRFMRSHKCYDIVPTSSKLVVFDTTLQVKKAFFALVANGVRAAPLWESKKQSFVGMLTITDFINILHRYYKSPMVQIYELEEHKIETWRELYLQETFKPLVNISPDASLFDAVYSLIKNKIHRLPVIDPISGNALYILTHKRI

SEQ ID NO: 35007 - protein, 319 aa, Artificial Sequence
  Synthetic polypeptide
PAVEDSESGVYMRFMRSHKCYDIVPTSSKLVVFDTTLQVKKAFFALVANGVRAAPLWESKKQSFVGMLTITDFINILHRYYKSPMVQIYELEEHKIETWRELYLQETFKPLVNISPDASLFDAVYSLIKNKIHRLPVIDPISGNALYILTHKRILKFLQLFMSDMPKPAFMKQNLDELGIGTYHNIAFIHPDTPIIKALNIFVERRISALPVVDESGKVVDIYSKFDVINLAAEKTYNNLDITVTQALQHRSQYFEGVVKCNKLEILETIVDRIVRAEVHRLVVVNEADSIVGIISLSDILQALILTPAGAKQKETETE

SEQ ID NO: 35008 - protein, 26 aa, Artificial Sequence
  Synthetic polypeptide
SQEFKTSLDNIARLPSLQTIKKISQQ

SEQ ID NO: 35009 - protein, 24 aa, Artificial Sequence
  Synthetic polypeptide
KKLASSRRLRKWCLHAIHEVTQVL

SEQ ID NO: 35010 - protein, 3 aa, Artificial Sequence
  Synthetic polypeptide
PAV

SEQ ID NO: 35011 - protein, 6 aa, Artificial Sequence
  Synthetic polypeptide
KKLASS

SEQ ID NO: 35012 - protein, 154 aa, Artificial Sequence
  Synthetic polypeptide
PAVEDSESGVYMRFMRSHKCYDIVPTSSKLVVFDTTLQVKKAFFALVANGVRAAPLWESKKQSFVGMLTITDFINILHRYYKSPMVQIYELEEHKIETWRELYLQETFKPLVNISPDASLFDAVYSLIKNKIHRLPVIDPISGNALYILTHKRI

SEQ ID NO: 35013 - protein, 1131 aa, Artificial Sequence
  Synthetic polypeptide
LATQSAVLGDPQHPHQQTLGAQMQGGFGCGNQLPKTDGGSETKKQRSKRTQRTGEKAAPRSKKRKKDEEEKQAMYSSTDTFTHLKQQLSLLPLMEPIIGVNFAHFLPYGSGQFNSGNRLLGTFGSATLEGVSDYYSQLIYKQNNLSNPPTPPASLPPTPPPMACQKMANGFATTEELAGKAGVLVSHEVTKTLGPKPFQLPFRPQDDLLARALAQGPKTVDVPASLPTPPHNNQEELRIQDHCGDRDTPDSFVPSSSPESVVGVEVSRYPDLSLVKEEPPEPVPSPIIPILPSTAGKSSESRRNDIKTEPGTLYFASPFGPSPNGPRSGLISVAITLHPTAAENISSVVAAFSDLLHVRIPNSYEVSSAPDVPSMGLVSSHRINPGLEYRQHLLLRGPPPGSANPPRLVSSYRLKQPNVPFPPTSNGLSGYKDSSHGIAESAALRPQWCCHCKVVILGSGVRKSFKDLTLLNKDSRESTKRVEKDIVFCSNNCFILYSSTAQAKNSENKESIPSLPQSPMRETPSKAFHQYSNNISTLDVHCLPQLPEKASPPASPPIAFPPAFEAAQVEAKPDELKVTVKLKPRLRAVHGGFEDCRPLNKKWRGMKWKKWSIHIVIPKGTFKPPCEDEIDEFLKKLGTSLKPDPVPKDYRKCCFCHEEGDGLTDGPARLLNLDLDLWVHLNCALWSTEVYETQAGALINVELALRRGLQMKCVFCHKTGATSGCHRFRCTNIYHFTCAIKAQCMFFKDKTMLCPMHKPKGIHEQELSYFAVFRRVYVQRDEVRQIASIVQRGERDHTFRVGSLIFHTIGQLLPQQMQAFHSPKALFPVGYEASRLYWSTRYANRRCRYLCSIEEKDGRPVFVIRIVEQGHEDLVLSDISPKGVWDKILEPVACVRKKSEMLQLFPAYLKGEDLFGLTVSAVARIAESLPGVEACENYTFRYGRNPLMELPLAVNPTGCARSEPKMSAHVKRPHTLNSTSTSKSFQSTVTGELNAPYSKQFVHSKSSQYRKMKTEWKSNVYLARSRIQGLGLYAARDIEKHTMVIEYIGTIIRNEVANRKEKLYESQNRGVYMFRMDNDHVIDATLTGGPARYINHSCAPNCVAEVVTFERGHKIIISSSRRIQKGEEVRV

SEQ ID NO: 35014 - protein, 83 aa, Artificial Sequence
  Synthetic polypeptide
MPLRVQSLGIRSIHISKLWGLKCKVVLDVATSCQKQMEEVKPRNSEANGLRGRVRKQHLAQRKGKRTKRRNKLCTLALTRLPT

SEQ ID NO: 35015 - protein, 39 aa, Artificial Sequence
  Synthetic polypeptide
CHSECSPWGSAASTSANFGGSNARWFWMWQPVAKNRWRK

SEQ ID NO: 35016 - protein, 1107 aa, Artificial Sequence
  Synthetic polypeptide
LATQSAVLGDPQHPHQQTLGAQMQGGFGCGNQLPKTDGGSETKKQRSKRTQRTGEKAAPRSKKRKKDEEEKQAMYSSTDTFTHLKQQNNLSNPPTPPASLPPTPPPMACQKMANGFATTEELAGKAGVLVSHEVTKTLGPKPFQLPFRPQDDLLARALAQGPKTVDVPASLPTPPHNNQEELRIQDHCGDRDTPDSFVPSSSPESVVGVEVSRYPDLSLVKEEPPEPVPSPIIPILPSTAGKSSESRRNDIKTEPGTLYFASPFGPSPNGPRSGLISVAITLHPTAAENISSVVAAFSDLLHVRIPNSYEVSSAPDVPSMGLVSSHRINPGLEYRQHLLLRGPPPGSANPPRLVSSYRLKQPNVPFPPTSNGLSGYKDSSHGIAESAALRPQWCCHCKVVILGSGVRKSFKDLTLLNKDSRESTKRVEKDIVFCSNNCFILYSSTAQAKNSENKESIPSLPQSPMRETPSKAFHQYSNNISTLDVHCLPQLPEKASPPASPPIAFPPAFEAAQVEAKPDELKVTVKLKPRLRAVHGGFEDCRPLNKKWRGMKWKKWSIHIVIPKGTFKPPCEDEIDEFLKKLGTSLKPDPVPKDYRKCCFCHEEGDGLTDGPARLLNLDLDLWVHLNCALWSTEVYETQAGALINVELALRRGLQMKCVFCHKTGATSGCHRFRCTNIYHFTCAIKAQCMFFKDKTMLCPMHKPKGIHEQELSYFAVFRRVYVQRDEVRQIASIVQRGERDHTFRVGSLIFHTIGQLLPQQMQAFHSPKALFPVGYEASRLYWSTRYANRRCRYLCSIEEKDGRPVFVIRIVEQGHEDLVLSDISPKGVWDKILEPVACVRKKSEMLQLFPAYLKGEDLFGLTVSAVARIAESLPGVEACENYTFRYGRNPLMELPLAVNPTGCARSEPKMSAHVKRFVLRPHTLNSTSTSKSFQSTVTGELNAPYSKQFVHSKSSQYRKMKTEWKSNVYLARSRIQGLGLYAARDIEKHTMVIEYIGTIIRNEVANRKEKLYESQNRGVYMFRMDNDHVIDATLTGGPARYINHSCAPNCVAEVVTFERGHKIIISSSRRIQKGEELCYDYKFDFEDDQHKIPCHCGAVNCRKWMN

SEQ ID NO: 35017 - protein, 1164 aa, Artificial Sequence
  Synthetic polypeptide
LATQSAVLGDPQHPHQQTLGAQMQGGFGCGNQLPKTDGGSETKKQRSKRTQRTGEKAAPRSKKRKKDEEEKQAMYSSTDTFTHLKQVRQLSLLPLMEPIIGVNFAHFLPYGSGQFNSGNRLLGTFGSATLEGVSDYYSQLIYKQNNLSNPPTPPASLPPTPPPMACQKMANGFATTEELAGKAGVLVSHEVTKTLGPKPFQLPFRPQDDLLARALAQGPKTVDVPASLPTPPHNNQEELRIQDHCGDRDTPDSFVPSSSPESVVGVEVSRYPDLSLVKEEPPEPVPSPIIPILPSTAGKSSESRRNDIKTEPGTLYFASPFGPSPNGPRSGLISVAITLHPTAAENISSVVAAFSDLLHVRIPNSYEVSSAPDVPSMGLVSSHRINPGLEYRQHLLLRGPPPGSANPPRLVSSYRLKQPNVPFPPTSNGLSGYKDSSHGIAESAALRPQWCCHCKVVILGSGVRKSFKDLTLLNKDSRESTKRVEKDIVFCSNNCFILYSSTAQAKNSENKESIPSLPQSPMRETPSKAFHQYSNNISTLDVHCLPQLPEKASPPASPPIAFPPAFEAAQVEAKPDELKVTVKLKPRLRAVHGGFEDCRPLNKKWRGMKWKKWSIHIVIPKGTFKPPCEDEIDEFLKKLGTSLKPDPVPKDYRKCCFCHEEGDGLTDGPARLLNLDLDLWVHLNCALWSTEVYETQAGALINVELALRRGLQMKCVFCHKTGATSGCHRFRCTNIYHFTCAIKAQCMFFKDKTMLCPMHKPKGIHEQELSYFAVFRRVYVQRDEVRQIASIVQRGERDHTFRVGSLIFHTIGQLLPQQMQAFHSPKALFPVGYEASRLYWSTRYANRRCRYLCSIEEKDGRPVFVIRIVEQGHEDLVLSDISPKGVWDKILEPVACVRKKSEMLQLFPAYLKGEDLFGLTVSAVARIAESLPGVEACENYTFRYGRNPLMELPLAVNPTGCARSEPKMSAHVKRFVLRPHTLNSTSTSKSFQSTVTGELNAPYSKQFVHSKSSQYRKMKTEWKSNVYLARSRIQGLGLYAARDIEKHTMVIEYIGTIIRNEVANRKEKLYESQNRGVYMFRMDNDHVIDATLTGGPARYINHSCAPNCVAEVVTFERGHKIIISSSRRIQKGEELCYDYKFDFEDDQHKIPCHCGAVNCRKWMN

SEQ ID NO: 35018 - protein, 1134 aa, Artificial Sequence
  Synthetic polypeptide
LATQSAVLGDPQHPHQQTLGAQMQGGFGCGNQLPKTDGGSETKKQRSKRTQRTGEKAAPRSKKRKKDEEEKQAMYSSTDTFTHLKQQLSLLPLMEPIIGVNFAHFLPYGSGQFNSGNRLLGTFGSATLEGVSDYYSQLIYKKMANGFATTEELAGKAGVLVSHEVTKTLGPKPFQLPFRPQDDLLARALAQGPKTVDVPASLPTPPHNNQEELRIQDHCGDRDTPDSFVPSSSPESVVGVEVSRYPDLSLVKEEPPEPVPSPIIPILPSTAGKSSESRRNDIKTEPGTLYFASPFGPSPNGPRSGLISVAITLHPTAAENISSVVAAFSDLLHVRIPNSYEVSSAPDVPSMGLVSSHRINPGLEYRQHLLLRGPPPGSANPPRLVSSYRLKQPNVPFPPTSNGLSGYKDSSHGIAESAALRPQWCCHCKVVILGSGVRKSFKDLTLLNKDSRESTKRVEKDIVFCSNNCFILYSSTAQAKNSENKESIPSLPQSPMRETPSKAFHQYSNNISTLDVHCLPQLPEKASPPASPPIAFPPAFEAAQVEAKPDELKVTVKLKPRLRAVHGGFEDCRPLNKKWRGMKWKKWSIHIVIPKGTFKPPCEDEIDEFLKKLGTSLKPDPVPKDYRKCCFCHEEGDGLTDGPARLLNLDLDLWVHLNCALWSTEVYETQAGALINVELALRRGLQMKCVFCHKTGATSGCHRFRCTNIYHFTCAIKAQCMFFKDKTMLCPMHKPKGIHEQELSYFAVFRRVYVQRDEVRQIASIVQRGERDHTFRVGSLIFHTIGQLLPQQMQAFHSPKALFPVGYEASRLYWSTRYANRRCRYLCSIEEKDGRPVFVIRIVEQGHEDLVLSDISPKGVWDKILEPVACVRKKSEMLQLFPAYLKGEDLFGLTVSAVARIAESLPGVEACENYTFRYGRNPLMELPLAVNPTGCARSEPKMSAHVKRPHTLNSTSTSKSFQSTVTGELNAPYSKQFVHSKSSQYRKMKTEWKSNVYLARSRIQGLGLYAARDIEKHTMVIEYIGTIIRNEVANRKEKLYESQNRGVYMFRMDNDHVIDATLTGGPARYINHSCAPNCVAEVVTFERGHKIIISSSRRIQKGEELCYDYKFDFEDDQHKIPCHCGAVNCRKWMN

SEQ ID NO: 35019 - protein, 104 aa, Artificial Sequence
  Synthetic polypeptide
KNENVVLSGGSTMFRDFGRRLQRDLKRVVDARLRLSEELSGGRIKPKPVEVQVVTHHMQRYAVWFGGSMLASTPEFFQVCHTKKDYEEYGPSICRHNPVFGVMS

SEQ ID NO: 35020 - protein, 27 aa, Artificial Sequence
  Synthetic polypeptide
LFKRMRMSYSQEAPPCSGISDADCRGI

SEQ ID NO: 35021 - protein, 328 aa, Artificial Sequence
  Synthetic polypeptide
QHGEKYQRQKLKWFKAVASEVNIMWAGHQTHHSSEDYNLSTALRQSVLQIYTSWIFYSPLALFIPPSVYAVHLQFNLLYQFWIHTEVINNLGPLELILNTPSHHRVHHGRNRYCIDKNYAGVLIIWDKIFGTFEAENEKVVYGLTHPINTFEPIKVQFHHLFSIWTTFWATPGFFNKFSVIFKGPGWGPGKPRLGLSEEIPEVTGKEVPFSSSSSQLLKIYTVVQFALMLAFYEETFADTAALSQVTLLLRVCFIILTLTSIGFLLDQRPKAAIMETLRCLMFLMLYRFGHLKPLVPSLSSAFEIVFSICIAFWGVRSMKQLTSHPWK

SEQ ID NO: 35022 - protein, 31 aa, Artificial Sequence
  Synthetic polypeptide
NGSKRLHLKLILCGPDTKHIIVLKTITYPQH

SEQ ID NO: 35023 - protein, 420 aa, Artificial Sequence
  Synthetic polypeptide
QQVPKESCFVQSHFVIMLMRKKIDSWPGAVSVRSLHVFPTSVWVFYRYFAFILRIKDVLIRFTGMSTWSCMSACGWVCECPVIGWHLVQGWFLPCALSCQDELQPPMILNWKVNIMWAGHQTHHSSEDYNLSTALRQSVLQIYTSWIFYSPLALFIPPSVYAVHLQFNLLYQFWIHTEVINNLGPLELILNTPSHHRVHHGRNRYCIDKNYAGVLIIWDKIFGTFEAENEKVVYGLTHPINTFEPIKVQFHHLFSIWTTFWATPGFFNKFSVIFKGPGWGPGKPRLGLSEEIPEVTGKEVPFSSSSSQLLKIYTVVQFALMLAFYEETFADTAALSQVTLLLRVCFIILTLTSIGFLLDQRPKAAIMETLRCLMFLMLYRFGHLKPLVPSLSSAFEIVFSICIAFWGVRSMKQLTSHPWK

SEQ ID NO: 35024 - protein, 25 aa, Artificial Sequence
  Synthetic polypeptide
TGKLILCGPDTKHIIVLKTITYPQH

SEQ ID NO: 35025 - protein, 11 aa, Artificial Sequence
  Synthetic polypeptide
APTTHDTELES

SEQ ID NO: 35026 - protein, 42 aa, Artificial Sequence
  Synthetic polypeptide
LTDSASASKIKWITEKTAPLRLVLTAGRPEFTDASSATESHS

SEQ ID NO: 35027 - protein, 50 aa, Artificial Sequence
  Synthetic polypeptide
LQEGLSLQMLPQQRKAIAKFKEPAHALAFQQKFHRHMIDLSHINVALIVE

SEQ ID NO: 35028 - protein, 55 aa, Artificial Sequence
  Synthetic polypeptide
LQEGLSLQMLPQQRKAIAKFKEPAHALAFQQKFHRELPAGAEPPGAQVSPGRCPA

SEQ ID NO: 35029 - protein, 47 aa, Artificial Sequence
  Synthetic polypeptide
SGFQSGVCAFPCIHKESLDLIYLATLEGLIGWEISILYYPTICFLLL

SEQ ID NO: 35030 - protein, 17 aa, Artificial Sequence
  Synthetic polypeptide
VVSKVEFVHFLAFIKNH

SEQ ID NO: 35031 - protein, 118 aa, Artificial Sequence
  Synthetic polypeptide
SGWAPSNQLPSWLEYKAGRKKKNVKRLDWPSLPAYIFLSCWMLPALGHCTPSSSVLKLRLALLAPQLSDGLLWDLVIIYVSFFLPFSTLFPTSSSQDTRENQMNKKMKMPSSTGFRCF

SEQ ID NO: 35032 - protein, 26 aa, Artificial Sequence
  Synthetic polypeptide
SYMFPSFCHSLRCFLLHHHKIQEKIR

SEQ ID NO: 35033 - protein, 515 aa, Artificial Sequence
  Synthetic polypeptide
PPSLHLSLMLDASCPRTLYSKFFSFETQTGSPCSSAFRRPIVGPCDHICFLLFAILYVVSYFIITRYKRKSDEQEDEDAIVNRISLFLSTFTLAVSAGAVLLLPFSIISNEILLSFPQNYYIQWLNGSLIHGLWNLASLFSNLCLFVLMPFAFFFLESEGFAGLKKGIRARILETLVMLLLLALLILGIVWVASALIDNDAASMESLYDLWEFYLPYLYSCISLMGCLLLLLCTPVGLSRMFTVMGQLLVKPTILEDLDEQIYIITLEEEALQRRLNGLSSSVEYNIMELEQELENVKTLKTKLERRKKASAWERNLVYPAVMVLLLIETSISVLLVACNILCLLVDETAMPKGTRGPGIGNASLSTFGFVGAALEIILIFYLMVSSVVGFYSLRFFGNFTPKKDDTTMTKIIGNCVSILVLSSALPVMSRTLGITRFDLLGDFGRFNWLGNFYIVLSYNLLFAIVTTLCLVRKFTSAVREELFKALGLHKLHLPNTSRDSETAKPSVNGHQKAL

SEQ ID NO: 35034 - protein, 556 aa, Artificial Sequence
  Synthetic polypeptide
PPSLHLSLMLDASCPRTLYSKFFSFETQTGSPCSSAFRRPIVGPCDHICFLLFAILYVVSYFIITRYKRKSDEQEDEDAIVNRISLFLSTFTLAVSAGAVLLLPFSIISNEILLSFPQNYYIQWLNGSLIHGLWNLASLFSNLCLFVLMPFAFFFLESEGFAGLKKGIRARILETLVMLLLLALLILGIVWVASALIDNDAASMESLYDLWEFYLPYLYSCISLMGCLLLLLCTPVGLSRMFTVMGQLLVKPTILEDLDEQIYIITLEEEALQRRLNVGMLCAGNPEVATGRQVPEEQAGQLLLGKWIQEGGDMIANPRLSSSVEYNIMELEQELENVKTLKTKLERRKKASAWERNLVYPAVMVLLLIETSISVLLVACNILCLLVDETAMPKGTRGPGIGNASLSTFGFVGAALEIILIFYLMVSSVVGFYSLRFFGNFTPKKDDTTMTKIIGNCVSILVLSSALPVMSRTLGITRFDLLGDFGRFNWLGNFYIVLSYNLLFAIVTTLCLVRKFTSAVREELFKALGLHKLHLPNTSRDSETAKPSVNGHQKAL

SEQ ID NO: 35035 - protein, 108 aa, Artificial Sequence
  Synthetic polypeptide
SGWAPSNQLPSWLEYKAGRKKKNVKRLDWPSLPAYIFLSCWMLPALGHCTPSSSVLKLRLALLAPQLSDGLLWDLVIIYVSFFLPFSTLFPTSSSQDTRENQDLLLSP

SEQ ID NO: 35036 - protein, 32 aa, Artificial Sequence
  Synthetic polypeptide
SYMFPSFCHSLRCFLLHHHKIQEKIRISFCPL

SEQ ID NO: 35037 - protein, 77 aa, Artificial Sequence
  Synthetic polypeptide
PPSLHLSLMLDASCPRTLYSKFFSFETQTGSPCSSAFRRPIVGPCDHICFLLFAILYVVSYFIITRYKRKSGSPSVP

SEQ ID NO: 35038 - protein, 133 aa, Artificial Sequence
  Synthetic polypeptide
SGWAPSNQLPSWLEYKAGRKKKNVKRLDWPSLPAYIFLSCWMLPALGHCTPSSSVLKLRLALLAPQLSDGLLWDLVIIYVSFFLPFSTLFPTSSSQDTRENQGIRARILETLVMLLLLALLILGIVWVASALI

SEQ ID NO: 35039 - protein, 32 aa, Artificial Sequence
  Synthetic polypeptide
SYMFPSFCHSLRCFLLHHHKIQEKIRESEPAF

SEQ ID NO: 35040 - protein, 102 aa, Artificial Sequence
  Synthetic polypeptide
PPSLHLSLMLDASCPRTLYSKFFSFETQTGSPCSSAFRRPIVGPCDHICFLLFAILYVVSYFIITRYKRKSGNPSPHFRDFGHASSSCVTHSWDSVGSFSTH

SEQ ID NO: 35041 - protein, 119 aa, Artificial Sequence
  Synthetic polypeptide
SGWAPSNQLPSWLEYKAGRKKKNVKRLDWPSLPAYIFLSCWMLPALGHCTPSSSVLKLRLALLAPQLSDGLLWDLVIIYVSFFLPFSTLFPTSSSQDTRENQMNKKMKMPSSTGFRMYF

SEQ ID NO: 35042 - protein, 88 aa, Artificial Sequence
  Synthetic polypeptide
PPSLHLSLMLDASCPRTLYSKFFSFETQTGSPCSSAFRRPIVGPCDHICFLLFAILYVVSYFIITRYKRKSDEQEDEDAIVNRISYVF

SEQ ID NO: 35043 - protein, 104 aa, Artificial Sequence
  Synthetic polypeptide
SGWAPSNQLPSWLEYKAGRKKKNVKRLDWPSLPAYIFLSCWMLPALGHCTPSSSVLKLRLALLAPQLSDGLLWDLVIIYVSFFLPFSTLFPTSSSQDTRENQAN

SEQ ID NO: 35044 - protein, 28 aa, Artificial Sequence
  Synthetic polypeptide
SYMFPSFCHSLRCFLLHHHKIQEKIRQM

SEQ ID NO: 35045 - protein, 73 aa, Artificial Sequence
  Synthetic polypeptide
PPSLHLSLMLDASCPRTLYSKFFSFETQTGSPCSSAFRRPIVGPCDHICFLLFAILYVVSYFIITRYKRKSGK

SEQ ID NO: 35046 - protein, 1046 aa, Artificial Sequence
  Synthetic polypeptide
GSMEERRRLKNAIIIQSFIRGYRDRKQQYSIQRSAFDRCATLSQSGGAFPIANGPNLTLLVRQLLFFYKQNEDSKRLIWLYQNLIKHSSLFVKQLDGSERLTCLFQIKRLMSLCCRLLQNCNDDSLNVALPMRMLEVFSSENTYLPVLQDASYVVSVIEQILHYMIHNGYYRSLYLLINSKLPSSIEYSDLSRVPIAKILLENVLKPLHFTYNSCPEGARQQVFTAFTEEFLAAPFTDQIFHFIIPALADAQTVFPYEPFLNALLLIESRCSRKSGGAPWLFYFVLTVGENYLGALSEEGLLVYLRVLQTFLSQLPVSPASASCHDSASDSEEESEEADKPSSPEDGRLSVSYITEECLKKLDTKQQTNTLLNLVWRDSASEEVFTTMASVCHTLMVQHRMMVPKVRLLYSLAFNARFLRHLWFLISSMSTRMITGSMVPLLQVISRGSPMSFEDSSRIIPLFYLFSSLFSHSLISIHDNEFFGDPIEVVGQRQSSMMPFTLEELIMLSRCLRDACLGIIKLAYPETKPEVREEYITAFQSIGVTTSSEMQQCIQMEQKRWIQLFKVITNLVKMLKSRDTRRNFCPPNHWLSEQEDIKADKVTQLYVPASRHVWRFRRMGRIGPLQSTLDVGLESPPLSVSEERQLAVLTELPFVVPFEERVKIFQRLIYADKQEVQGDGPFLDGINVTIRRNYIYEDAYDKLSPENEPDLKKRIRVHLLNAHGLDEAGIDGGGIFREFLNELLKSGFNPNQGFFKTTNEGLLYPNPAAQMLVGDSFARHYYFLGRMLGKALYENMLVELPFAGFFLSKLLGTSADVDIHHLASLDPEVYKNLLFLKSYEDDVEELGLNFTVVNNDLGEAQVVELKFGGKDIPVTSANRIAYIHLVADYRLNRQIRQHCLAFRQGLANVVSLEWLRMFDQQEIQVLISGAQVPISLEDLKSFTNYSGGYSADHPVIKVFWRVVEGFTDEEKRKLLKFVTSCSRPPLLGFKELYPAFCIHNGGSDLERLPTASTCMNLLKLPEFYDETLLRSKLLYAIECAAGFELS

SEQ ID NO: 35047 - protein, 8 aa, Artificial Sequence
  Synthetic polypeptide
VVWKKGEG

SEQ ID NO: 35048 - protein, 20 aa, Artificial Sequence
  Synthetic polypeptide
YGRKAKVEKCNNYPVIYSRL

SEQ ID NO: 35049 - protein, 950 aa, Artificial Sequence
  Synthetic polypeptide
WKKTPHQFKFSTPWKCFSDGVFGRCQKVPAMDFYRYEVSPVALQRLRVALQKLSGTGFTWQDDYTQYVMDQELADLPKTYLRRPEASSPARPSKHSVGSERRYSREGGAALANALRRHLPFLEALSQAPASDVLARTHTAQDRPPAEGDDRFSESILTYVAHTSALTYPPGSRTQLREDLLPRTLGQLQPDELSPKVDSGVDRHHLMAALSAYAAQRPPAPPGEGSLEPQYLLRAPSRMPRPLLAPAAPQKWPSPLGDSEDPSSTGDGARIHTLLKDLQRQPAEVRGLSGLELDGMAELMAGLMQGVDHGVARGSPGRAALGESGEQADGPKATLRGDSFPDDGVQDDDDRLYQEVHRLSATLGGLLQDHGSRLLPGALPFARPLDMERKKSEHPESSLSSEEETAGVENVKSQTYSKDLLGQQPHSEPGAAAFGELQNQMPGPSKEEQSLPAGAQEALSDGLQLEVQPSEEEARGYIVTDREVLGPAVTFKVSANVQNVTTEDVEKATVDNKDKLEETSGLKILQTGVGSKSKLKFLPPQAEQEDSTKFIALTLVSLACILGVLLASGLIYCLRHSSQHRLKEKLSGLGGDPGADATAAYQELCRQRMATRPPDRPEGPHTSRISSVSSQFSDGPIPSPSARSSASSWSEEPVQSNMDISTGHMILSYMEDHLKNKNRLEKEWEALCAYQAEPNSSFVAQREENVPKNRSLAVLTYDHSRVLLKAENSHSHSDYINASPIMDHDPRNPAYIATQGPLPATVADFWQMVWESGCVVIVMLTPLAENGVRQCYHYWPDEGSNLYHIYEVNLVSEHIWCEDFLVRSFYLKNLQTNETRTVTQFHFLSWYDRGVPSSSRSLLDFRRKVNKCYRGRSCPIIVHCSDGAGRSGTYVLIDMVLNKMAKGAKEIDIAATLEHLRDQRPGMVQTKEQFEFALTAVAEEVNAILKALPQ

SEQ ID NO: 35050 - protein, 85 aa, Artificial Sequence
  Synthetic polypeptide
IVSPETMETRSVMNLACDGRKHPINSSSLLPGNVSQMECLEGARRFRQWTFTATRCRPWPCSACAWRCRSFPAQVSRGRMTILSM

SEQ ID NO: 35051 - protein, 66 aa, Artificial Sequence
  Synthetic polypeptide
TSHVMEENTPSIQVLYSLEMFLRWSVWKVPEGSGNGLLPLRGVARGPAAPARGVAEAFRHRFHVAG

SEQ ID NO: 35052 - protein, 979 aa, Artificial Sequence
  Synthetic polypeptide
WKKTPHQFKFSTPWKCFSDGVFGRCQKVPAMDFYRYEVSPVALQRLRVALQKLSGTGFTWQDDYTQYVMDQELADLPKTYLRRPEASSPARPSKHSVGSERRYSREGGAALANALRRHLPFLEALSQAPASDVLARTHTAQDRPPAEGDDRFSESILTYVAHTSALTYPPGSRTQLREDLLPRTLGQLQPDELSPKVDSGVDRHHLMAALSAYAAQRPPAPPGEGSLEPQYLLRAPSRMPRPLLAPAAPQKWPSPLGDSEDPSSTGDGARIHTLLKDLQRQPAEVRGLSGLELDGMAELMAGLMQGVDHGVARGSPGRAALGESGEQADGPKATLRGDSFPDDGVQDDDDRLYQEVHRLSATLGGLLQDHGSRLLPGALPFARPLDMERKKSEHPESSLSSEEETAGVENVKSQTYSKDLLGQQPHSEPGAAAFGELQNQMPGPSKEEQSLPAGAQEALSDGLQLEVQPSEEEARGYIVTDRDPLRPEEGRRLVEDVARLLQVPSSAFADVEVLGPAVTFKVSANVQNVTTEDVEKATVDNKDKLEETSGLKILQTGVGSKSKLKFLPPQAEQEDSTKFIALTLVSLACILGVLLASGLIYCLRHSSQHRLKEKLSGLGGDPGADATAAYQELCRQRMATRPPDRPEGPHTSRISSVSSQFSDGPIPSPSARSSASSWSEEPVQSNMDISTGHMILSYMEDHLKNKNRLEKEWEALCAYQAEPNSSFVAQREENVPKNRSLAVLTYDHSRVLLKAENSHSHSDYINASPIMDHDPRNPAYIATQGPLPATVADFWQMVWESGCVVIVMLTPLAENGVRQCYHYWPDEGSNLYHIYEVNLVSEHIWCEDFLVRSFYLKNLQTNETRTVTQFHFLSWYDRGVPSSSRSLLDFRRKVNKCYRGRSCPIIVHCSDGAGRSGTYVLIDMVLNKMAKGAKEIDIAATLEHLRDQRPGMVQTKEQFEFALTAVAEEVNAILKALPQ

SEQ ID NO: 35053 - protein, 26 aa, Artificial Sequence
  Synthetic polypeptide
SQHFGRPRQEDCLRPGVRGQPRQHGF

SEQ ID NO: 35054 - protein, 129 aa, Artificial Sequence
  Synthetic polypeptide
GQEFEANLGNMVSDVEELTPPEHLSDLPPFSRCLIGIIIKSSNVVRSFLDELKACVASNDIEGIVCLTAAVHIILVINAGKHKSSKVREVAATVHRKLKTFMEITLEEDSIERFLYESSSRTLGELLNS

SEQ ID NO: 35055 - protein, 6 aa, Artificial Sequence
  Synthetic polypeptide
ATWFLT

SEQ ID NO: 35056 - protein, 142 aa, Artificial Sequence
  Synthetic polypeptide
GQEFEANLGNMVSDVEELTPPEHLSDLPPFSRCLIGIIIKSSNVVRSFLDELKACVASNDIEGIVCLTAAVHIILVINAGKHKSSKVREVAATVHRKLKTFMEITLEEDSIERYEDLLCCPGWALTPGLLDSIYPSASVPIG

SEQ ID NO: 35057 - protein, 131 aa, Artificial Sequence
  Synthetic polypeptide
VIMTETIATLPTKVSDVEELTPPEHLSDLPPFSRCLIGIIIKSSNVVRSFLDELKACVASNDIEGIVCLTAAVHIILVINAGKHKSSKVREVAATVHRKLKTFMEITLEEDSIERFLYESSSRTLGELLNS

SEQ ID NO: 35058 - protein, 13 aa, Artificial Sequence
  Synthetic polypeptide
QRPLQLCPQRFLT

SEQ ID NO: 35059 - protein, 51 aa, Artificial Sequence
  Synthetic polypeptide
PVSHIWLTICFLSVKSYWNIAVPICRVFSGYFCAELSNYDRDHCNSAHKGF

SEQ ID NO: 35060 - protein, 144 aa, Artificial Sequence
  Synthetic polypeptide
VIMTETIATLPTKVSDVEELTPPEHLSDLPPFSRCLIGIIIKSSNVVRSFLDELKACVASNDIEGIVCLTAAVHIILVINAGKHKSSKVREVAATVHRKLKTFMEITLEEDSIERYEDLLCCPGWALTPGLLDSIYPSASVPIG

SEQ ID NO: 35061 - protein, 7 aa, Artificial Sequence
  Synthetic polypeptide
AEMCSVV

SEQ ID NO: 35062 - protein, 51 aa, Artificial Sequence
  Synthetic polypeptide
APGLWLFELRCALWCDFHAEKPGGGRCGQELLHFVGLPLLLGAGGAHSGAC

SEQ ID NO: 35063 - protein, 412 aa, Artificial Sequence
  Synthetic polypeptide
DVLCGVISTLRSREEGAVDKSYCTLLDCLCSWGQVGHILELVDNWLPTEHAQAKSNTASKGRVQIHDTRPVKPELALVYIEYLLTHPKNRECLLSAPRKKLNHLLKALETSKADLESLLQTPGGKPRGFSEAAAPRAFGLHCRLSIHLQHKFCSEGKVYLSMLEDTGFWLESKILSFIQDQEEDYLKLHRVIYQQIIQTYLTVCKDVVMVGLGDHQFQMQLLQRSLGIMQTVKGFFYVSLLLDILKEITGSSLIQKTDSDEEVAMLLDTVQKVFQKMLECIARSFRKQPEEGLRVSDVEELTPPEHLSDLPPFSRCLIGIIIKSSNVVRSFLDELKACVASNDIEGIVCLTAAVHIILVINAGKHKSSKVREVAATVHRKLKTFMEITLEEDSIERFLYESSSRTLGELLNS

SEQ ID NO: 35064 - protein, 459 aa, Artificial Sequence
  Synthetic polypeptide
DVLCGVISTLRSREEGAVDKSYCTLLDCLCSWGQVGHILELVDNWLPTEHAQAKSNTASKGRVQIHDTRPVKPELALVYIEYLLTHPKNRECLLSAPRKKLNHLLKALETSKADLESLLQTPGGKPRGFSEAAAPRAFGLHCRLSIHLQHKFCSEGKVYLSMLEDTGFWLESKILSFIQDQEEDYLKLHRVIYQQIIQTYLTVCKDVVMVGLGDHQFQMQLLQRSLGIMQTVKGFFYVSLLLDILKEITGSSLIQKTDSDEEVAMLLDTVQKVFQKMLECIARSFRKQPEEGLRLLYSVQRPLHEFITAVQSRHTDTPVHRGVLSTLIAGPVVEISHQLRKVSDVEELTPPEHLSDLPPFSRCLIGIIIKSSNVVRSFLDELKACVASNDIEGIVCLTAAVHIILVINAGKHKSSKVREVAATVHRKLKTFMEITLEEDSIERFLYESSSRTLGELLNS

SEQ ID NO: 35065 - protein, 472 aa, Artificial Sequence
  Synthetic polypeptide
DVLCGVISTLRSREEGAVDKSYCTLLDCLCSWGQVGHILELVDNWLPTEHAQAKSNTASKGRVQIHDTRPVKPELALVYIEYLLTHPKNRECLLSAPRKKLNHLLKALETSKADLESLLQTPGGKPRGFSEAAAPRAFGLHCRLSIHLQHKFCSEGKVYLSMLEDTGFWLESKILSFIQDQEEDYLKLHRVIYQQIIQTYLTVCKDVVMVGLGDHQFQMQLLQRSLGIMQTVKGFFYVSLLLDILKEITGSSLIQKTDSDEEVAMLLDTVQKVFQKMLECIARSFRKQPEEGLRLLYSVQRPLHEFITAVQSRHTDTPVHRGVLSTLIAGPVVEISHQLRKVSDVEELTPPEHLSDLPPFSRCLIGIIIKSSNVVRSFLDELKACVASNDIEGIVCLTAAVHIILVINAGKHKSSKVREVAATVHRKLKTFMEITLEEDSIERYEDLLCCPGWALTPGLLDSIYPSASVPIG

SEQ ID NO: 35066 - protein, 730 aa, Artificial Sequence
  Synthetic polypeptide
WLTPVVPALWEAEAGRSRGQEIETILANKCLPMILDNKLSHPLLEQLLPALRYSLHDNSEKVRVAFVDMLLKIKAVRAAKFWKICPMEHILVRLETDSRPVSRRLVSLIFNSFLPVNQPEEVWCERCVTLVQMNHAAARRFYQYAHEHTACTNIAKLIHVIRHCLNACIQRAVREPPEDEEEEDGREKENVTVLDKTLSVNDVACMAGLLEIIVILWKSIDRSMENNKEAKLYTINKFASVLPEYLKVFKDDRCKIPLFMLMSFMPASAVPPFSCGVISTLRSREEGAVDKSYCTLLDCLCSWGQVGHILELVDNWLPTEHAQAKSNTASKGRVQIHDTRPVKPELALVYIEYLLTHPKNRECLLSAPRKKLNHLLKALETSKADLESLLQTPGGKPRGFSEAAAPRAFGLHCRLSIHLQHKFCSEGKVYLSMLEDTGFWLESKILSFIQDQEEDYLKLHRVIYQQIIQTYLTVCKDVVMVGLGDHQFQMQLLQRSLGIMQTVKGFFYVSLLLDILKEITGSSLIQKTDSDEEVAMLLDTVQKVFQKMLECIARSFRKQPEEGLRLLYSVQRPLHEFITAVQSRHTDTPVHRGVLSTLIAGPVVEISHQLRKVSDVEELTPPEHLSDLPPFSRCLIGIIIKSSNVVRSFLDELKACVASNDIEGIVCLTAAVHIILVINAGKHKSSKVREVAATVHRKLKTFMEITLEEDSIERFLYESSSRTLGELLNS

SEQ ID NO: 35067 - protein, 27 aa, Artificial Sequence
  Synthetic polypeptide
SQHFGRPRRADHEVRRSRPSWLTSVCQ

SEQ ID NO: 35068 - protein, 51 aa, Artificial Sequence
  Synthetic polypeptide
QVSANDFGQQTEPPIVRAAPSSSQIQSPRQFGESEGSFCGHAVEDQSCEGC

SEQ ID NO: 35069 - protein, 683 aa, Artificial Sequence
  Synthetic polypeptide
WLTPVVPALWEAEAGRSRGQEIETILANKCLPMILDNKLSHPLLEQLLPALRYSLHDNSEKVRVAFVDMLLKIKAVRAAKFWKICPMEHILVRLETDSRPVSRRLVSLIFNSFLPVNQPEEVWCERCVTLVQMNHAAARRFYQYAHEHTACTNIAKLIHVIRHCLNACIQRAVREPPEDEEEEDGREKENVTVLDKTLSVNDVACMAGLLEIIVILWKSIDRSMENNKEAKLYTINKFASVLPEYLKVFKDDRCKIPLFMLMSFMPASAVPPFSCGVISTLRSREEGAVDKSYCTLLDCLCSWGQVGHILELVDNWLPTEHAQAKSNTASKGRVQIHDTRPVKPELALVYIEYLLTHPKNRECLLSAPRKKLNHLLKALETSKADLESLLQTPGGKPRGFSEAAAPRAFGLHCRLSIHLQHKFCSEGKVYLSMLEDTGFWLESKILSFIQDQEEDYLKLHRVIYQQIIQTYLTVCKDVVMVGLGDHQFQMQLLQRSLGIMQTVKGFFYVSLLLDILKEITGSSLIQKTDSDEEVAMLLDTVQKVFQKMLECIARSFRKQPEEGLRVSDVEELTPPEHLSDLPPFSRCLIGIIIKSSNVVRSFLDELKACVASNDIEGIVCLTAAVHIILVINAGKHKSSKVREVAATVHRKLKTFMEITLEEDSIERFLYESSSRTLGELLNS

SEQ ID NO: 35070 - protein, 743 aa, Artificial Sequence
  Synthetic polypeptide
WLTPVVPALWEAEAGRSRGQEIETILANKCLPMILDNKLSHPLLEQLLPALRYSLHDNSEKVRVAFVDMLLKIKAVRAAKFWKICPMEHILVRLETDSRPVSRRLVSLIFNSFLPVNQPEEVWCERCVTLVQMNHAAARRFYQYAHEHTACTNIAKLIHVIRHCLNACIQRAVREPPEDEEEEDGREKENVTVLDKTLSVNDVACMAGLLEIIVILWKSIDRSMENNKEAKLYTINKFASVLPEYLKVFKDDRCKIPLFMLMSFMPASAVPPFSCGVISTLRSREEGAVDKSYCTLLDCLCSWGQVGHILELVDNWLPTEHAQAKSNTASKGRVQIHDTRPVKPELALVYIEYLLTHPKNRECLLSAPRKKLNHLLKALETSKADLESLLQTPGGKPRGFSEAAAPRAFGLHCRLSIHLQHKFCSEGKVYLSMLEDTGFWLESKILSFIQDQEEDYLKLHRVIYQQIIQTYLTVCKDVVMVGLGDHQFQMQLLQRSLGIMQTVKGFFYVSLLLDILKEITGSSLIQKTDSDEEVAMLLDTVQKVFQKMLECIARSFRKQPEEGLRLLYSVQRPLHEFITAVQSRHTDTPVHRGVLSTLIAGPVVEISHQLRKVSDVEELTPPEHLSDLPPFSRCLIGIIIKSSNVVRSFLDELKACVASNDIEGIVCLTAAVHIILVINAGKHKSSKVREVAATVHRKLKTFMEITLEEDSIERYEDLLCCPGWALTPGLLDSIYPSASVPIG

SEQ ID NO: 35071 - protein, 383 aa, Artificial Sequence
  Synthetic polypeptide
GSGLQKVWQLLLPLGARGCHKEASDPFSLNELLDELSRKQKEELWQRLKNLLTDVLLESPVDGWQVVEAQGEDNMETEHGSKMRKSIEIIYAITSVILASVSVINESENYEALLECVIILNGILYALPESERKLQSSIQDLCVTWWEKGLPAKEDTGKTAFVMLLRRSLETKTGADVCRLWRIHQALYCFDYDLEESGEIKDMLLECFININYIKKEEGRRFLSCLFNWNINFIKMIHGTIKNQLQGLQKSLMVYIAEIYFRAWKKASGKILEAIENDCIQDFMFHGIHLPRRSPVHSKVREVLSYFHHQKKVRQGVEEMLYRLYKPILWRGLKARNSEVRSNAALLFVEAFPIRDPNLHAIEMDSEIQKQFEELYGSLVFVK

SEQ ID NO: 35072 - protein, 49 aa, Artificial Sequence
  Synthetic polypeptide
PMSSPLESGLGLCCFDGRNIEEVAFRKFGSFYFLSEPVVVIKRPLILSA

SEQ ID NO: 35073 - protein, 1137 aa, Artificial Sequence
  Synthetic polypeptide
GSGLQKVWQLLLPLGARGCHKEASDPFSLNELLDELSRKQKEELWQRLKNLLTDVLLESPVDGWQVVEAQGEDNMETEHGSKMRKSIEIIYAITSVILASVSVINESENYEALLECVIILNGILYALPESERKLQSSIQDLCVTWWEKGLPAKEDTGKTAFVMLLRRSLETKTGADVCRLWRIHQALYCFDYDLEESGEIKDMLLECFININYIKKEEGRRFLSCLFNWNINFIKMIHGTIKNQLQGLQKSLMVYIAEIYFRAWKKASGKILEAIENDCIQDFMFHGIHLPRRSPVHSKVREVLSYFHHQKKVRQGVEEMLYRLYKPILWRGLKARNSEVRSNAALLFVEAFPIRDPNLHAIEMDSEIQKQFEELYSLLEDPYPMVRSTGILGVCKITSKYWEMMPPTILIDLLKKVTGELAFDTSSADVRCSVFKCLPMILDNKLSHPLLEQLLPALRYSLHDNSEKVRVAFVDMLLKIKAVRAAKFWKICPMEHILVRLETDSRPVSRRLVSLIFNSFLPVNQPEEVWCERCVTLVQMNHAAARRFYQYAHEHTACTNIAKLIHVIRHCLNACIQRAVREPPEDEEEEDGREKENVTVLDKTLSVNDVACMAGLLEIIVILWKSIDRSMENNKEAKLYTINKFASVLPEYLKVFKDDRCKIPLFMLMSFMPASAVPPFSCGVISTLRSREEGAVDKSYCTLLDCLCSWGQVGHILELVDNWLPTEHAQAKSNTASKGRVQIHDTRPVKPELALVYIEYLLTHPKNRECLLSAPRKKLNHLLKALETSKADLESLLQTPGGKPRGFSEAAAPRAFGLHCRLSIHLQHKFCSEGKVYLSMLEDTGFWLESKILSFIQDQEEDYLKLHRVIYQQIIQTYLTVCKDVVMVGLGDHQFQMQLLQRSLGIMQTVKGFFYVSLLLDILKEITGSSLIQKTDSDEEVAMLLDTVQKVFQKMLECIARSFRKQPEEGLRLLYSVQRPLHEFITAVQSRHTDTPVHRGVLSTLIAGPVVEISHQLRKVSDVEELTPPEHLSDLPPFSRCLIGIIIKSSNVVRSFLDELKACVASNDIEGIVCLTAAVHIILVINAGKHKSSKVREVAATVHRKLKTFMEITLEEDSIERFLYESSSRTLGELLNS

SEQ ID NO: 35074 - protein, 1150 aa, Artificial Sequence
  Synthetic polypeptide
GSGLQKVWQLLLPLGARGCHKEASDPFSLNELLDELSRKQKEELWQRLKNLLTDVLLESPVDGWQVVEAQGEDNMETEHGSKMRKSIEIIYAITSVILASVSVINESENYEALLECVIILNGILYALPESERKLQSSIQDLCVTWWEKGLPAKEDTGKTAFVMLLRRSLETKTGADVCRLWRIHQALYCFDYDLEESGEIKDMLLECFININYIKKEEGRRFLSCLFNWNINFIKMIHGTIKNQLQGLQKSLMVYIAEIYFRAWKKASGKILEAIENDCIQDFMFHGIHLPRRSPVHSKVREVLSYFHHQKKVRQGVEEMLYRLYKPILWRGLKARNSEVRSNAALLFVEAFPIRDPNLHAIEMDSEIQKQFEELYSLLEDPYPMVRSTGILGVCKITSKYWEMMPPTILIDLLKKVTGELAFDTSSADVRCSVFKCLPMILDNKLSHPLLEQLLPALRYSLHDNSEKVRVAFVDMLLKIKAVRAAKFWKICPMEHILVRLETDSRPVSRRLVSLIFNSFLPVNQPEEVWCERCVTLVQMNHAAARRFYQYAHEHTACTNIAKLIHVIRHCLNACIQRAVREPPEDEEEEDGREKENVTVLDKTLSVNDVACMAGLLEIIVILWKSIDRSMENNKEAKLYTINKFASVLPEYLKVFKDDRCKIPLFMLMSFMPASAVPPFSCGVISTLRSREEGAVDKSYCTLLDCLCSWGQVGHILELVDNWLPTEHAQAKSNTASKGRVQIHDTRPVKPELALVYIEYLLTHPKNRECLLSAPRKKLNHLLKALETSKADLESLLQTPGGKPRGFSEAAAPRAFGLHCRLSIHLQHKFCSEGKVYLSMLEDTGFWLESKILSFIQDQEEDYLKLHRVIYQQIIQTYLTVCKDVVMVGLGDHQFQMQLLQRSLGIMQTVKGFFYVSLLLDILKEITGSSLIQKTDSDEEVAMLLDTVQKVFQKMLECIARSFRKQPEEGLRLLYSVQRPLHEFITAVQSRHTDTPVHRGVLSTLIAGPVVEISHQLRKVSDVEELTPPEHLSDLPPFSRCLIGIIIKSSNVVRSFLDELKACVASNDIEGIVCLTAAVHIILVINAGKHKSSKVREVAATVHRKLKTFMEITLEEDSIERYEDLLCCPGWALTPGLLDSIYPSASVPIG

SEQ ID NO: 35075 - protein, 686 aa, Artificial Sequence
  Synthetic polypeptide
KHGTPAPGRHMLDLEDLMLKETSQTQRDSVCIIALVFVGNCEIDLEIKRYFCRAGVKSIQIHGTMRVILEPLIGDMPLVGALSIFFLRKPLLEINWTGLTNLLDVPGLNGLSDTIILDIISNYLVLPNRITVPLVSEVQIAQLRFPVPKGVLRIHFIEAQDLQGKDTYLKGLVKGKSDPYGIIRVGNQIFQSRVIKENLSPKWNEVYEALVYEHPGQELEIELFDEDPDKDDFLGSLMIDLIEVEKERLLDEWFTLDEVPKGKLHLRLEWLTLMPNASNLDKVLTDIKADKDQANDGLSSALLILYLDSARNLPSGKKISSNPNPVVQMSVGHKAQESKIRYKTNEPVWEENFTFFIHNPKRQDLEVEVRDEQHQCSLGNLKVPLSQLLTSEDMTVSQRFQLSNSGPNSTIKMKIALRVLHLEKRERPPDHQHSAQVKRPSVSKEGRKTSIKSHMSGSPGPGGSNTAPSTPVIGGSDKPGMEEKAQPPEAGPQGLHDLGRSSSSLLASPGHISVKEPTPSIASDISLPIATQELRQRLRQLENGTTLGQSPLGQIQLTIRHSSQRNKLIVVVHACRNLIAFSEDGSDPYVRMYLLPDKRRSGRRKTHVSKKTLNPVFDQSFDFSVSLPEVQRRTLDVAVKNSGGFLSKDKGLLGKVLVALASEELAKGWTQWYDLTEDGTRPQAMT

SEQ ID NO: 35076 - protein, 5 aa, Artificial Sequence
  Synthetic polypeptide
LHLFL

SEQ ID NO: 35077 - protein, 26 aa, Artificial Sequence
  Synthetic polypeptide
GPYAEGNKPDTKGQRLHNCTCFCRKL

SEQ ID NO: 35078 - protein, 707 aa, Artificial Sequence
  Synthetic polypeptide
KHGTPAPGRHMLDLEDLMLKETSQTQRDSVCIIALVFVGNCEIDLEIKRYFCRAGVKSIQIHGTMRVILEPLIGDMPLVGALSIFFLRKPLLEINWTGLTNLLDVPGLNGLSDTIILDIISNYLVLPNRITVPLVSEVQIAQLRFPVPKGVLRIHFIEAQDLQGKDTYLKGLVKGKSDPYGIIRVGNQIFQSRVIKENLSPKWNEVYEALVYEHPGQELEIELFDEDPDKDDFLGSLMIDLIEVEKERLLDEWFTLDEVPKGKLHLRLEWLTLMPNASNLDKVLTDIKADKDQANDGLSSALLILYLDSARNLPSNPLEFNPDVLKKTAVQRALKSGKKISSNPNPVVQMSVGHKAQESKIRYKTNEPVWEENFTFFIHNPKRQDLEVEVRDEQHQCSLGNLKVPLSQLLTSEDMTVSQRFQLSNSGPNSTIKMKIALRVLHLEKRERPPDHQHSAQVKRPSVSKEGRKTSIKSHMSGSPGPGGSNTAPSTPVIGGSDKPGMEEKAQPPEAGPQGLHDLGRSSSSLLASPGHISVKEPTPSIASDISLPIATQELRQRLRQLENGTTLGQSPLGQIQLTIRHSSQRNKLIVVVHACRNLIAFSEDGSDPYVRMYLLPDKRRSGRRKTHVSKKTLNPVFDQSFDFSVSLPEVQRRTLDVAVKNSGGFLSKDKGLLGKVLVALASEELAKGWTQWYDLTEDGTRPQAMT

SEQ ID NO: 35079 - protein, 913 aa, Artificial Sequence
  Synthetic polypeptide
PRLLEECSVLVSKVRSEEKDEDSERGDEDRERRYRERKLQYGDSKDNPLKYWLYKEEGERRHRKPREPDRDNKHREKSSTREKREKYSKEKSNSFSDKGEERHKEKRHKEGFHFDDERHQSNVDRKEKSAKDEPRKRESQNGEHRNRGASSKRDGTSSQHAENLVRNHGKDKDSRRKHGHEEGSSVWWKLDQRPGGEETVEIEKEETDLENARADAYTASCEDDFEDYEDDFEVCDGDDDESSNEPESREKLEELPLAQKKEIQEIQRAINAENERIGELSLKLFQKRGRTEFEKEPRTDTNSSPSRASVCGIFVDFASASHRQKSRTQALKQKMRSTKLLRLIDLDFSFTFSLLDLPPVNEYDMYIRNFGKKNTKQAYVQCNEDNVERDIQTEEIETREVWTQHPGESTVVSGGSEQRDTSDAVVMPKIDTPRLCSFLRAACQVMAVLLEEDRLAAEPSWNLRAQDRALYFSDSSSQLNTSLPFLQNRKVSSLHTSRVQRQMVVSVHDLPEKSFVPLLDSKYVLCVWDIWQPSGPQKVLICESQVTCCCLSPLKAFLLFAGTAHGSVVVWDLREDSRLHYSVTLSDGFWTFRTATFSTDGILTSVNHRSPLQAVEPISTSVHKKQSFVLSPFSTQEEMSGLSFHIASLDESGVLNVWVVVELPKADIAGSISDLGLMPGGRVKLVHSALIQLGDSLSHKGNEFWGTTQTLNVKFLPSDPNHFIIGTDMGLISHGTRQDLRVAPKLFKPQQHGIRPVKVNVIDFSPFGEPIFLAGCSDGSIRLHQLSSAFPLLQWDSSTDSHAVTGLQWSPTRPAVFLVQDDTSNIYIWDLLQSDLGPVAKQQVSPNRLVAMAAVGEPEKAGGSFLALVLARASGSIDIQHLKRRWAAPEVDECNRLRLLLQEALWPEGKLHK

SEQ ID NO: 35080 - protein, 13 aa, Artificial Sequence
  Synthetic polypeptide
VTQTPRRVLSACK

SEQ ID NO: 35081 - protein, 28 aa, Artificial Sequence
  Synthetic polypeptide
RCLLRTPLSPHLAECLAHTRKLKRKKLI

SEQ ID NO: 35082 - protein, 27 aa, Artificial Sequence
  Synthetic polypeptide
ALHRSDGVCCVLHCLLTWLSAWPTLGN

SEQ ID NO: 35083 - protein, 755 aa, Artificial Sequence
  Synthetic polypeptide
DLMGLSGVSAFASSSFSLPATTFKKCLLPPAMILRPPQPCGTEIEKEETDLENARADAYTASCEDDFEDYEDDFEVCDGDDDESSNEPESREKLEELPLAQKKEIQEIQRAINAENERIGELSLKLFQKRGRTEFEKEPRTDTNSSPSRASVCGIFVDFASASHRQKSRTQALKQKMRSTKLLRLIDLDFSFTFSLLDLPPVNEYDMYIRNFGKKNTKQAYVQCNEDNVERDIQTEEIETREVWTQHPGESTVVSGGSEQRDTSDAVVMPKIDTPRLCSFLRAACQVMAVLLEEDRLAAEPSWNLRAQDRALYFSDSSSQLNTSLPFLQNRKVSSLHTSRVQRQMVVSVHDLPEKSFVPLLDSKYVLCVWDIWQPSGPQKVLICESQVTCCCLSPLKAFLLFAGTAHGSVVVWDLREDSRLHYSVTLSDGFWTFRTATFSTDGILTSVNHRSPLQAVEPISTSVHKKQSFVLSPFSTQEEMSGLSFHIASLDESGVLNVWVVVELPKADIAGSISDLGLMPGGRVKLVHSALIQLGDSLSHKGNEFWGTTQTLNVKFLPSDPNHFIIGTDMGLISHGTRQDLRVAPKLFKPQQHGIRPVKVNVIDFSPFGEPIFLAGCSDGSIRLHQLSSAFPLLQWDSSTDSHAVTGLQWSPTRPAVFLVQDDTSNIYIWDLLQSDLGPVAKQQVSPNRLVAMAAVGEPEKAGGSFLALVLARASGSIDIQHLKRRWAAPEVDECNRLRLLLQEALWPEGKLHK

SEQ ID NO: 35084 - protein, 16 aa, Artificial Sequence
  Synthetic polypeptide
GLPSHVELKLKRKKLI

SEQ ID NO: 35085 - protein, 434 aa, Artificial Sequence
  Synthetic polypeptide
DLMGLSGVSAFASSSFSLPATTFKKCLLPPAMILRPPQPCGTEIEKEETDLENARADAYTASCEDDFEDYEDDFEVCDGDDDESSNEPESREKLEELPLAQKKEIQEIQRAINAENERIGELSLKLFQKRGRTEFEKEPRTDTNSSPSRASVCGIFVDFASASHRQKSRTQALKQKMRSTKLLRLIDLDFSFTFSLLDLPPVNEYDMYIRNFGKKNTKQAYVQCNEDNVERDIQTEEIETREVWTQHPGESTVVSGGSEQRDTSDAVVMPKIDTPRLCSFLRAACQVMAVLLEEDRLAAEPSWNLRAQDRALYFSDSSSQLNTSLPFLQSHVLLLEPFESIFTVCRNSARLSCRLGFERRLKAALLCDAERWLLDVPDRHVFHRWNPYLSKPPKPSSSSRTYLNVRPQKAELCAFTLFYSRRNVRFVLPHRFLG

SEQ ID NO: 35086 - protein, 32 aa, Artificial Sequence
  Synthetic polypeptide
REFFNLKEKKIHAKTKNLSRPAVRTEASGCTS

SEQ ID NO: 35087 - protein, 96 aa, Artificial Sequence
  Synthetic polypeptide
KKKKYTQKQKTYQGRLFGRKHQAAPAELRVSAPAVGQQHGQPCGHRPAVVPNQACRVPGAGRHIQHLHLGPPPERSGSCRQTAGLPQQAGGHGCGG

SEQ ID NO: 35088 - protein, 161 aa, Artificial Sequence
  Synthetic polypeptide
LKGVLQPERKKNTRKNKKLIKAGCSDGSIRLHQLSSAFPLLQWDSSTDSHAVTGLQWSPTRPAVFLVQDDTSNIYIWDLLQSDLGPVAKQQVSPNRLVAMAAVGEPEKAGGSFLALVLARASGSIDIQHLKRRWAAPEVDECNRLRLLLQEALWPEGKLHK

SEQ ID NO: 35089 - protein, 92 aa, Artificial Sequence
  Synthetic polypeptide
DLISTNDIKGRLFGRKHQAAPAELRVSAPAVGQQHGQPCGHRPAVVPNQACRVPGAGRHIQHLHLGPPPERSGSCRQTAGLPQQAGGHGCGG

SEQ ID NO: 35090 - protein, 141 aa, Artificial Sequence
  Synthetic polypeptide
KAGCSDGSIRLHQLSSAFPLLQWDSSTDSHAVTGLQWSPTRPAVFLVQDDTSNIYIWDLLQSDLGPVAKQQVSPNRLVAMAAVGEPEKAGGSFLALVLARASGSIDIQHLKRRWAAPEVDECNRLRLLLQEALWPEGKLHK

SEQ ID NO: 35091 - protein, 34 aa, Artificial Sequence
  Synthetic polypeptide
GQEFETSLGNIVRPHLYERYKRPAVRTEASGCTS

SEQ ID NO: 35092 - protein, 23 aa, Artificial Sequence
  Synthetic polypeptide
GLPSHMELENFPRDLCSYGYRRR

SEQ ID NO: 35093 - protein, 35 aa, Artificial Sequence
  Synthetic polypeptide
ADACLLSCEMCLSPSAMIVRPPQPHGTREFPKRFV

SEQ ID NO: 35094 - protein, 31 aa, Artificial Sequence
  Synthetic polypeptide
NFPAIRWAAAQIWRGVVTMTWNLELSVCNWP

SEQ ID NO: 35095 - protein, 33 aa, Artificial Sequence
  Synthetic polypeptide
HSLGLLTTHQLWPTSSHETSLPSGGLQLRYGEV

SEQ ID NO: 35096 - protein, 249 aa, Artificial Sequence
  Synthetic polypeptide
PRTNSGPPQAMKLPCHPVGCSSDMERCSDYDLEFGTECLQLALKYCCTKAKLVEGSPDLWKVTYKRDLYAAESIIKERISQEICVVMDTEEDNKHVGHLLEEVLKSELNHVKVTSEALGHAGRHLQQIILDQCYNFVCVNVTTSDFQETQKLLSMLEESSLCILYPVVVVSVHFLDFKLVPPSQKMENLMQIREFAKEVKERNILLYGLLISYPQDDQKLQESLRQGAIIIASLIKERNSGLIGQLLIA

SEQ ID NO: 35097 - protein, 29 aa, Artificial Sequence
  Synthetic polypeptide
TSMLDKGHCCGSNWREHGSNEKYYSEVSA

SEQ ID NO: 35098 - protein, 323 aa, Artificial Sequence
  Synthetic polypeptide
GLPSHAELVCWIKDIVVAVTGENMEVMKSIIQKYQHKRISLVEAGVTRHRSIFNGLKALAEDQINSKLSKPEVVIIHDAVRPFVEEGVLLKVVTAAKEHGCSDYDLEFGTECLQLALKYCCTKAKLVEGSPDLWKVTYKRDLYAAESIIKERISQEICVVMDTEEDNKHVGHLLEEVLKSELNHVKVTSEALGHAGRHLQQIILDQCYNFVCVNVTTSDFQETQKLLSMLEESSLCILYPVVVVSVHFLDFKLVPPSQKMENLMQIREFAKEVKERNILLYGLLISYPQDDQKLQESLRQGAIIIASLIKERNSGLIGQLLIA

SEQ ID NO: 35099 - protein, 373 aa, Artificial Sequence
  Synthetic polypeptide
GLPSHAELVCWIKDIVVAVTGENMEVMKSIIQKYQHKRISLVEAGVTRHRSIFNGLKALAEDQINSKLSKPEVVIIHDAVRPFVEEGVLLKVVTAAKEHGAAGAIRPLVSTVVSPSADGCLDYSLERARHRASEMPQAFLFDVIYEAYQQCSDYDLEFGTECLQLALKYCCTKAKLVEGSPDLWKVTYKRDLYAAESIIKERISQEICVVMDTEEDNKHVGHLLEEVLKSELNHVKVTSEALGHAGRHLQQIILDQCYNFVCVNVTTSDFQETQKLLSMLEESSLCILYPVVVVSVHFLDFKLVPPSQKMENLMQIREFAKEVKERNILLYGLLISYPQDDQKLQESLRQGAIIIASLIKERNSGLIGQLLIA

SEQ ID NO: 35100 - protein, 423 aa, Artificial Sequence
  Synthetic polypeptide
LMGKCTVQEAGTLLSSKNVRVNCLDENGMTPLMHAAYKGKLDMCKLLLRHGADVNCHQHEHGYTALMFAALSGNKDITWVMLEAGAETDVVNSVGRTAAQMAAFVGQHDCVTIINNFFPRERLDYYTKPQGLDKEPKLPPKLAGPLHKIITTTNLHPVKIVMLVNENPLLTEEAALNKCYRVMDLICEKCMKQRDMNEVLAMKMHYISCIFQKCINFLKDGENKLDTLIKSLLKGRASDGFPVYQEKIIRESIRKFPYCEATLLQQLVRSIAPVEIGSDPTAFSVLTQAITGQVGFVDVEFCTTCGEKGASKRCSVCKMVIYCDQTCQKTHWFTHKKICKNLKDIYEKQQLEAAKEKRQEENHGKLDVNSNCVNEEQPEAEVGISQKDSNPEDSGEGKKESLESEAELEGLQDAPAGPQVSEE

SEQ ID NO: 35101 - protein, 27 aa, Artificial Sequence
  Synthetic polypeptide
WVNVLSKKLEHYYPARMFVSTVWTRME

SEQ ID NO: 35102 - protein, 323 aa, Artificial Sequence
  Synthetic polypeptide
LMGKCTVQEAGTLLSSKNVRVNCLDENGMTPLMHAAYKGKLDMCKLLLRHGADVNCHQHEHGYTALMFAALSGNKDITWVMLEAGAETDVVNSVGRTAAQMAAFVGQHDCVTIINNFFPRERLDYYTKPQGLDKEPKLPPKLAGPLHKIITTTNLHPVKIVMLVNENPLLTEEAALNKCYRVMDLICEKCMKQRDMNEVLAMKMHYISCIFQKCINFLKDGENKLDTLIKSLLKGRASDGFPVYQEKIIRESIRKFPYCEATLLQQLVRSIAPVEIGSDPTAFSVLTQAITGQVGFVDVEFCTTCGEKGASKRCSVCKMCREL

SEQ ID NO: 35103 - protein, 184 aa, Artificial Sequence
  Synthetic polypeptide
TLVSLLLIGIAAWGIGFGLISSLRVVGVVIAVGIFLFLIALVGLIGAVKHHQVLLFFYMIILLLVFIVQFSVSCACLALNQEQQGQLLEVGWNNTASARNDIQRNLNCCGFRSVNPNDTCLASCVKSDHSCSPCAPIIGEYAGEVLRFVGGIGLFFSFTEILGVWLTYRYRNQKDPRANPSAFL

SEQ ID NO: 35104 - protein, 13 aa, Artificial Sequence
  Synthetic polypeptide
GLLSNAELWLVCC

SEQ ID NO: 35105 - protein, 43 aa, Artificial Sequence
  Synthetic polypeptide
ASGISPACTHSILPPCKEGACFSFAFCHDSKFPEASSATLNFG

SEQ ID NO: 35106 - protein, 14 aa, Artificial Sequence
  Synthetic polypeptide
GQELQTSLANKTHL

SEQ ID NO: 35107 - protein, 37 aa, Artificial Sequence
  Synthetic polypeptide
AGWLTPVILALWEAKAGRSLEVRSSKPAWPTRPISDS

SEQ ID NO: 35108 - protein, 66 aa, Artificial Sequence
  Synthetic polypeptide
HFGRPRPADHLRSGAPNQPGQQDPSLTVRADITGRYSNRLYAYEPADTALLLDNMKKALKLLKTEL

SEQ ID NO: 35109 - protein, 80 aa, Artificial Sequence
  Synthetic polypeptide
HFGRPRPADHLRSGAPNQPGQQDPSLTVRADITGRYSNRLYAYEPADTALCKCDLQFGCCPRVEHLYCCSDGTRGCMVSA

SEQ ID NO: 35110 - protein, 79 aa, Artificial Sequence
  Synthetic polypeptide
HFGRPRPADHLRSGAPNQPGQQDPSLTVRADITGRYSNRLYAYEPADTALCKCDLQFGCCPRVEHLYCCSDGTRGCMVR

SEQ ID NO: 35111 - protein, 181 aa, Artificial Sequence
  Synthetic polypeptide
AHLRVAMEKIPVSAFLLLVALSYTLARDTTVKPGAKKDTKDSRPKLPQTLSRGWGDQLIWTQTYEEALYKSKTSNKPLMIIHHLDECPHSQALKKVFAENKEIQKLAEQFVLLNLVYETTDKHLSPDGQYVPRIMFVDPSLTVRADITGRYSNRLYAYEPADTALLLDNMKKALKLLKTEL

SEQ ID NO: 35112 - protein, 82 aa, Artificial Sequence
  Synthetic polypeptide
CECSEHIYELPWRKFQCQHSCSLWPSPTLWPEIPQSNLEPKRTQRTLDPNCPRPSPEVGVTNSSGLRHMKKLYINPRQATNP

SEQ ID NO: 35113 - protein, 61 aa, Artificial Sequence
  Synthetic polypeptide
ANVSVLSTFTSCHGENSSVSILAPCGPLLHSGQRYHSQTWSQKGHKGLSTQTAPDPLQRLG

SEQ ID NO: 35114 - protein, 80 aa, Artificial Sequence
  Synthetic polypeptide
TQEVEVAVSHDCATVLQPGQHSEPLSPKKSCHGENSSVSILAPCGPLLHSGQRYHSQTWSQKGHKGLSTQTAPDPLQRLG

SEQ ID NO: 35115 - protein, 198 aa, Artificial Sequence
  Synthetic polypeptide
ATIVPLYSSLGNTVSPCLQKKVAMEKIPVSAFLLLVALSYTLARDTTVKPGAKKDTKDSRPKLPQTLSRGWGDQLIWTQTYEEALYKSKTSNKPLMIIHHLDECPHSQALKKVFAENKEIQKLAEQFVLLNLVYETTDKHLSPDGQYVPRIMFVDPSLTVRADITGRYSNRLYAYEPADTALLLDNMKKALKLLKTEL

SEQ ID NO: 35116 - protein, 80 aa, Artificial Sequence
  Synthetic polypeptide
ALVSKKKLPWRKFQCQHSCSLWPSPTLWPEIPQSNLEPKRTQRTLDPNCPRPSPEVGVTNSSGLRHMKKLYINPRQATNP

SEQ ID NO: 35117 - protein, 64 aa, Artificial Sequence
  Synthetic polypeptide
SQHFRRPRQEDHLSCHGENSSVSILAPCGPLLHSGQRYHSQTWSQKGHKGLSTQTAPDPLQRLG

SEQ ID NO: 35118 - protein, 94 aa, Artificial Sequence
  Synthetic polypeptide
AWWLTPVIPALSEAKAGGSLELPWRKFQCQHSCSLWPSPTLWPEIPQSNLEPKRTQRTLDPNCPRPSPEVGVTNSSGLRHMKKLYINPRQATNP

SEQ ID NO: 35119 - protein, 36 aa, Artificial Sequence
  Synthetic polypeptide
GQEFEISLANMDGEMTSLGYKLMKKVSFMLKKVRSH

SEQ ID NO: 35120 - protein, 32 aa, Artificial Sequence
  Synthetic polypeptide
LTLVIPALWEAEAVGSFEVRSLRSAWPTWMGR

SEQ ID NO: 35121 - protein, 136 aa, Artificial Sequence
  Synthetic polypeptide
DQPGQHGWGDDITWVQTYEEGLFYAQKSKKPLMVIHHLEDCQYSQALKKVFAQNEEIQEMAQNKFIMLNLMHETTDKNLSPDGQYVPRIMFVDPSLTVRADIAGRYSNRLYTYEPRDLPLLIENMKKALRLIQSEL

SEQ ID NO: 35122 - protein, 133 aa, Artificial Sequence
  Synthetic polypeptide
DQPGQHGWGDDITWVQTYEEGLFYAQKSKKPLMVIHHLEDCQYSQALKKVFAQNEEIQEMAQNKFIMLNLMHETTDKNLSPDGQYVPRIMFVDPSLTVRADIAGRYSNRLYTYEPRDLPLCKYSQMISNSGHS

SEQ ID NO: 35123 - protein, 120 aa, Artificial Sequence
  Synthetic polypeptide
DQPGQHGWGDDITWVQTYEEGLFYAQKSKKPLMVIHHLEDCQYSQALKKVFAQNEEIQEMAQNKFIMLNLMHETTDKNLSPDGQYVPRIMFVDPSLTVRADIAGRYSNRLYTYEPRDLPL

SEQ ID NO: 35124 - protein, 20 aa, Artificial Sequence
  Synthetic polypeptide
ATWRNPVSTKSTKHQLAEDS

SEQ ID NO: 35125 - protein, 46 aa, Artificial Sequence
  Synthetic polypeptide
SHHFGRPKGLDCLSPGVQDQPRQHGETLSLLKVRNISWLRIPKGFV

SEQ ID NO: 35126 - protein, 26 aa, Artificial Sequence
  Synthetic polypeptide
ETGGRMIVEMGWLDESSSWLSKECTV

SEQ ID NO: 35127 - protein, 57 aa, Artificial Sequence
  Synthetic polypeptide
LRWGGWTRAALGSAKNAQYDQLSGCEVRSSCGPGAHLTFRPKDRPQDDDARGGPCCP

SEQ ID NO: 35128 - protein, 79 aa, Artificial Sequence
  Synthetic polypeptide
DKIQTLLHGLQGCHDLILASSLAFIISSLPSLSRLQPHWPPLLSLRNLLPPPGAAPATILCGRLNLHVFSRCFRNLLNN

SEQ ID NO: 35129 - protein, 31 aa, Artificial Sequence
  Synthetic polypeptide
GISFHLQELRQPLFCVEGSTSTSSHAAFEIY

SEQ ID NO: 35130 - protein, 141 aa, Artificial Sequence
  Synthetic polypeptide
APATLAPSLIFEESPSTSRSCASHYFVWKAQPPRLLTLLSKSIEQLKQPGSHLEEAEEELQGDQAMQEDRAPSSGNSTRSDSSACVDDTLGQVGAVKVKEEPVDSDEDAQIQEMESGEQAAFMQQVIGKDLAPGFVIKVII

SEQ ID NO: 35131 - protein, 617 aa, Artificial Sequence
  Synthetic polypeptide
APATLAPSLIFEESPSTSRSCASHYFVWKAQPPRLLTLLSKSIEQLKQPGSHLEEAEEELQGDQAMQEDRAPSSGNSTRSDSSACVDDTLGQVGAVKVKEEPVDSDEDAQIQEMESGEQAAFMQQPFLEPTHTRALSVRQAPLAAVGMDGLEKHRLVSRTHSSPAASVLPHPAMDRPLQPGSATGIAYDPLMLKHQCVCGNSTTHPEHAGRIQSIWSRLQETGLLNKCERIQGRKASLEEIQLVHSEHHSLLYGTNPLDGQKLDPRILLGDDSQKFFSSLPCGGLGVDSDTIWNELHSSGAARMAVGCVIELASKVASGELKNGFAVVRPPGHHAEESTAMGFCFFNSVAITAKYLRDQLNISKILIVDLDVHHGNGTQQAFYADPSILYISLHRYDEGNFFPGSGAPNEVGTGLGEGYNINIAWTGGLDPPMGDVEYLEAFRTIVKPVAKEFDPDMVLVSAGFDALEGHTPPLGGYKVTAKCFGHLTKQLMTLADGRVVLALEGGHDLTAICDASEACVNALLGNELEPLAEDILHQSPNMNAVISLQKIIEIQSKYWKSVRMVAVPRGCALAGAQLQEETETVSALASLTVDVEQPFAQEDSRTAGEPMEEEPAL

SEQ ID NO: 35132 - protein, 562 aa, Artificial Sequence
  Synthetic polypeptide
APATLAPSLIFEESPSTSRSCASHYFVWKAQPPRLLTLLSKSIEQLKQPGSHLEEAEEELQGDQAMQEDRAPSSGNSTRSDSSACVDDTLGQVGAVKVKEEPVDSDEDAQIQEMESGEQAAFMQQPFLEPTHTRALSVRQAPLAAVGMDGLEKHRLVSRTHSSPAASVLPHPAMDRPLQPGSATGIAYDPLMLKHQCVCGNSTTHPEHAGRIQSIWSRLQETGLLNKCERIQGRKASLEEIQLVHSEHHSLLYGTNPLDGQKLDPRILLGDDSQKFFSSLPCGGLGVDSDTIWNELHSSGAARMAVGCVIELASKVASGELKNGFAVVRPPGHHAEESTAMGFCFFNSVAITAKYLRDQLNISKILIVDLDVHHGNGTQQAFYADPSILYISLHRYDEGNFFPGSGAPNEVGTGLGEGYNINIAWTGGLDPPMGDVEYLEAFRTIVKPVAKEFDPDMVLVSAGFDALEGHTPPLGGYKVTAKCFGHLTKQLMTLADGRVVLALEGGHDLTAICDASEACVNALLGNELEPLAEDILHQSPNMNAVISLQKIIEIQSMSLKFS

SEQ ID NO: 35133 - protein, 115 aa, Artificial Sequence
  Synthetic polypeptide
QDHRAVGRQTRAALHRRGRVTLKVVRKTPSRRCLLQRGPQPTCLPQARSSASGGRGASPVDERPPAPRVPRCSYWRQSSHTPWASSSRCTCGARTASLPSSARSPSSSSAARPWR

SEQ ID NO: 35134 - protein, 93 aa, Artificial Sequence
  Synthetic polypeptide
RWFGKLPAADAFFRGDRSPRASHRPGALPAVGAGPPQWTRGHQPLGFQDAATGDRVLTHRGRAHRGAPAAPGQHPCLPQLAHPRALQPPDRGV

SEQ ID NO: 35135 - protein, 149 aa, Artificial Sequence
  Synthetic polypeptide
PQAPSATAAETPPAGTKEEGDGKDEGGCRLGLDMTGPQSCRPANTRGSSPQRKGDPEGGSENSQPPMPSSEGTAAHVPPTGQELCQRWARGLPSGREATSPSGSKMQLLETEFSHTVGELIEVHLRRQDSIPAFLSSLTLELFSRQTVA

SEQ ID NO: 35136 - protein, 111 aa, Artificial Sequence
  Synthetic polypeptide
QDHRAVGRQTRAALHRRGRVTLKVVRKTPSRRCLLQRGPQPTCLPQARSSASGGRGASPVDERPPAPRVPRCSYWRQSSHTPWASSSRCTCGARTASLPSSARSPSSSSAA

SEQ ID NO: 35137 - protein, 89 aa, Artificial Sequence
  Synthetic polypeptide
RWFGKLPAADAFFRGDRSPRASHRPGALPAVGAGPPQWTRGHQPLGFQDAATGDRVLTHRGRAHRGAPAAPGQHPCLPQLAHPRALQPP

SEQ ID NO: 35138 - protein, 146 aa, Artificial Sequence
  Synthetic polypeptide
PQAPSATAAETPPAGTKEEGDGKDEGGCRLGLDMTGPQSCRPANTRGSSPQRKGDPEGGSENSQPPMPSSEGTAAHVPPTGQELCQRWARGLPSGREATSPSGSKMQLLETEFSHTVGELIEVHLRRQDSIPAFLSSLTLELFSRQ

SEQ ID NO: 35139 - protein, 75 aa, Artificial Sequence
  Synthetic polypeptide
QDHRAVGRQTRAALHRRGRVTLKATSPSGSKMQLLETEFSHTVGELIEVHLRRQDSIPAFLSSLTLELFSRQTVA

SEQ ID NO: 35140 - protein, 110 aa, Artificial Sequence
  Synthetic polypeptide
PQAPSATAAETPPAGTKEEGDGKDEGGCRLGLDMTGPQSCRPANTRGSSPQRKGDPEGHQPLGFQDAATGDRVLTHRGRAHRGAPAAPGQHPCLPQLAHPRALQPPDRGV

SEQ ID NO: 35141 - protein, 72 aa, Artificial Sequence
  Synthetic polypeptide
QDHRAVGRQTRAALHRRGRVTLKATSPSGSKMQLLETEFSHTVGELIEVHLRRQDSIPAFLSSLTLELFSRQ

SEQ ID NO: 35142 - protein, 106 aa, Artificial Sequence
  Synthetic polypeptide
PQAPSATAAETPPAGTKEEGDGKDEGGCRLGLDMTGPQSCRPANTRGSSPQRKGDPEGHQPLGFQDAATGDRVLTHRGRAHRGAPAAPGQHPCLPQLAHPRALQPP

SEQ ID NO: 35143 - protein, 86 aa, Artificial Sequence
  Synthetic polypeptide
QTPKASLELGSGRGWKGWGGACEKQMLPRTGHERPPAPRVPRCSYWRQSSHTPWASSSRCTCGARTASLPSSARSPSSSSAARPWR

SEQ ID NO: 35144 - protein, 96 aa, Artificial Sequence
  Synthetic polypeptide
MVPRVGCSCNRPRKPLWSWGVGEAGRVGVEPVKSRCCREQAMKGHQPLGFQDAATGDRVLTHRGRAHRGAPAAPGQHPCLPQLAHPRALQPPDRGV

SEQ ID NO: 35145 - protein, 53 aa, Artificial Sequence
  Synthetic polypeptide
KATSPSGSKMQLLETEFSHTVGELIEVHLRRQDSIPAFLSSLTLELFSRQTVA

SEQ ID NO: 35146 - protein, 82 aa, Artificial Sequence
  Synthetic polypeptide
QTPKASLELGSGRGWKGWGGACEKQMLPRTGHERPPAPRVPRCSYWRQSSHTPWASSSRCTCGARTASLPSSARSPSSSSAA

SEQ ID NO: 35147 - protein, 92 aa, Artificial Sequence
  Synthetic polypeptide
MVPRVGCSCNRPRKPLWSWGVGEAGRVGVEPVKSRCCREQAMKGHQPLGFQDAATGDRVLTHRGRAHRGAPAAPGQHPCLPQLAHPRALQPP

SEQ ID NO: 35148 - protein, 50 aa, Artificial Sequence
  Synthetic polypeptide
KATSPSGSKMQLLETEFSHTVGELIEVHLRRQDSIPAFLSSLTLELFSRQ

SEQ ID NO: 35149 - protein, 148 aa, Artificial Sequence
  Synthetic polypeptide
GQARWLMPVIPALRLRRVDHLRSGVQDQPGQQELKKQVESAELKNQRLKEVFQTKIQEFRKACYTLTGYQIDITTENQYRLTSLYAEHPGDCLIFKATSPSGSKMQLLETEFSHTVGELIEVHLRRQDSIPAFLSSLTLELFSRQTVA

SEQ ID NO: 35150 - protein, 12 aa, Artificial Sequence
  Synthetic polypeptide
GREFKTSLANKS

SEQ ID NO: 35151 - protein, 148 aa, Artificial Sequence
  Synthetic polypeptide
PGAVAHACNPSTEAEAGGSPEVGSSRPAWPTRAEEAGGECRAEEPAAQGGFPDQDPGVPQGLLHAHRLPDRHHHGEPVPADLAVRRAPRRLPHLQGHQPLGFQDAATGDRVLTHRGRAHRGAPAAPGQHPCLPQLAHPRALQPPDRGV

SEQ ID NO: 35152 - protein, 145 aa, Artificial Sequence
  Synthetic polypeptide
GQARWLMPVIPALRLRRVDHLRSGVQDQPGQQELKKQVESAELKNQRLKEVFQTKIQEFRKACYTLTGYQIDITTENQYRLTSLYAEHPGDCLIFKATSPSGSKMQLLETEFSHTVGELIEVHLRRQDSIPAFLSSLTLELFSRQ

SEQ ID NO: 35153 - protein, 144 aa, Artificial Sequence
  Synthetic polypeptide
PGAVAHACNPSTEAEAGGSPEVGSSRPAWPTRAEEAGGECRAEEPAAQGGFPDQDPGVPQGLLHAHRLPDRHHHGEPVPADLAVRRAPRRLPHLQGHQPLGFQDAATGDRVLTHRGRAHRGAPAAPGQHPCLPQLAHPRALQPP

SEQ ID NO: 35154 - protein, 96 aa, Artificial Sequence
  Synthetic polypeptide
GQARWLMPVIPALRLRRVDHLRSGVQDQPGQQELKKQVESAELKNQRLKEVFQTKIQEFRKACYTLTGYQIDITTENQYRLTSLYAEHPGDCLIFK

SEQ ID NO: 35155 - protein, 95 aa, Artificial Sequence
  Synthetic polypeptide
PGAVAHACNPSTEAEAGGSPEVGSSRPAWPTRAEEAGGECRAEEPAAQGGFPDQDPGVPQGLLHAHRLPDRHHHGEPVPADLAVRRAPRRLPHLQ

SEQ ID NO: 35156 - protein, 135 aa, Artificial Sequence
  Synthetic polypeptide
CAFYTKLSGTASSLRYCEKAEEAGGECRAEEPAAQGGFPDQDPGVPQGLLHAHRLPDRHHHGEPVPADLAVRRAPRRLPHLQGHQPLGFQDAATGDRVLTHRGRAHRGAPAAPGQHPCLPQLAHPRALQPPDRGV

SEQ ID NO: 35157 - protein, 120 aa, Artificial Sequence
  Synthetic polypeptide
DTVKKLKKQVESAELKNQRLKEVFQTKIQEFRKACYTLTGYQIDITTENQYRLTSLYAEHPGDCLIFKATSPSGSKMQLLETEFSHTVGELIEVHLRRQDSIPAFLSSLTLELFSRQTVA

SEQ ID NO: 35158 - protein, 2 aa, Artificial Sequence
  Synthetic polypeptide
KS

SEQ ID NO: 35159 - protein, 131 aa, Artificial Sequence
  Synthetic polypeptide
CAFYTKLSGTASSLRYCEKAEEAGGECRAEEPAAQGGFPDQDPGVPQGLLHAHRLPDRHHHGEPVPADLAVRRAPRRLPHLQGHQPLGFQDAATGDRVLTHRGRAHRGAPAAPGQHPCLPQLAHPRALQPP

SEQ ID NO: 35160 - protein, 117 aa, Artificial Sequence
  Synthetic polypeptide
DTVKKLKKQVESAELKNQRLKEVFQTKIQEFRKACYTLTGYQIDITTENQYRLTSLYAEHPGDCLIFKATSPSGSKMQLLETEFSHTVGELIEVHLRRQDSIPAFLSSLTLELFSRQ

SEQ ID NO: 35161 - protein, 82 aa, Artificial Sequence
  Synthetic polypeptide
CAFYTKLSGTASSLRYCEKAEEAGGECRAEEPAAQGGFPDQDPGVPQGLLHAHRLPDRHHHGEPVPADLAVRRAPRRLPHLQ

SEQ ID NO: 35162 - protein, 68 aa, Artificial Sequence
  Synthetic polypeptide
DTVKKLKKQVESAELKNQRLKEVFQTKIQEFRKACYTLTGYQIDITTENQYRLTSLYAEHPGDCLIFK

SEQ ID NO: 35163 - protein, 3 aa, Artificial Sequence
  Synthetic polypeptide
SQS

SEQ ID NO: 35164 - protein, 120 aa, Artificial Sequence
  Synthetic polypeptide
INLRAEEAGGECRAEEPAAQGGFPDQDPGVPQGLLHAHRLPDRHHHGEPVPADLAVRRAPRRLPHLQGHQPLGFQDAATGDRVLTHRGRAHRGAPAAPGQHPCLPQLAHPRALQPPDRGV

SEQ ID NO: 35165 - protein, 125 aa, Artificial Sequence
  Synthetic polypeptide
TSGRYKLISELKKQVESAELKNQRLKEVFQTKIQEFRKACYTLTGYQIDITTENQYRLTSLYAEHPGDCLIFKATSPSGSKMQLLETEFSHTVGELIEVHLRRQDSIPAFLSSLTLELFSRQTVA

SEQ ID NO: 35166 - protein, 116 aa, Artificial Sequence
  Synthetic polypeptide
INLRAEEAGGECRAEEPAAQGGFPDQDPGVPQGLLHAHRLPDRHHHGEPVPADLAVRRAPRRLPHLQGHQPLGFQDAATGDRVLTHRGRAHRGAPAAPGQHPCLPQLAHPRALQPP

SEQ ID NO: 35167 - protein, 122 aa, Artificial Sequence
  Synthetic polypeptide
TSGRYKLISELKKQVESAELKNQRLKEVFQTKIQEFRKACYTLTGYQIDITTENQYRLTSLYAEHPGDCLIFKATSPSGSKMQLLETEFSHTVGELIEVHLRRQDSIPAFLSSLTLELFSRQ

SEQ ID NO: 35168 - protein, 67 aa, Artificial Sequence
  Synthetic polypeptide
INLRAEEAGGECRAEEPAAQGGFPDQDPGVPQGLLHAHRLPDRHHHGEPVPADLAVRRAPRRLPHLQ

SEQ ID NO: 35169 - protein, 73 aa, Artificial Sequence
  Synthetic polypeptide
TSGRYKLISELKKQVESAELKNQRLKEVFQTKIQEFRKACYTLTGYQIDITTENQYRLTSLYAEHPGDCLIFK

SEQ ID NO: 35170 - protein, 125 aa, Artificial Sequence
  Synthetic polypeptide
SRTCQPPELAEEAGGECRAEEPAAQGGFPDQDPGVPQGLLHAHRLPDRHHHGEPVPADLAVRRAPRRLPHLQGHQPLGFQDAATGDRVLTHRGRAHRGAPAAPGQHPCLPQLAHPRALQPPDRGV

SEQ ID NO: 35171 - protein, 42 aa, Artificial Sequence
  Synthetic polypeptide
KGLLLVGSLYLPSCRPPCDGASGKPLPEAGALISDLPASRTS

SEQ ID NO: 35172 - protein, 121 aa, Artificial Sequence
  Synthetic polypeptide
SRTCQPPELAEEAGGECRAEEPAAQGGFPDQDPGVPQGLLHAHRLPDRHHHGEPVPADLAVRRAPRRLPHLQGHQPLGFQDAATGDRVLTHRGRAHRGAPAAPGQHPCLPQLAHPRALQPP

SEQ ID NO: 35173 - protein, 72 aa, Artificial Sequence
  Synthetic polypeptide
SRTCQPPELAEEAGGECRAEEPAAQGGFPDQDPGVPQGLLHAHRLPDRHHHGEPVPADLAVRRAPRRLPHLQ

SEQ ID NO: 35174 - protein, 4 aa, Artificial Sequence
  Synthetic polypeptide
DVHP

SEQ ID NO: 35175 - protein, 40 aa, Artificial Sequence
  Synthetic polypeptide
DEMCIHEVGGHAAEAHHDLPELRASAVQTHETNEGAGDTP

SEQ ID NO: 35176 - protein, 350 aa, Artificial Sequence
  Synthetic polypeptide
LLSSSFSPSVQWDLAAWDQCKDRMRCASMKSGGTQLKLIMTFQNYGQALFKPMKQTREQETPPDFFYFSDYERHNAEIAAFHLDRILDFRRVPPVAGRMVNMTKEIRDVTRDKKLWRTFFISPANNICFYGECSYYCSTEHALCGKPDQIEGSLAAFLPDLSLAKRKTWRNPWRRSYHKRKKAEWEVDPDYCEEVKQTPPYDSSHRILDVMDMTIFDFLMGNMDRHHYETFEKFGNETFIIHLDNGRGFGKYSHDELSILVPLQQCCRIRKSTYLRLQLLAKEEYKLSLLMAESLRGDQVAPVLYQPHLEALDRRLRVVLKAVRDCVERNGLHSVVDDDLDTEHRAASAR

SEQ ID NO: 35177 - protein, 6 aa, Artificial Sequence
  Synthetic polypeptide
LTNRLF

SEQ ID NO: 35178 - protein, 37 aa, Artificial Sequence
  Synthetic polypeptide
QIGSSENGLPRVSRTSHPRSCCSDFSCQAWKRLEGTS

SEQ ID NO: 35179 - protein, 34 aa, Artificial Sequence
  Synthetic polypeptide
CLPGGSEDQMRLSCRRPWRSWEARNKEQTCWRWS

SEQ ID NO: 35180 - protein, 269 aa, Artificial Sequence
  Synthetic polypeptide
RSNEAQLSQALEELGGQKQRADMLEMELKMLKSQSSSAEQSFLFSREEADTLRLKVEELEGERSRLEEEKRMLEAQLERRALQGDYDQSRTKVLHMSLNPTSVARQRLREDHSQLQAECERLRGLLRAMERGGTVPADLEAAAASLPSSKEVAELKKQVESAELKNQRLKEVFQTKIQEFRKACYTLTGYQIDITTENQYRLTSLYAEHPGDCLIFKATSPSGSKMQLLETEFSHTVGELIEVHLRRQDSIPAFLSSLTLELFSRQTVA

SEQ ID NO: 35181 - protein, 83 aa, Artificial Sequence
  Synthetic polypeptide
RSNEAQLSQALEELGGQKQRADMLEMELKMLKSQSSSAEQSFLFSREEADTLRLKVEELEGERSRLEEEKRMLEAQLERRALQ

SEQ ID NO: 35182 - protein, 41 aa, Artificial Sequence
  Synthetic polypeptide
RSNEAQLSQALEELGGQKQRADMLEMELKMLKSQSSSAEQS

SEQ ID NO: 35183 - protein, 52 aa, Artificial Sequence
  Synthetic polypeptide
EARKPSAWQPPRLRSEQRSDYNRGSTPTFYYSKCRFDCDPKGWNAGGERSTC

SEQ ID NO: 35184 - protein, 689 aa, Artificial Sequence
  Synthetic polypeptide
EASKGRTTIVVAHRLSTIRSADLIVTLKDGMLAEKGAHAELMAKRGLYYSLVMSQDIKKADEQMESMTYSTERKTNSLPLHSVKSIKSDFIDKAEESTQSKEISLPEVSLLKILKLNKPEWPFVVLGTLASVLNGTVHPVFSIIFAKIITMFGNNDKTTLKHDAEIYSMIFVILGVICFVSYFMQGLFYGRAGEILTMRLRHLAFKAMLYQDIAWFDEKENSTGGLTTILAIDIAQIQGATGSRIGVLTQNATNMGLSVIISFIYGWEMTFLILSIAPVLAVTGMIETAAMTGFANKDKQELKHAGKIATEALENIRTIVSLTREKAFEQMYEEMLQTQHRNTSKKAQIIGSCYAFSHAFIYFAYAAGFRFGAYLIQAGRMTPEGMFIVFTAIAYGAMAIGETLVLAPEYSKAKSGAAHLFALLEKKPNIDSRSQEGKKPDTCEGNLEFREVSFFYPCRPDVFILRGLSLSIERGKTVAFVGSSGCGKSTSVQLLQRLYDPVQGQVLFDGVDAKELNVQWLRSQIAIVPQEPVLFNCSIAENIAYGDNSRVVPLDEIKEAANAANIHSFIEGLPEKYNTQVGLKGAQLSGGQKQRLAIARALLQKPKILLLDEATSALDNDSEKVVQHALDKARTGRTCLVVTHRLSAIQNADLIVVLHNGKIKEQGTHQELLRNRDIYFKLVNAQSVQ

SEQ ID NO: 35185 - protein, 47 aa, Artificial Sequence
  Synthetic polypeptide
GAPLLGRNPVWEVRSVSARPPRLRSEETLCLATAPSEKRAKVGLQSW

SEQ ID NO: 35186 - protein, 27 aa, Artificial Sequence
  Synthetic polypeptide
TDNPRGFCGDEMSGTVCGPSWGPTTAS

SEQ ID NO: 35187 - protein, 313 aa, Artificial Sequence
  Synthetic polypeptide
NERDGMRAILGSYDSELTPAEYSPQLTRRMREAEDMVQKVHSHSAEMEAQLSQALEELGGQKQRADMLEMELKMLKSQSSSAEQSFLFSREEADTLRLKVEELEGERSRLEEEKRMLEAQLERRALQGDYDQSRTKVLHMSLNPTSVARQRLREDHSQLQAECERLRGLLRAMERGGTVPADLEAAAASLPSSKEVAELKKQVESAELKNQRLKEVFQTKIQEFRKACYTLTGYQIDITTENQYRLTSLYAEHPGDCLIFKATSPSGSKMQLLETEFSHTVGELIEVHLRRQDSIPAFLSSLTLELFSRQTVA

SEQ ID NO: 35188 - protein, 127 aa, Artificial Sequence
  Synthetic polypeptide
NERDGMRAILGSYDSELTPAEYSPQLTRRMREAEDMVQKVHSHSAEMEAQLSQALEELGGQKQRADMLEMELKMLKSQSSSAEQSFLFSREEADTLRLKVEELEGERSRLEEEKRMLEAQLERRALQ

SEQ ID NO: 35189 - protein, 38 aa, Artificial Sequence
  Synthetic polypeptide
GQARWLIPVIPALWEAEAGGPEVRSSRPASPIWSWSQI

SEQ ID NO: 35190 - protein, 30 aa, Artificial Sequence
  Synthetic polypeptide
SQHFGRPRRVDLRSGVQDQPHRYGRGVRFE

SEQ ID NO: 35191 - protein, 364 aa, Artificial Sequence
  Synthetic polypeptide
GQEFKTSLTDMVVESDLSDDGKASLVSEEEEDEEEDKATPRRSRSRRSSIGLRVAFQFPTKKLANKPDKNSSSEQLFSSARLQNEKKTILERKKDCRQVIQREDSTSESEDDSRDESQESSDALLKRTMNIKENKAMLAQLLAELNSMPDFFPVRTPTSASRKKTVRRAFSEGQITRRMNPTRSARPPEKFALENFTVSAAKFAEEFYSFRRRKTIGGKCREYRRRHRISSFRPVEDITEEDLENVAITVRDKIYDKVLGNTCHQCRQKTIDTKTVCRNQGCCGVRGQFCGPCLRNRYGEDVRSALLDPDWVCPPCRGICNCSYCRKRDGRCATGILIHLAKFYGYDNVKEYLESLQKELVEDN

SEQ ID NO: 35192 - protein, 113 aa, Artificial Sequence
  Synthetic polypeptide
GQEFKTSLTDMVVESDLSDDGKASLVSEEEEDEEEDKATPRRSRSRRSSIGLRVAFQFPTKKLANKPDKNSSSEQLFSSARLQNEKKTILERKKDCRQVIQREDSTSESEDDS

SEQ ID NO: 35193 - protein, 58 aa, Artificial Sequence
  Synthetic polypeptide
GQEFKTSLTDMVVESDLSDDGKASLVSEEEEDEEEDKATPRRSRSRRSSIGLRVAFQF

SEQ ID NO: 35194 - protein, 40 aa, Artificial Sequence
  Synthetic polypeptide
GQEFKTSLTDMVVESDLSDDGKASLVSEEEEDEEEDKATP

SEQ ID NO: 35195 - protein, 375 aa, Artificial Sequence
  Synthetic polypeptide
GQARWLIPVIPALWEAEAGGPEVVESDLSDDGKASLVSEEEEDEEEDKATPRRSRSRRSSIGLRVAFQFPTKKLANKPDKNSSSEQLFSSARLQNEKKTILERKKDCRQVIQREDSTSESEDDSRDESQESSDALLKRTMNIKENKAMLAQLLAELNSMPDFFPVRTPTSASRKKTVRRAFSEGQITRRMNPTRSARPPEKFALENFTVSAAKFAEEFYSFRRRKTIGGKCREYRRRHRISSFRPVEDITEEDLENVAITVRDKIYDKVLGNTCHQCRQKTIDTKTVCRNQGCCGVRGQFCGPCLRNRYGEDVRSALLDPDWVCPPCRGICNCSYCRKRDGRCATGILIHLAKFYGYDNVKEYLESLQKELVEDN

SEQ ID NO: 35196 - protein, 18 aa, Artificial Sequence
  Synthetic polypeptide
SQHFGRPRRVDLRSWSQI

SEQ ID NO: 35197 - protein, 124 aa, Artificial Sequence
  Synthetic polypeptide
GQARWLIPVIPALWEAEAGGPEVVESDLSDDGKASLVSEEEEDEEEDKATPRRSRSRRSSIGLRVAFQFPTKKLANKPDKNSSSEQLFSSARLQNEKKTILERKKDCRQVIQREDSTSESEDDS

SEQ ID NO: 35198 - protein, 69 aa, Artificial Sequence
  Synthetic polypeptide
GQARWLIPVIPALWEAEAGGPEVVESDLSDDGKASLVSEEEEDEEEDKATPRRSRSRRSSIGLRVAFQF

SEQ ID NO: 35199 - protein, 51 aa, Artificial Sequence
  Synthetic polypeptide
GQARWLIPVIPALWEAEAGGPEVVESDLSDDGKASLVSEEEEDEEEDKATP

SEQ ID NO: 35200 - protein, 64 aa, Artificial Sequence
  Synthetic polypeptide
LRKDWNAGSRISVTGGEAAEDDACARADGAQSSEQEVVPRKSPQRRDCQAARCRDSRRPFQIRG

SEQ ID NO: 35201 - protein, 442 aa, Artificial Sequence
  Synthetic polypeptide
GRIGTQGAGYPSLGEKQLKMMPVPGQMVLSPQSRKWCRESLPKDEIARQPDAGTPEDLSRFVVELQQRELALKDKNSAVTSSARGLEKARQQLQEELRQVSGQLLEERKKRETHEALARRLQKRVLLLTKERDGMRAILGSYDSELTPAEYSPQLTRRMREAEDMVQKVHSHSAEMEAQLSQALEELGGQKQRADMLEMELKMLKSQSSSAEQSFLFSREEADTLRLKVEELEGERSRLEEEKRMLEAQLERRALQGDYDQSRTKVLHMSLNPTSVARQRLREDHSQLQAECERLRGLLRAMERGGTVPADLEAAAASLPSSKEVAELKKQVESAELKNQRLKEVFQTKIQEFRKACYTLTGYQIDITTENQYRLTSLYAEHPGDCLIFKATSPSGSKMQLLETEFSHTVGELIEVHLRRQDSIPAFLSSLTLELFSRQTVA

SEQ ID NO: 35202 - protein, 51 aa, Artificial Sequence
  Synthetic polypeptide
CLCPGRWCSVLRAGSGAEKVSPKTRLPGSPMPGLQKTFPDSWLSCSRGSLP

SEQ ID NO: 35203 - protein, 25 aa, Artificial Sequence
  Synthetic polypeptide
SKTIAMACCWTPNIRDSRRPFQIRG

SEQ ID NO: 35204 - protein, 420 aa, Artificial Sequence
  Synthetic polypeptide
TEGATKYPVQWMNVCDQRPLPWHVAGPQISGTPEDLSRFVVELQQRELALKDKNSAVTSSARGLEKARQQLQEELRQVSGQLLEERKKRETHEALARRLQKRVLLLTKERDGMRAILGSYDSELTPAEYSPQLTRRMREAEDMVQKVHSHSAEMEAQLSQALEELGGQKQRADMLEMELKMLKSQSSSAEQSFLFSREEADTLRLKVEELEGERSRLEEEKRMLEAQLERRALQGDYDQSRTKVLHMSLNPTSVARQRLREDHSQLQAECERLRGLLRAMERGGTVPADLEAAAASLPSSKEVAELKKQVESAELKNQRLKEVFQTKIQEFRKACYTLTGYQIDITTENQYRLTSLYAEHPGDCLIFKATSPSGSKMQLLETEFSHTVGELIEVHLRRQDSIPAFLSSLTLELFSRQTVA

SEQ ID NO: 35205 - protein, 37 aa, Artificial Sequence
  Synthetic polypeptide
TSVIKDHCHGMLLDPKYQGLQKTFPDSWLSCSRGSLP

SEQ ID NO: 35206 - protein, 116 aa, Artificial Sequence
  Synthetic polypeptide
PSSFPSKGWCELQFLLLAKHLKKISVFLAILTGSLVALCNFQATKLAKTQLVGTPNFWQEQQCGIHFPPPSKTRSYIYFILSAASPSKGNVSSHMFQLHLENLNKKDKLLLIIFQI

SEQ ID NO: 35207 - protein, 9 aa, Artificial Sequence
  Synthetic polypeptide
RKSQCSWLY

SEQ ID NO: 35208 - protein, 33 aa, Artificial Sequence
  Synthetic polypeptide
VAVSSPCKTSEENLSVPGYTDWKPGSFVQLSGH

SEQ ID NO: 35209 - protein, 39 aa, Artificial Sequence
  Synthetic polypeptide
NIADKLTSVKLNLDHMFSFLKIFPKWVLTLKRYMVGSTS

SEQ ID NO: 35210 - protein, 25 aa, Artificial Sequence
  Synthetic polypeptide
NSTWIICFLFSKSSLNGSSHLKGTW

SEQ ID NO: 35211 - protein, 11 aa, Artificial Sequence
  Synthetic polypeptide
KVHGRINFLTL

SEQ ID NO: 35212 - protein, 734 aa, Artificial Sequence
  Synthetic polypeptide
ELHHRTPGSEAFRLGLCHTARLPGLQLADGLLWDSLCNRRVEGGSGLDISTSAPGSLQMQYQQSMQLEERAEQIRSKSHLIQVEREKMQMELSHKRARVELERAASTSARNYEREVDRNQELLTRIRQLQEREAGAEEKMQEQLERNRQCQQNLDAASKRLREKEDSLAQAGETINALKGRISELQWSVMDQEMRVKRLESEKQELQEQLDLQHKKCQEANQKIQELQASQEARADHEQQIKDLEQKLSLQEQDAAIVKNMKSELVRLPRLERELKQLREESAHLREMRETNGLLQEELEGLQRKLGRQEKMQETLVGLELENERLLAKLQSWERLDQTMGLSIRTPEDLSRFVVELQQRELALKDKNSAVTSSARGLEKARQQLQEELRQVSGQLLEERKKRETHEALARRLQKRVLLLTKERDGMRAILGSYDSELTPAEYSPQLTRRMREAEDMVQKVHSHSAEMEAQLSQALEELGGQKQRADMLEMELKMLKSQSSSAEQSFLFSREEADTLRLKVEELEGERSRLEEEKRMLEAQLERRALQGDYDQSRTKVLHMSLNPTSVARQRLREDHSQLQAECERLRGLLRAMERGGTVPADLEAAAASLPSSKEVAELKKQVESAELKNQRLKEVFQTKIQEFRKACYTLTGYQIDITTENQYRLTSLYAEHPGDCLIFKATSPSGSKMQLLETEFSHTVGELIEVHLRRQDSIPAFLSSLTLELFSRQTVA

SEQ ID NO: 35213 - protein, 145 aa, Artificial Sequence
  Synthetic polypeptide
EPGGLERTKTEKRRMCPSACRSWDTLFLSSPQQQHSKLAGLWSPGLVPAAPRTENYTIGPLALRPSDLDCVTLPGFQGSNLQTACCGTVSVIAVWREALDWIFLPRPQVLCRCSTSRACSWRKEQSRSVRSPTSSRWSGRKCRWS

SEQ ID NO: 35214 - protein, 76 aa, Artificial Sequence
  Synthetic polypeptide
SPCGGRLWTGYFYLGPRFSADAVPAEHAAGGKSRADPFEVPPHPGGAGENADGAESQEGSSGAGESSQHQCQELRA

SEQ ID NO: 35215 - protein, 160 aa, Artificial Sequence
  Synthetic polypeptide
ELHHRTPGSEAFRLGLCHTARLPGLQLADGLLWDSLCNRRVEGGSGLDISTSAPGSLQMQYQQSMQREVDRNQELLTRIRQLQEREAGAEEKMQEQLERNRQCQQNLDAASKRLREKEDSLAQAGETINALKGRISELQWSVMDQEMRVKRLESEKQELQ

SEQ ID NO: 35216 - protein, 129 aa, Artificial Sequence
  Synthetic polypeptide
EPGGLERTKTEKRRMCPSACRSWDTLFLSSPQQQHSKLAGLWSPGLVPAAPRTENYTIGPLALRPSDLDCVTLPGFQGSNLQTACCGTVSVIAVWREALDWIFLPRPQVLCRCSTSRACSVRSTATRSS

SEQ ID NO: 35217 - protein, 29 aa, Artificial Sequence
  Synthetic polypeptide
SPCGGRLWTGYFYLGPRFSADAVPAEHAA

SEQ ID NO: 35218 - protein, 173 aa, Artificial Sequence
  Synthetic polypeptide
ELHHRTPGSEAFRLGLCHTARLPGLQLADGLLWDSLCNRRVEGGSGLDISTSAPGSLQMQYQQSMQLEERAEQIRSKSHLIQVEREKMQMELSHKRARVELERAASTSARNYEREVDRNQELLTRIRQLQEREAGAEEKMQEQLERNRQCQQNLDAASKRLREKEDSLAQAGE

SEQ ID NO: 35219 - protein, 23 aa, Artificial Sequence
  Synthetic polypeptide
DAISKKASRVPHCWESLQESDRR

SEQ ID NO: 35220 - protein, 274 aa, Artificial Sequence
  Synthetic polypeptide
TGLGGPHLSSQHFGSLRQEDRLSLGVRDQPRQCSEMPSLKKRQGFHTVGSRCKNRTGAEHLWLTRHLRDPFVKAAKVESYRCRSAFKLLEVNERHQILRPGLRVLDCGAAPGAWSQVAVQKVNAAGTDPSSPVGFVLGVDLLHIFPLEGATFLCPADVTDPRTSQRILEVLPGRRADVILSDMAPNATGFRDLDHDRLISLCLTLLSVTPDILQPGGTFLCKTWAGSQSRRLQRRLTEEFQNVRIIKPEASRKESSEVYFLATQYHGRKGTVKQ

SEQ ID NO: 35221 - protein, 23 aa, Artificial Sequence
  Synthetic polypeptide
KSVKGSTLLGVAARIGQALSTCG

SEQ ID NO: 35222 - protein, 173 aa, Artificial Sequence
  Synthetic polypeptide
TGLGGPHLSSQHFGSLRQEDRLSLGVRDQPRQCSEMPSLKKRQGFHTVGSRCKNRTGAEHLWLTRHLRDPFVKAAKVESYRCRSAFKLLEVNERHQILRPGLRVLDCGAAPGAWSQVAVQKVNAAGTDGVSLLPRLQCNGVISAHCNLCLPGSSDSPASASQIPALLLASCLG

SEQ ID NO: 35223 - protein, 8 aa, Artificial Sequence
  Synthetic polypeptide
DAISKKGT

SEQ ID NO: 35224 - protein, 68 aa, Artificial Sequence
  Synthetic polypeptide
TGLGGPHLSSQHFGSLRQEDRLSLGVRDQPRQCSEMPSLKKVLEAGVCFLSASRVPHCWESLQESDRR

SEQ ID NO: 35225 - protein, 245 aa, Artificial Sequence
  Synthetic polypeptide
KRYLKLVCVSFQRQGFHTVGSRCKNRTGAEHLWLTRHLRDPFVKAAKVESYRCRSAFKLLEVNERHQILRPGLRVLDCGAAPGAWSQVAVQKVNAAGTDPSSPVGFVLGVDLLHIFPLEGATFLCPADVTDPRTSQRILEVLPGRRADVILSDMAPNATGFRDLDHDRLISLCLTLLSVTPDILQPGGTFLCKTWAGSQSRRLQRRLTEEFQNVRIIKPEASRKESSEVYFLATQYHGRKGTVKQ

SEQ ID NO: 35226 - protein, 144 aa, Artificial Sequence
  Synthetic polypeptide
KRYLKLVCVSFQRQGFHTVGSRCKNRTGAEHLWLTRHLRDPFVKAAKVESYRCRSAFKLLEVNERHQILRPGLRVLDCGAAPGAWSQVAVQKVNAAGTDGVSLLPRLQCNGVISAHCNLCLPGSSDSPASASQIPALLLASCLG

SEQ ID NO: 35227 - protein, 177 aa, Artificial Sequence
  Synthetic polypeptide
GWAQWLTPVISALWEAENPGTMGASRLYTLVLVLQPQRVLLGMKKRGFGAGRWNGFGGKVQEGETIEDGARRELQEESGLTVDALHKVGQIVFEFVGEPELMDVHVFCTDSIQGTPVESDEMRPCWFQLDQIPFKDMWPDDSYWFPLLLQKKKFHGYFKFQGQDTILDYTLREVDTV

SEQ ID NO: 35228 - protein, 33 aa, Artificial Sequence
  Synthetic polypeptide
SQHFGRLRTQGPWAPPGSIPWCWSCSLSEFSWA

SEQ ID NO: 35229 - protein, 40 aa, Artificial Sequence
  Synthetic polypeptide
DVGRAFAPLPCLGCEERLCPAATPSGRHYQKHLYQIMPQI

SEQ ID NO: 35230 - protein, 62 aa, Artificial Sequence
  Synthetic polypeptide
GASLPGRASSEMWGEPLPHCPVWDVRSASARPRPRLGDITRNIFTKLCHKFERQEFFSFISL

SEQ ID NO: 35231 - protein, 516 aa, Artificial Sequence
  Synthetic polypeptide
GAPLPGRDPVWETLPETSLPNYATNLKDKSSLVSSLYKVIQEPQSELLEPVCHQLFEFYRSGEEQLLQFTLQFLPELIWCYLAVSASRNVHSSGCIEALLLGVYNLEIVDKQGHTKVLSFTIPSLSKPSVYHEPSSIGSMALTESALSQHGLSKVVYSGPHPQREMLTAQNRFEVLTFLLLCYNAALTYMPSVSLQSLCQICSRICVCGYPRQHVRKYKGISSRIPVSSGFMVQMLTGIYFAFYNGEWDLAQKALDDIIYRAQLELYPEPLLVANAIKASLPHGPMKSNKEGTRCIQVEITPTSSRISRNAVTSMSIRGHRWKRHGNTELTGQEELMEISEVDEGFYSRAASSTSQSGLSNSSHNCSNKPSIGKNHRRSGGSKTGGKEKETTGESCKDHFARKQTQRAQSENLELLSLKRLTLTTSQSLPKPSSHGLAKTAATVFSKSFEQVSGVTVPHNPSSAVGCGAGTDANRFSACSLQEEKLIYVSERTELPMKHQSGQQRPPSISITLSTD

SEQ ID NO: 35232 - protein, 414 aa, Artificial Sequence
  Synthetic polypeptide
GAPLPGRDPVWETLPETSLPNYATNLKDKSSLVSSLYKVIQEPQSELLEPVCHQLFEFYRSGEEQLLQFTLQFLPELIWCYLAVSASRNVHSSGCIEALLLGVYNLEIVDKQGHTKVLSFTIPSLSKPSVYHEPSSIGSMALTESALSQHGLSKVVYSGPHPQREMLTAQNRFEVLTFLLLCYNAALTYMPSVSLQSLCQICSRICVCGYPRQHVRKYKGISSRIPVSSGFMVQMLTGIYFAFYNGEWDLAQKALDDIIYRAQLELYPEPLLVANAIKASLPHGPMKSNKEGTRCIQVEITPTSSRISRNAVTSMSIRGHRWKRHEQPDNNNDATELGILVIPEISVTNVAGERTGNGEKGRTLGEIDAQHIQGVQETATDPRTESKGLPEIRRQKSVRKMMEDGINSPGRVQF

SEQ ID NO: 35233 - protein, 109 aa, Artificial Sequence
  Synthetic polypeptide
GAPLPGRDPVWETLPETSLPNYATNLKDKSSLVSSLYKVIQEPQSELLEPVCHQLFEFYRSGEEQLLQFTLQFLPELIWCYLAVSASRNVHSSGCIEALLLGVYNLVCI

SEQ ID NO: 35234 - protein, 467 aa, Artificial Sequence
  Synthetic polypeptide
DVGRAFAPLPCLGCEERLCPAATPSGRKKGSRWCCYSGGSRAASVAVAESLTSRGPAGGAPAAALTLPETSLPNYATNLKDKSSLVSSLYKVIQEPQSELLEPVCHQLFEFYRSGEEQLLQFTLQFLPELIWCYLAVSASRNVHSSGCIEALLLGVYNLEIVDKQGHTKVLSFTIPSLSKPSVYHEPSSIGSMALTESALSQHGLSKVVYSGPHPQREMLTAQNRFEVLTFLLLCYNAALTYMPSVSLQSLCQICSRICVCGYPRQHVRKYKGISSRIPVSSGFMVQMLTGIYFAFYNGEWDLAQKALDDIIYRAQLELYPEPLLVANAIKASLPHGPMKSNKEGTRCIQVEITPTSSRISRNAVTSMSIRGHRWKRHEQPDNNNDATELGILVIPEISVTNVAGERTGNGEKGRTLGEIDAQHIQGVQETATDPRTESKGLPEIRRQKSVRKMMEDGINSPGRVQF

SEQ ID NO: 35235 - protein, 75 aa, Artificial Sequence
  Synthetic polypeptide
GASLPGRASSEMWGEPLPHCPVWDVRSASARPRPRLGGRRGAGGAATREEAEQPPSLSLRASRVEVLQVELRQPP

SEQ ID NO: 35236 - protein, 33 aa, Artificial Sequence
  Synthetic polypeptide
GAPLPGRDPVWEEEGEQVVLLLGRKQSSLRRCR

SEQ ID NO: 35237 - protein, 33 aa, Artificial Sequence
  Synthetic polypeptide
SQHFGRPKQANCLTPGAEDQTVQHDCSSGSTRC

SEQ ID NO: 35238 - protein, 150 aa, Artificial Sequence
  Synthetic polypeptide
PQELKTRLCNMIAPAEAPDAKVRMVIITGPPEAQFKAQGRIYGKIKEENFVSPKEEVKLEAHIRVPSFAAGRVIGKGGKTVNELQNLSSAEVVVPRDQTPDENDQVVVKITGHFYACQVAQRKIQEILTQVKQHQQQKALQSGPPQSRRK

SEQ ID NO: 35239 - protein, 315 aa, Artificial Sequence
  Synthetic polypeptide
VPNTVLPRCTEEIPLKILAHNNFVGRLIGKEGRNLKKIEQDTDTKITISPLQELTLYNPERTITVKGNVETCAKAEEEIMKKIRESYENDIASMNLQAHLIPGLNLNALGLFPPTSGMPPPTSGPPSAMTPPYPQFEQSETETVHLFIPALSVGAIIGKQGQHIKQLSRFAGASIKIAPAEAPDAKVRMVIITGPPEAQFKAQGRIYGKIKEENFVSPKEEVKLEAHIRVPSFAAGRVIGKGGKTVNELQNLSSAEVVVPRDQTPDENDQVVVKITGHFYACQVAQRKIQEILTQVKQHQQQKALQSGPPQSRRK

SEQ ID NO: 35240 - protein, 14 aa, Artificial Sequence
  Synthetic polypeptide
YLTQCFPDAQKRSP

SEQ ID NO: 35241 - protein, 17 aa, Artificial Sequence
  Synthetic polypeptide
HSASQMHRRDPLEDFSS

SEQ ID NO: 35242 - protein, 4 aa, Artificial Sequence
  Synthetic polypeptide
TGAG

SEQ ID NO: 35243 - protein, 492 aa, Artificial Sequence
  Synthetic polypeptide
SSYGISEQVLDSLLVQYGVVESCEQVNTDSETAVVNVTYSSKDQARQALDKLNGFQLENFTLKVAYIPDEMAAQQNPLQQPRGRRGLGQRGSSRQGSPGSVSKQKPCDLPLRLLVPTQFVGAIIGKEGATIRNITKQTQSKIDVHRKENAGAAEKSITILSTPEGTSAACKSILEIMHKEAQDIKFTEEIPLKILAHNNFVGRLIGKEGRNLKKIEQDTDTKITISPLQELTLYNPERTITVKGNVETCAKAEEEIMKKIRESYENDIASMNLQAHLIPGLNLNALGLFPPTSGMPPPTSGPPSAMTPPYPQFEQSETETVHLFIPALSVGAIIGKQGQHIKQLSRFAGASIKIAPAEAPDAKVRMVIITGPPEAQFKAQGRIYGKIKEENFVSPKEEVKLEAHIRVPSFAAGRVIGKGGKTVNELQNLSSAEVVVPRDQTPDENDQVVVKITGHFYACQVAQRKIQEILTQVKQHQQQKALQSGPPQSRRK

SEQ ID NO: 35244 - protein, 31 aa, Artificial Sequence
  Synthetic polypeptide
MRSDLELCPSSTTFSLCDLVMGSLNRCWIVY

SEQ ID NO: 35245 - protein, 486 aa, Artificial Sequence
  Synthetic polypeptide
LEVLDSLLVQYGVVESCEQVNTDSETAVVNVTYSSKDQARQALDKLNGFQLENFTLKVAYIPDEMAAQQNPLQQPRGRRGLGQRGSSRQGSPGSVSKQKPCDLPLRLLVPTQFVGAIIGKEGATIRNITKQTQSKIDVHRKENAGAAEKSITILSTPEGTSAACKSILEIMHKEAQDIKFTEEIPLKILAHNNFVGRLIGKEGRNLKKIEQDTDTKITISPLQELTLYNPERTITVKGNVETCAKAEEEIMKKIRESYENDIASMNLQAHLIPGLNLNALGLFPPTSGMPPPTSGPPSAMTPPYPQFEQSETETVHLFIPALSVGAIIGKQGQHIKQLSRFAGASIKIAPAEAPDAKVRMVIITGPPEAQFKAQGRIYGKIKEENFVSPKEEVKLEAHIRVPSFAAGRVIGKGGKTVNELQNLSSAEVVVPRDQTPDENDQVVVKITGHFYACQVAQRKIQEILTQVKQHQQQKALQSGPPQSRRK

SEQ ID NO: 35246 - protein, 7 aa, Artificial Sequence
  Synthetic polypeptide
MRCWIVY

SEQ ID NO: 35247 - protein, 205 aa, Artificial Sequence
  Synthetic polypeptide
QWCLSVFSGAVREPWGCARWKGRYKQHKTDLEAIPQQCPIDLPCQVTGCQCRAYLYVPLNGSQPIRCRCKHFADQHSAAPGFTCNTCSKCSGFHSCFTCACGQPAYAHDTVVETKQERLAQEKPVGQDIPYAAMGGLTGFSSLAEGYMRLDDSGIVGTSSQVSSLRRPEEDDMAFFERRYQERMKMEKAAKWKGKAPLPSATKPS

SEQ ID NO: 35248 - protein, 34 aa, Artificial Sequence
  Synthetic polypeptide
GSLGGVPGGRAGINNIKLTWKRFLSSAPLICPAK

SEQ ID NO: 35249 - protein, 23 aa, Artificial Sequence
  Synthetic polypeptide
VVFICVLRSCEGALGVCQVEGQV

SEQ ID NO: 35250 - protein, 241 aa, Artificial Sequence
  Synthetic polypeptide
QWCLSVFSGAVREPWGCARWKGRYKQHKTDLEAIPQQCPIDLPCQVTGCQCRAYLYVPLNGSQPIRCRCKHFADQHSAAPGFTCNTCSKCSGFHSCFTCACGQPAYAHDTVVETKQERLAQEKPVGQDIPYAAMGGLTGFSSLAEGYMRLDDSGIGVPSVEFLESPITAVDSPFLKAFQASSSSSPETLTDVGTSSQVSSLRRPEEDDMAFFERRYQERMKMEKAAKWKGKAPLPSATKPS

SEQ ID NO: 35251 - protein, 1002 aa, Artificial Sequence
  Synthetic polypeptide
GQAWWLMPVIPTLWETYVRGSPEPRSLRPALATSINRNKDIMKIGCSLSEVCPQASSVLGNLDPNKIYGGLFSEDQCWYRCKVLKIISVEKCLVRYIDYGNTEILNRSDIVEIPLELQFSSVAKKYKLWGLHIPSDQEVTQFDQGTTFLGSLIFEKEIKMRIKATSEDGTVIAQAEYGSVDIGEEVLKKGFAEKCRLASRTDICEEKKLDPGQLVLRNLKSPIPLWGHRSNQSTFSRPKGHLSEKMTLDLKDENDAGNLITFPKESLAVGDFNLGSNVSLEKIKQDQKLIEENEKLKTEKDALLESYKALELKVEQIAQELQQEKAAAVDLTNHLEYTLKTYIDTRMKNLAAKMEILKEMRHVDISVRFGKDLSDAIQVLDEGCFTTPASLNGLEIIWAEYSLAQENIKTCEYVSEGNILIAQRNEMQQKLYMSVEDFILEVDESSLNKRLKTLQDLSVSLEAVYGQAKEGANSDEILKKFYDWKCDKREEFTSVRSETDASLHRLVAWFQRTLKVFDLSVEGSLISEDAMDNIDEILEKTESSVCKELEIALVDQGDADKEIISNTYSQVLQKIHSEERLIATVQAKYKDSIEFKKQLIEYLNKSPSVDHLLSIKKTLKSLKALLRWKLVEKSNLEESDDPDGSQIEKIKEEITQLRNNVFQEIYHEREEYEMLTSLAQKWFPELPLLHPEIGLLKYMNSGGLLTMSLERDLLDAEPMKELSSKRPLVRSEVNGQIILLKGYSVDVDTEAKVIERAATYHRAWREAEGDSGLLPLIFLFLCKSDPMAYLMVPYYPRANLNAVQANMPLNSEETLKVMKGVAQGLHTLHKADIIHGSLHQNNVFALNREQGIVGDFDFTKSVSQRASVNMMVGDLSLMSPELKMGKPASPGSDLYAYGCLLLWLSVQNQEFEINKDGIPKVDQFHLDDKVKSLLCSLICYRSSMTAEQVLNAECFLMPKEQSVPNPEKDTEYTLYKKEEEIKTENLDKCMEKTRNGEANFDC

SEQ ID NO: 35252 - protein, 14 aa, Artificial Sequence
  Synthetic polypeptide
DQPWQQVSIEIRIS

SEQ ID NO: 35253 - protein, 13 aa, Artificial Sequence
  Synthetic polypeptide
AQEFETSLGNKYQ

SEQ ID NO: 35254 - protein, 165 aa, Artificial Sequence
  Synthetic polypeptide
GQAWWLMPVIPTLWETYVRGSPEPRSLRPALATSINRNKDIMKIGCSLSEVCPQASSVLGNLDPNKIYGGLFSEDQCWYRCKVLKIISVEKCLVRYIDYGNTEILNRSDIVEIPLELQFSSVAKKYKLWGLHIPSDQEVTQFDQGTTFLGSLIFEKEIKMRIKAT

SEQ ID NO: 35255 - protein, 979 aa, Artificial Sequence
  Synthetic polypeptide
GQAWWLMPVIPTLWETYVRGSPEPRSLRPALATSINRNKDIMKIGCSLSEVCPQASSVLGNLDPNKIYGGLFSEDQCWYRCKVLKIISVEKCLVRYIDYGNTEILNRSDIVEIPLELQFSSVAKKYKLWGLHIPSDQEVTQFDQGTTFLGSLIFEKEIKMRIKATSEDGTVIAQAEYGSVDIGEEVLKKGFAEKCRLASRTDICEEKKLDPGQLVLRNLKSPIPLWGHRSNQSTFSRPKGHLSEKMTLDLKDENDAGNLITFPKESLAVGDFNLGSNVSLEKIKQDQKLIEENEKLKTEKDALLESYKALELKVEQIAQELQQEKAAAVDLTNHLEYTLKTYIDTRMKNLAAKMEILKEMRHVDISVRFGKDLSDAIQVLDEGCFTTPASLNGLEIIWAEYSLAQENIKTCEYVSEGNILIAQRNEMQQKLYMSVEDFILEVDESSLNKRLKTLQDLSVSLEAVYGQAKEGANSDEILKKFYDWKCDKREEFTSVRSETDASLHRLVAWFQRTLKVFDLSVEGSLISEDAMDNIDEILEKTESSVCKELEIALVDQGDADKEIISNTYSQVLQKIHSEERLIATVQAKYKDSIEFKKQLIEYLNKSPSVDHLLSIKKTLKSLKALLRWKLVEKSNLEESDDPDGSQIEKIKEEITQLRNNVFQEIYHEREEYEMLTSLAQKWFPELPLLHPEIGLLKYMNSGGLLTMSLERDLLDAEPMKELSSKRPLVRSEVNGQIILLKGYSVDVDTEAKVIERAATYHRAWREAEGDSGLLPLIFLFLCKSDPMAYLMVPYYPRANLNAVQANMPLNSEETLKVMKGVAQGLHTLHKADIIHGSLHQNNVFALNREQGIVGDFDFTKSVSQRASVNMMVGDLSLMSPELKMGKPASPGSDLYAYGCLLLWDDKVKSLLCSLICYRSSMTAEQVLNAECFLMPKEQSVPNPEKDTEYTLYKKEEEIKTENLDKCMEKTRNGEANFDC

SEQ ID NO: 35256 - protein, 48 aa, Artificial Sequence
  Synthetic polypeptide
GQAWWLMPVIPTLWETYVRGSPEPRSLRPALATSINRNKDIMKIGCSL

SEQ ID NO: 35257 - protein, 99 aa, Artificial Sequence
  Synthetic polypeptide
GQAWWLMPVIPTLWETYVRGSPEPRSLRPALATSINRNKDIMKIGCSLSEVCPQASSVLGNLDPNKIYGGLFSEDQCWYRCKVLKIISVEKCLVRYIDY

SEQ ID NO: 35258 - protein, 211 aa, Artificial Sequence
  Synthetic polypeptide
NQPPASMEKLSFMKPVPGAQKETLKVMKGVAQGLHTLHKADIIHGSLHQNNVFALNREQGIVGDFDFTKSVSQRASVNMMVGDLSLMSPELKMGKPASPGSDLYAYGCLLLWLSVQNQEFEINKDGIPKVDQFHLDDKVKSLLCSLICYRSSMTAEQVLNAECFLMPKEQSVPNPEKDTEYTLYKKEEEIKTENLDKCMEKTRNGEANFDC

SEQ ID NO: 35259 - protein, 10 aa, Artificial Sequence
  Synthetic polypeptide
NRSLVPKRKL

SEQ ID NO: 35260 - protein, 52 aa, Artificial Sequence
  Synthetic polypeptide
ESNACDLRWNSLILKPTPCIHGKIVFHETGPWCPKGNFKGHERCCPGSAYIA

SEQ ID NO: 35261 - protein, 188 aa, Artificial Sequence
  Synthetic polypeptide
NQPPASMEKLSFMKPVPGAQKETLKVMKGVAQGLHTLHKADIIHGSLHQNNVFALNREQGIVGDFDFTKSVSQRASVNMMVGDLSLMSPELKMGKPASPGSDLYAYGCLLLWDDKVKSLLCSLICYRSSMTAEQVLNAECFLMPKEQSVPNPEKDTEYTLYKKEEEIKTENLDKCMEKTRNGEANFDC

SEQ ID NO: 35262 - protein, 427 aa, Artificial Sequence
  Synthetic polypeptide
SLVVESDFVKYEGKFANHVSGTLETALGKVKLNLGGSSRVESQSSFGTLRKQEVDLQQLIRDSAERTINLRNPVLQQVLEGRNEVLCVLTQKITTMQKCVISEHMQVEEKCGGIVGIQTKTVQVSATEDGNVTKDSNVVLEIPAATTIAYGVIELYVKLDGQFEFCLLRGKQGGFENKKRIDSVYLDPLVFREFAFIDMPDAAHGISSQDGPLSVLKQATLLLERNFHPFAELPEPQQTALSDIFQAVLFDDELLMVLEPVCDDLVSGLSPTVAVLGELKPRQQQDLVAFLQLVGCSLQGGCPGPEDAGSKQLFMTAYFLVSALAEMPDSAAALLGTCCKLQIIPTLCHLLRALSDDGVSDLEDPTLTPLKDTERFGIVQRLFASADISLERLKSSVKAVILKDSKVFPLLLCITLNGLCALGREHS

SEQ ID NO: 35263 - protein, 36 aa, Artificial Sequence
  Synthetic polypeptide
GFGTLTEQLLASLLLSLQVAYRGTSPCDHWSWSRTL

SEQ ID NO: 35264 - protein, 105 aa, Artificial Sequence
  Synthetic polypeptide
LSNYWLRCSSACRWPIVGLHLVITGRGVGLCEIRGQVCKPREWNPGDCTGEGQAEPGGQQPRREPVFIWNPEEAGGGFAAAHQRLCRENNKSEKPCAPAGAGRKE

SEQ ID NO: 35265 - protein, 71 aa, Artificial Sequence
  Synthetic polypeptide
ACLVEHPCGGLLPALVNPESAFSWVIALVERLARAAHGRPPRRINAAAEQREGIGAWSPDIWNTWSWSRTL

SEQ ID NO: 35266 - protein, 120 aa, Artificial Sequence
  Synthetic polypeptide
LPWWNASPEQRTVGPRGGLTQRLNSGKESALGVQTSGTRGRGVGLCEIRGQVCKPREWNPGDCTGEGQAEPGGQQPRREPVFIWNPEEAGGGFAAAHQRLCRENNKSEKPCAPAGAGRKE

SEQ ID NO: 35267 - protein, 441 aa, Artificial Sequence
  Synthetic polypeptide
TAGRNRRLESRHLEHVVVESDFVKYEGKFANHVSGTLETALGKVKLNLGGSSRVESQSSFGTLRKQEVDLQQLIRDSAERTINLRNPVLQQVLEGRNEVLCVLTQKITTMQKCVISEHMQVEEKCGGIVGIQTKTVQVSATEDGNVTKDSNVVLEIPAATTIAYGVIELYVKLDGQFEFCLLRGKQGGFENKKRIDSVYLDPLVFREFAFIDMPDAAHGISSQDGPLSVLKQATLLLERNFHPFAELPEPQQTALSDIFQAVLFDDELLMVLEPVCDDLVSGLSPTVAVLGELKPRQQQDLVAFLQLVGCSLQGGCPGPEDAGSKQLFMTAYFLVSALAEMPDSAAALLGTCCKLQIIPTLCHLLRALSDDGVSDLEDPTLTPLKDTERFGIVQRLFASADISLERLKSSVKAVILKDSKVFPLLLCITLNGLCALGREHS

SEQ ID NO: 35268 - protein, 76 aa, Artificial Sequence
  Synthetic polypeptide
TERVKCYHKQNTGALMPMRLKAQCLTGVEKRFIGCLGNGMKASTVAAAPLLPVYGEQILCRKATSNTIASHSLRWN

SEQ ID NO: 35269 - protein, 14 aa, Artificial Sequence
  Synthetic polypeptide
MRELSVIISKILEH

SEQ ID NO: 35270 - protein, 198 aa, Artificial Sequence
  Synthetic polypeptide
GRAQWLTPVMPALWEAQAGESLQQKMGKKQNGKSKKVEEAEPEEFVVEKVLDRRVVNGKVEYFLKWKGFTDADNTWEPEENLDCPELIEAFLNSQKAGKEKDGTKRKSLSDSESDDSKSKKKRDAADKPRGFARGLDPERIIGATDSSGELMFLMKWKDSDEADLVLAKEANMKCPQIVIAFYEERLTWHSCPEDEAQ

SEQ ID NO: 35271 - protein, 41 aa, Artificial Sequence
  Synthetic polypeptide
CQHFGRPRLVNHFSKKWEKNRMERVKKLKRQSLKNLSWKKY

SEQ ID NO: 35272 - protein, 14 aa, Artificial Sequence
  Synthetic polypeptide
ITSAKNGKKTEWKE

SEQ ID NO: 35273 - protein, 77 aa, Artificial Sequence
  Synthetic polypeptide
GRAQWLTPVMPALWEAQAGESLQQKMGKKQNGKSKKVEEAEPEEFVVEKVLDRRVVNGKVEYFLKWKGFTDADNTWE

SEQ ID NO: 35274 - protein, 116 aa, Artificial Sequence
  Synthetic polypeptide
GRAQWLTPVMPALWEAQAGESLQQKMGKKQNGKSKKVEEAEPEEFVVEKVLDRRVVNGKVEYFLKWKGFTEKLAKKKMVQKENLYLTVNLMTANQRRKEMLLTNQEDLPEVLILKE

SEQ ID NO: 35275 - protein, 130 aa, Artificial Sequence
  Synthetic polypeptide
GRAQWLTPVMPALWEAQAGESLQQKMGKKQNGKSKKVEEAEPEEFVVEKVLDRRVVNGKVEYFLKWKGFTDADNTWEPEENLDCPELIEAFLNSQKAGKEKDGTKRKSLSDSESDDSKSKKKRDAMRKRD

SEQ ID NO: 35276 - protein, 54 aa, Artificial Sequence
  Synthetic polypeptide
DPISTKKKKRISKTWWTPPVVSATWEAEAEGLLEPGSSRLTNQEDLPEVLILKE

SEQ ID NO: 35277 - protein, 19 aa, Artificial Sequence
  Synthetic polypeptide
SQLLGRLRQKDCLSLGVQG

SEQ ID NO: 35278 - protein, 78 aa, Artificial Sequence
  Synthetic polypeptide
AWEFKADKPRGFARGLDPERIIGATDSSGELMFLMKWKDSDEADLVLAKEANMKCPQIVIAFYEERLTWHSCPEDEAQ

SEQ ID NO: 35279 - protein, 21 aa, Artificial Sequence
  Synthetic polypeptide
AWEFKADKPRGFARGLDPERI

SEQ ID NO: 35280 - protein, 165 aa, Artificial Sequence
  Synthetic polypeptide
IPAGKNCPDVVQDFTGFMAGPIKEITKEIVHMAKKAAKICNNMLLAISMIGTAEAMNLGIRLGLDPKLLAKILNMSSGRCWSSDTYNPVPGVMDGVPSANNYQGGFGTTLMAKDLGLAQDSATSTKSPILLGSLAHQIYRMMCAKGYSKKDFSSVFQFLREEETF

SEQ ID NO: 35281 - protein, 63 aa, Artificial Sequence
  Synthetic polypeptide
RCHCYCGKRLEGHQAPNSKFLLEKTVQMLCKTSQDLWQGQSRKSLKRLCIWQKRRQRSATTCC

SEQ ID NO: 35282 - protein, 20 aa, Artificial Sequence
  Synthetic polypeptide
RDCAYGKKGGKDLQQHAVSY

SEQ ID NO: 35283 - protein, 92 aa, Artificial Sequence
  Synthetic polypeptide
IPAGKNCPDVVQDFTGFMAGPIKEITKEIVHMAKKAAKICNNMLLAISMIGTAEAMNLGIRLGLDPKLLAKILNMSSGRCWSSDTYNPVPGV

SEQ ID NO: 35284 - protein, 11 aa, Artificial Sequence
  Synthetic polypeptide
KMCSIFPSRCC

SEQ ID NO: 35285 - protein, 254 aa, Artificial Sequence
  Synthetic polypeptide
KCVVSSPADVAEKADRIITMLPTSINAIEAYSGANGILKKVKKGSLLIDSSTIDPAVSKELAKEVEKMGAVFMDAPVSGGVGAARSGNLTFMVGGVEDEFAAAQELLGCMGSNVVYCGAVGTGQAAKICNNMLLAISMIGTAEAMNLGIRLGLDPKLLAKILNMSSGRCWSSDTYNPVPGVMDGVPSANNYQGGFGTTLMAKDLGLAQDSATSTKSPILLGSLAHQIYRMMCAKGYSKKDFSSVFQFLREEETF

SEQ ID NO: 35286 - protein, 11 aa, Artificial Sequence
  Synthetic polypeptide
KCVVSSPADVA

SEQ ID NO: 35287 - protein, 181 aa, Artificial Sequence
  Synthetic polypeptide
KCVVSSPADVAEKADRIITMLPTSINAIEAYSGANGILKKVKKGSLLIDSSTIDPAVSKELAKEVEKMGAVFMDAPVSGGVGAARSGNLTFMVGGVEDEFAAAQELLGCMGSNVVYCGAVGTGQAAKICNNMLLAISMIGTAEAMNLGIRLGLDPKLLAKILNMSSGRCWSSDTYNPVPGV

SEQ ID NO: 35288 - protein, 12 aa, Artificial Sequence
  Synthetic polypeptide
SGVVISRAYFQV

SEQ ID NO: 35289 - protein, 23 aa, Artificial Sequence
  Synthetic polypeptide
YRVLIFRCRSCTIWEPHVYGGRS

SEQ ID NO: 35290 - protein, 246 aa, Artificial Sequence
  Synthetic polypeptide
VQNSRNKQFISFKLHAVLSSMMKSCAVQLCPNLDVNHPFVQRLHAADTPWPISHLLAASVIGCCDIACLFSGVGAARSGNLTFMVGGVEDEFAAAQELLGCMGSNVVYCGAVGTGQAAKICNNMLLAISMIGTAEAMNLGIRLGLDPKLLAKILNMSSGRCWSSDTYNPVPGVMDGVPSANNYQGGFGTTLMAKDLGLAQDSATSTKSPILLGSLAHQIYRMMCAKGYSKKDFSSVFQFLREEETF

SEQ ID NO: 35291 - protein, 173 aa, Artificial Sequence
  Synthetic polypeptide
VQNSRNKQFISFKLHAVLSSMMKSCAVQLCPNLDVNHPFVQRLHAADTPWPISHLLAASVIGCCDIACLFSGVGAARSGNLTFMVGGVEDEFAAAQELLGCMGSNVVYCGAVGTGQAAKICNNMLLAISMIGTAEAMNLGIRLGLDPKLLAKILNMSSGRCWSSDTYNPVPGV

SEQ ID NO: 35292 - protein, 18 aa, Artificial Sequence
  Synthetic polypeptide
KGPGMVLDAWEVLSKWSY

SEQ ID NO: 35293 - protein, 558 aa, Artificial Sequence
  Synthetic polypeptide
KDLEWYLMHGKFSLNGLTEVTQSLKMENEEFKKRFSDATSKAHQLEEDIVSVTHKAIEKETELDSLKDKLKKAQHEREQLECQLKTEKDEKELYKVHLKNTEIENTKLMSEVQTLKNLDGNKESVITHFKEEIGRLQLCLAEKENLQRTFLLTTSSKEDTCFLKEQLRKAEEQVQATRQEVVFLAKELSDAVNVRDRTMADLHTARLENEKVKKQLADAVAELKLNAMKKDQDKTDTLEHELRREVEDLKLRLQMAADHYKEKFKECQRLQKQINKLSDQSANNNNVFTKKTGNQQKVNDASVNTDPATSASTVDVKPSPSAAEADFDIVTKGQVCEMTKEIADKTEKYNKCKQLLQDEKAKCNKYADELAKMELKWKEQVKIAENVKLELAEVQDNYKELKRSLENPAERKMEDGADGAFYPDEIQRPPVRVPSWGLEDNVVCSQPARNFSRPDGLEDSEDSKEDENVPTAPDPPSQHLRGHGTGFCFDSSFDVHKKCPLCELMFPPNYDQSKFEEHVESHWKVCPMCSEQFPPDYDQQVFERHVQTHFDQNVLNFD

SEQ ID NO: 35294 - protein, 624 aa, Artificial Sequence
  Synthetic polypeptide
KDLEWYLMHGKFSLNGLTEVTQSLKMENEEFKKRFSDATSKAHQLEEDIVSVTHKAIEKETELDSLKDKLKKAQHEREQLECQLKTEKDEKELYKVHLKNTEIENTKLMSEVQTLKNLDGNKESVITHFKEEIGRLQLCLAEKENLQRTFLLTTSSKEDTCFLKEQLRKAEEQVQATRQEVVFLAKELSDAVNVRDRTMADLHTARLENEKVKKQLADAVAELKLNAMKKDQDKTDTLEHELRREVEDLKLRLQMAADHYKEKFKECQRLQKQINKLSDQSANNNNVFTKKTGNQQKVNDASVNTDPATSASTVDVKPSPSAAEADFDIVTKGQVCEMTKEIADKTEKYNKCKQLLQDEKAKCNKYADELAKMELKWKEQVKIAENVKLELAEVQDNYKLQLAEKDKEISGLISHLENLSREKELKRSLENPAERKMEGQNSQSPQCFKTCSEQNGYVLTLSNAQPVLQYGNPYASQETRDGADGAFYPDEIQRPPVRVPSWGLEDNVVCSQPARNFSRPDGLEDSEDSKEDENVPTAPDPPSQHLRGHGTGFCFDSSFDVHKKCPLCELMFPPNYDQSKFEEHVESHWKVCPMCSEQFPPDYDQQVFERHVQTHFDQNVLNFD

SEQ ID NO: 35295 - protein, 600 aa, Artificial Sequence
  Synthetic polypeptide
KDLEWYLMHGKFSLNGLTEVTQSLKMENEEFKKRFSDATSKAHQLEEDIVSVTHKAIEKETELDSLKDKLKKAQHEREQLECQLKTEKDEKELYKVHLKNTEIENTKLMSEVQTLKNLDGNKESVITHFKEEIGRLQLCLAEKENLQRTFLLTTSSKEDTCFLKEQLRKAEEQVQATRQEVVFLAKELSDAVNVRDRTMADLHTARLENEKVKKQLADAVAELKLNAMKKDQDKTDTLEHELRREVEDLKLRLQMAADHYKEKFKECQRLQKQINKLSDQSANNNNVFTKKTGNQQKVNDASVNTDPATSASTVDVKPSPSAAEADFDIVTKGQVCEMTKEIADKTEKYNKCKQLLQDEKAKCNKYADELAKMELKWKEQVKIAENVKLELAEVQDNYKELKRSLENPAERKMEGQNSQSPQCFKTCSEQNGYVLTLSNAQPVLQYGNPYASQETRDGADGAFYPDEIQRPPVRVPSWGLEDNVVCSQPARNFSRPDGLEDSEDSKEDENVPTAPDPPSQHLRGHGTGFCFDSSFDVHKKCPLCELMFPPNYDQSKFEEHVESHWKVCPMCSEQFPPDYDQQVFERHVQTHFDQNVLNFD

SEQ ID NO: 35296 - protein, 192 aa, Artificial Sequence
  Synthetic polypeptide
GRVQWLMPVIPALWEAEVGGSRGQEFKTSLTNMELKRSLENPAERKMEDGADGAFYPDEIQRPPVRVPSWGLEDNVVCSQPARNFSRPDGLEDSEDSKEDENVPTAPDPPSQHLRGHGTGFCFDSSFDVHKKCPLCELMFPPNYDQSKFEEHVESHWKVCPMCSEQFPPDYDQQVFERHVQTHFDQNVLNFD

SEQ ID NO: 35297 - protein, 8 aa, Artificial Sequence
  Synthetic polypeptide
PTWNLKGV

SEQ ID NO: 35298 - protein, 18 aa, Artificial Sequence
  Synthetic polypeptide
SGWIKRSGVQDQPDQHGT

SEQ ID NO: 35299 - protein, 234 aa, Artificial Sequence
  Synthetic polypeptide
GRVQWLMPVIPALWEAEVGGSRGQEFKTSLTNMELKRSLENPAERKMEGQNSQSPQCFKTCSEQNGYVLTLSNAQPVLQYGNPYASQETRDGADGAFYPDEIQRPPVRVPSWGLEDNVVCSQPARNFSRPDGLEDSEDSKEDENVPTAPDPPSQHLRGHGTGFCFDSSFDVHKKCPLCELMFPPNYDQSKFEEHVESHWKVCPMCSEQFPPDYDQQVFERHVQTHFDQNVLNFD

SEQ ID NO: 35300 - protein, 3 aa, Artificial Sequence
  Synthetic polypeptide
PGT

SEQ ID NO: 35301 - protein, 171 aa, Artificial Sequence
  Synthetic polypeptide
NPVSTKNTKISQELKRSLENPAERKMEDGADGAFYPDEIQRPPVRVPSWGLEDNVVCSQPARNFSRPDGLEDSEDSKEDENVPTAPDPPSQHLRGHGTGFCFDSSFDVHKKCPLCELMFPPNYDQSKFEEHVESHWKVCPMCSEQFPPDYDQQVFERHVQTHFDQNVLNFD

SEQ ID NO: 35302 - protein, 35 aa, Artificial Sequence
  Synthetic polypeptide
SGWIKRSGVQDQPDQHGETLSLLKIQKLARNLKGV

SEQ ID NO: 35303 - protein, 213 aa, Artificial Sequence
  Synthetic polypeptide
NPVSTKNTKISQELKRSLENPAERKMEGQNSQSPQCFKTCSEQNGYVLTLSNAQPVLQYGNPYASQETRDGADGAFYPDEIQRPPVRVPSWGLEDNVVCSQPARNFSRPDGLEDSEDSKEDENVPTAPDPPSQHLRGHGTGFCFDSSFDVHKKCPLCELMFPPNYDQSKFEEHVESHWKVCPMCSEQFPPDYDQQVFERHVQTHFDQNVLNFD

SEQ ID NO: 35304 - protein, 5 aa, Artificial Sequence
  Synthetic polypeptide
GQAGR

SEQ ID NO: 35305 - protein, 97 aa, Artificial Sequence
  Synthetic polypeptide
ARQEDENVPTAPDPPSQHLRGHGTGFCFDSSFDVHKKCPLCELMFPPNYDQSKFEEHVESHWKVCPMCSEQFPPDYDQQVFERHVQTHFDQNVLNFD

SEQ ID NO: 35306 - protein, 42 aa, Artificial Sequence
  Synthetic polypeptide
PGRKMRMCLLLLILQVNIYVGMGQAFALIPALMFTRSVPSVS

SEQ ID NO: 35307 - protein, 41 aa, Artificial Sequence
  Synthetic polypeptide
MHQESAASMTRRRWTMRSRTAMSPGPQRVPSAPKPSSAPCA

SEQ ID NO: 35308 - protein, 11 aa, Artificial Sequence
  Synthetic polypeptide
VDECTKNLQRV

SEQ ID NO: 35309 - protein, 122 aa, Artificial Sequence
  Synthetic polypeptide
WMNAPRICSEYDEEEVDYEESDSDESWTTESAISSEAILSSMCMNGGEEKPFACPVPGCKKRYKNVNGIKYHAKNGHRTQIRVRKPFKCRCGKSYKTAQGLRHHTINFHPPVSAEIIRKMQQ

SEQ ID NO: 35310 - protein, 85 aa, Artificial Sequence
  Synthetic polypeptide
WMNAPRICSEYDEEEVDYEESDSDESWTTESAISSEAILSSMCMNGGEEKPFACPVPGCKKRYKNVNGIKYHAKNGHRTQIRVRK

SEQ ID NO: 35311 - protein, 84 aa, Artificial Sequence
  Synthetic polypeptide
WMNAPRICSEYDEEEVDYEESDSDESWTTESAISSEAILSSMCMNGGEEKPFACPVPGCKKRYKNVNGIKYHAKNGHRTQIRVR

SEQ ID NO: 35312 - protein, 209 aa, Artificial Sequence
  Synthetic polypeptide
KSEGESVKYFLDNLDRIGQLNYFPSKQDILLARKATKGIVEHDFVIKKIPFKMVDVGGQRSQRQKWFQCFDGITSILFMVSSSEYDQVLMEDRRTNRLVESMNIFETIVNNKLFFNVSIILFLNKMDLLVEKVKTVSIKKHFPDFRGDPHRLEDVQRYLVQCFDRKRRNRSKPLFHHFTTAIDTENVRFVFHAVKDTILQENLKDIMLQ

SEQ ID NO: 35313 - protein, 42 aa, Artificial Sequence
  Synthetic polypeptide
LNWNTDHVIEYCPAVRKAERELSMLTWKEVPDASSEKVRGSR

SEQ ID NO: 35314 - protein, 307 aa, Artificial Sequence
  Synthetic polypeptide
ISLTRSDGFVRGFRFCFFLIFLLLPPCKKCFFTFRHDPQPGGTACPRLSIFSATSPQQTETAHASLHAWDPAQPYNARIFRRLDANGATNVSELQHHGDARSKSQQPLCFSPGPANAFRSQNEVEGCIDSPPCCHVKWEHEHHGTHDGDDGLPAGPDATPSHALAPASAPDTATPSPLPTPAPAPSTPSSPSTPSPAEPSTSPLPFPPSCTPSTSPDLATSAPAHRQPSTGFTSNTTDAANPDNTATPAHRGAPAKGGRRGSGREAAEISGTEPGSCHPLQTEEEGLGDVIGKESRRTHPDKHAASE

SEQ ID NO: 35315 - protein, 395 aa, Artificial Sequence
  Synthetic polypeptide
VSRDLMGLSGVSAFASSSFFSCCHHARSAFSPSAMIPSQVELPVPGSLSSLLHLHNRQRQPMPASMPGTLPNPTMPGSSAVLMPMERQMSVNSSIMGMQGPNLSNPCASPQVQPMHSEAKMRLKAALTHHPAAMSNGNMNTMGHMMEMMGSRQDQTPHHHMHSHPHQHQTLPPHHPYPHQHQHPAHHPHPQPHHQQNHPHHHSHSHLHAHPAHHQTSPHPPLHTGNQAQVSPATQQMQPTQTIQPPQPTGGRRRRVVDEDPDERRRKFLERNRAAATRCRQKRKVWVMSLEKKAEELTQTNMQLQNEVSMLKNEVAQLKQLLLTHKDCPITAMQKESQGYLSPESSPPASPVPACSQQQVIQHNTITTSSSVSEVVGSSTLSQLTTHRTDLNPIL

SEQ ID NO: 35316 - protein, 46 aa, Artificial Sequence
  Synthetic polypeptide
SPARWNCLSQALYLLCYISTTDRDSPCQPPCLGPCPTLQCQDLPPS

SEQ ID NO: 35317 - protein, 35 aa, Artificial Sequence
  Synthetic polypeptide
SQLLERLRAQGFLLMHEISLAFLGSILKMRSMGCS

SEQ ID NO: 35318 - protein, 281 aa, Artificial Sequence
  Synthetic polypeptide
AAEGSRVLVDARDKLGIPWQYSENEKHGMFLMAFENKAGLPVEPATFQLYVPALSALWRDSGIREAFSRRSEFQLGESVKYFLDNLDRIGQLNYFPSKQDILLARKATKGIVEHDFVIKKIPFKMVDVGGQRSQRQKWFQCFDGITSILFMVSSSEYDQVLMEDRRTNRLVESMNIFETIVNNKLFFNVSIILFLNKMDLLVEKVKTVSIKKHFPDFRGDPHRLEDVQRYLVQCFDRKRRNRSKPLFHHFTTAIDTENVRFVFHAVKDTILQENLKDIMLQ

SEQ ID NO: 35319 - protein, 264 aa, Artificial Sequence
  Synthetic polypeptide
AAEGSRVLVDARDKLGIPWQYSENEKHGMFLMAFENKAGLPVEPATFQLYVPALSALWRDSGIREAFSRRSEFQLNYFPSKQDILLARKATKGIVEHDFVIKKIPFKMVDVGGQRSQRQKWFQCFDGITSILFMVSSSEYDQVLMEDRRTNRLVESMNIFETIVNNKLFFNVSIILFLNKMDLLVEKVKTVSIKKHFPDFRGDPHRLEDVQRYLVQCFDRKRRNRSKPLFHHFTTAIDTENVRFVFHAVKDTILQENLKDIMLQ

SEQ ID NO: 35320 - protein, 62 aa, Artificial Sequence
  Synthetic polypeptide
AAEGSRVLVDARDKLGIPWQYSENEKHGMFLMAFENKAGLPVEPATFQLYVPALSALWRDSG

SEQ ID NO: 35321 - protein, 13 aa, Artificial Sequence
  Synthetic polypeptide
ARHGDRSAKAPVE

SEQ ID NO: 35322 - protein, 972 aa, Artificial Sequence
  Synthetic polypeptide
MSLMAHTCNPSIWGGQGGRIASVQEFETSMGNMAKPHLYKNKPGMVIDQLKHRLNKMEEECKLERNQSLKLKNDIENRPKKEQVLELERENEMLKTKNQELQSIIQAGKRSLPDSDKAILDILEHDRKEALEDRQELVNRIYNLQEEARQAEELRDKYLEEKEDLELKCSTLGKDCEMYKHRMNTVMLQLEEVERERDQAFHSRDEAQTQYSQCLIEKDKYRKQIRELEEKNDEMRIEMVRREACIVNLESKLRRLSKDSNNLDQSLPRNLPVTIISQDFGDASPRTNGQEADDSSTSEESPEDSKYFLPYHPPQRRMNLKGIQLQRAKSPISLKRTSDFQAKGHEEEGTDASPSSCGSLPITNSFTKMQPPRSRSSIMSITAEPPGNDSIVRRYKEDAPHRSTVEEDNDSGGFDALDLDDDSHERYSFGPSSIHSSSSSHQSEGLDAYDLEQVNLMFRKFSLERPFRPSVTSVGHVRGPGPSVQHTTLNGDSLTSQLTLLGGNARGSFVHSVKPGSLAEKAGLREGHQLLLLEGCIRGERQSVPLDTCTKEEAHWTIQRCSGPVTLHYKVNHEGYRKLVKDMEDGLITSGDSFYIRLNLNISSQLDACTMSLKCDDVVHVRDTMYQDRHEWLCARVDPFTDHDLDMGTIPSYSRAQQLLLVKLQRLMHRGSREEVDGTHHTLRALRNTLQPEEALSTSDPRVSPRLSRASFLFGQLLQFVSRSENKYKRMNSNERVRIISGSPLGSLARSSLDATKLLTEKQEELDPESELGKNLSLIPYSLVRAFYCERRRPVLFTPTVLAKTLVQRLLNSGGAMEFTICKSDIVTRDEFLRRQKTETIIYSREKNPNAFECIAPANIEAVAAKNKHCLLEAGIGCTRDLIKSNIYPIVLFIRVCEKNIKRFRKLLPRPETEEEFLRVCRLKEKELEALPCLYATVEPDMWGSVEELLRVVKDKIGEEQRKTIWVDEDQL

SEQ ID NO: 35323 - protein, 10 aa, Artificial Sequence
  Synthetic polypeptide
GLGQKERWTR

SEQ ID NO: 35324 - protein, 53 aa, Artificial Sequence
  Synthetic polypeptide
EAGQREKTVEQGAEREDPEHWFEVWDKRSAGPGKHRHLQLAKGRSERPECAVG

SEQ ID NO: 35325 - protein, 500 aa, Artificial Sequence
  Synthetic polypeptide
TTPHETRRRIRSMHKRLGRGRRRLSRELREKIQNTGLRFGTKGALDQVSTDTSSLRRADPKGRSALLADIQQGTRLRKVTQINDRSAPQIESSKGTNKEGGGSANTRGASTPPTLGDLFAGGFPVLRPAGQRDVAGGKTGQGPGSRAPSPRLPNKTISGPLIPPASPRLGNTSEAHGAARTAPPRPNVPAPPPPTPPPPPPPLPPPLPSSSPIKTPLVSPPGPLTKGNLPVVAPPVPCAPPPPPPPPPPTPPPLPPASVLSDKAVKPQLAPLHLPPIPPPLPLLPPCGYPGLKAEPASPAQDAQEPPAPPPPLPPYASCSPRASLPAPPLPGVNSSSETPPPLPPKSPSFQAPPQKAGAQALPAPPAPPGSQPFLQKKRHGRPGAGGGKLNPPPAPPARSPTTELSSKSQQATAWTPTQQPGGQLRNGSLHIIDDFESKFTFHSVEDFPPPDEYKPCQKIYPSKIPRSRTPGPWLQAEAVGQSSDDIKGRNSQVTQASCL

SEQ ID NO: 35326 - protein, 500 aa, Artificial Sequence
  Synthetic polypeptide
TTPHETRRRIRSMHKRLGRGRRRLSRELREKIQNTGLRFGTKGALDQVSTDTSSLRRADPKGRSALLADIQQGTRLRKVTQINDRSAPQIESSKGTNKEGGGSANTRGASTPPTLGDLFAGGFPVLRPAGQRDVAGGKTGQGPGSRAPSPRLPNKTISGPLIPPASPRLGNTSEAHGAARTAPPRPNVPAPPPPTPPPPPPPLPPPLPSSSPIKTPLVSPPGPLTKGNLPVVAPPVPCAPPPPPPPPPPTPPPLPPASVLSDKAVKPQLAPLHLPPIPPPLPLLPPCGYPGLKAEPASPAQDAQEPPAPPPPLPPYASCSPRASLPAPPLPGVNSSSETPPPLPPKSPSFQAPPQKAGAQALPAPPAPPGSQPFLQKKRHGRPGAGGGKLNPPPAPPARSPTTELSSKSQQATAWTPTQQPGGQLRNGSLHIIDDFESKFTFHSVEDFPPPDEYKPCQKIYPSKIPRSRTPGPWLQAEAVGQSSDDIKGRNSQLSLKTLR

SEQ ID NO: 35327 - protein, 48 aa, Artificial Sequence
  Synthetic polypeptide
NFHGKAWTVNCALSTIVTTHPPPPTPWQATGHVFLEQLAYSLQEPSYL

SEQ ID NO: 35328 - protein, 36 aa, Artificial Sequence
  Synthetic polypeptide
LLILHPPPHGRQLGTCSWSSLHTACRSQVISKDSSV

SEQ ID NO: 35329 - protein, 39 aa, Artificial Sequence
  Synthetic polypeptide
YNSNYSSSTPHPMAGNWARVPGAACIQLAGAKLSLKTLR

SEQ ID NO: 35330 - protein, 37 aa, Artificial Sequence
  Synthetic polypeptide
DQPGQHVHLHFNRPSSKDLCHNDKQTRLALGSRNGSQ

SEQ ID NO: 35331 - protein, 372 aa, Artificial Sequence
  Synthetic polypeptide
AQEVETSLDNMCTYISIDQVPRTYAIMISRPAWLWGAEMGANEHGVCIANEAINTREPAAEIEALLGMDLVRLGLERGETAKEALDVIVSLLEEHGQGGNYFEDANSCHSFQSAYLIVDRDEAWVLETIGKYWAAEKVTEGVRCICSQLSLTTKMDAEHPELRSYAQSQGWWTGEGEFNFSEVFSPVEDHLDCGAGKDSLEKQEESITVQTMMNTLRDKASGVCIDSEFFLTTASGVSVLPQNRSSPCIHYFTGTPDPSRSIFKPFIFVDDVKLVPKTQSPCFGDDDPAKKEPRFQEKPDRRHELYKAHEWARAIIESDQEQGRKLRSTMLELEKQGLEAMEEILTSSEPLDPAEVGDLFYDCVDTEIKFFK

SEQ ID NO: 35332 - protein, 43 aa, Artificial Sequence
  Synthetic polypeptide
HMPVVPATLEAEVRGSREPRKLRPAWTTCALTFQSTKFQGPMP

SEQ ID NO: 35333 - protein, 203 aa, Artificial Sequence
  Synthetic polypeptide
AQEVETSLDNMCTYISIDQVPRTYAIMISRPAWLWGAEMGANEHGVCIANEAINTREPAAEIEALLGMDLVRLGLERGETAKEALDVIVSLLEEHGQGGNYFEDANSCHSFQSAYLIVDRDEAWVLETIGKYWAAEKVTEGVRCICSQLSLTTKMDAEHPELRSYAQSQGWWTGEGEFNFSEVFSPVEDHLDCGAGKDSLEKQ

SEQ ID NO: 35334 - protein, 99 aa, Artificial Sequence
  Synthetic polypeptide
AQEVETSLDNMCTYISIDQVPRTYAIMISRPAWLWGAEMGANEHGVCIANEAINTREPAAEIEALLGMDLVRLGLERGETAKEALDVIVSLLEEHGQGG

SEQ ID NO: 35335 - protein, 98 aa, Artificial Sequence
  Synthetic polypeptide
AQEVETSLDNMCTYISIDQVPRTYAIMISRPAWLWGAEMGANEHGVCIANEAINTREPAAEIEALLGMDLVRNGQGELDIPVRRSWAPRERFSYKTRN

SEQ ID NO: 35336 - protein, 29 aa, Artificial Sequence
  Synthetic polypeptide
PHKVVRSLKDLSALYAQNLYPQMKWICIL

SEQ ID NO: 35337 - protein, 94 aa, Artificial Sequence
  Synthetic polypeptide
PQGGEVLEGFKCPVCSKFVSSDEMDLHLVMCLTKPRITYNEDVLSKDAGECAICLEELQQGDTIARLPCLCIYHKGCIDEWFEVNRSCPEHPSD

SEQ ID NO: 35338 - protein, 28 aa, Artificial Sequence
  Synthetic polypeptide
ERVLSTFKDLSALYAQNLYPQMKWICIL

SEQ ID NO: 35339 - protein, 5 aa, Artificial Sequence
  Synthetic polypeptide
AHLRI

SEQ ID NO: 35340 - protein, 20 aa, Artificial Sequence
  Synthetic polypeptide
GQAQWLTPVIPALWEAERMY

SEQ ID NO: 35341 - protein, 12 aa, Artificial Sequence
  Synthetic polypeptide
SQHFGRPRGCTE

SEQ ID NO: 35342 - protein, 70 aa, Artificial Sequence
  Synthetic polypeptide
PGTVAHTCNPSTLGGREDVLSKDAGECAICLEELQQGDTIARLPCLCIYHKGCIDEWFEVNRSCPEHPSD

SEQ ID NO: 35343 - protein, 10 aa, Artificial Sequence
  Synthetic polypeptide
KWQLHRFTRV

SEQ ID NO: 35344 - protein, 28 aa, Artificial Sequence
  Synthetic polypeptide
RIIMPYENIDLYKRMKSIKNGNYIDSQE

SEQ ID NO: 35345 - protein, 38 aa, Artificial Sequence
  Synthetic polypeptide
MYYVSIKCIKASWSLTTLGMCPQDLLRMCHRLNSLTRP

SEQ ID NO: 35346 - protein, 5 aa, Artificial Sequence
  Synthetic polypeptide
GCVTG

SEQ ID NO: 35347 - protein, 647 aa, Artificial Sequence
  Synthetic polypeptide
VLCLHKMYKSKLEPNHLGHVSSGPSKDVSQVEFSYPPLIPGDGHDSHTLPEEWKYLPFLALPDGAHNYQEDTVFFHLPPRNGNGATVFGISCYRQIEAKALKVRQADITRETVQKSVCVLSKLPLYGLLQAKLQLITHAYFEEKDFSQISILKELYEHMNSSLGGASLEGSQVYLGLSPRDLVLHFRHKVLILFKLILLEKKVLFYISPVNKLVGALMTVLSLFPGMIEHGLSDCSQYRPRKSMSEDGGLQESNPCADDFVSASTADVSHTNLGTIRKVMAGNHGEDAAMKTEEPLFQVEDSSKGQEPNDTNQYLKPPSRPSPDSSESDWETLDPSVLEDPNLKEREQLGSDQTNLFPKDSVPSESLPITVQPQANTGQVVLIPGLISGLEEDQYGMPLAIFTKGYLCLPYMALQQHHLLSDVTVRGFVAGATNILFRQQKHLSDAIVEVEEALIQIHDPELRKLLNPTTADLRFADYLVRHVTENRDDVFLDGTGWEGGDEWIRAQFAVYIHALLAATLQLDNEKILSDYGTTFVTAWKNTHNYRVWNSNKHPALAEINPNHPFQGQYSVSDMKLRFSHSVQNSERGKKIGNVMVTTSRNVVQTGKAVGQSVGGAFSSAKTAMSSWLSTFTTSTSQSLTEPPDEKP

SEQ ID NO: 35348 - protein, 629 aa, Artificial Sequence
  Synthetic polypeptide
VLCLHKMYKSKLEPNHLGHVSSGPSKDVSQVEFSYPPLIPGDGHDSHTLPEEWKYLPFLALPDGAHNYQEDTVFFHLPPRNGNGATVFGISCYRQIEAKALKVRQADITRETVQKSVCVLSKLPLYGLLQAKLQLITHAYFEEKDFSQISILKELYEHMNSSLGGASLEGSQVYLGLSPRDLVLHFRHKVLILFKLILLEKKVLFYISPVNKLVGALMTVLSLFPGMIEHGLSDCSQYRPRKSMSEDGGLQESNPCADDFVSASTADVSHTNLGTIRKVMAGNHGEDAAMKTEEPLFQVEDSSKGQEPNDTNQYLKPPSRPSPDSSESDWETLDPSVLEDPNLKEREQLGSDQTNLFPKDSVPSESLPITVQPQANTGQVVLIPGLISGLEEDQYGMPLAIFTKGYLCLPYMALQQHHLLSDVTVRGFVAGATNILFRQQKHLSDAIVEVEEALIQIHDPELRKLLNPTTADLRFADYLVRHVTENRDDVFLDGTGWEGGDEWIRAQFAVYIHALLAATLQLDNEKILSDYGTTFVTAWKNTHNYRVWNSNKHPALAEINPNSVQNSERGKKIGNVMVTTSRNVVQTGKAVGQSVGGAFSSAKTAMSSWLSTFTTSTSQSLTEPPDEKP

SEQ ID NO: 35349 - protein, 462 aa, Artificial Sequence
  Synthetic polypeptide
VLCLHKMYKSKLEPNHLGHVSSGPSKDVSQVEFSYPPLIPGDGHDSHTLPEEWKYLPFLALPDGAHNYQEDTVFFHLPPRNGNGATVFGISCYRQIEAKALKVRQADITRETVQKSVCVLSKLPLYGLLQAKLQLITHAYFEEKDFSQISILKELYEHMNSSLGGASLEGSQVYLGLSPRDLVLHFRHKVLILFKLILLEKKVLFYISPVNKLVGALMTVLSLFPGMIEHGLSDCSQYRPRKSMSEDGGLQESNPCADDFVSASTADVSHTNLGTIRKVMAGNHGEDAAMKTEEPLFQVEDSSKGQEPNDTNQYLKPPSRPSPDSSESDWETLDPSVLEDPNLKEREQLGSDQTNLFPKDSVPSESLPITVQPQANTGQVVLIPGLISGLEEDQYGMPLAIFTKCTQDVLPQANHSFKFLITDRRITPRPLRRRLVSATLTNMLQEKSCWKKHIKCRRRVQK

SEQ ID NO: 35350 - protein, 262 aa, Artificial Sequence
  Synthetic polypeptide
NQDLETSLCNKARRHLYKKGYLCLPYMALQQHHLLSDVTVRGFVAGATNILFRQQKHLSDAIVEVEEALIQIHDPELRKLLNPTTADLRFADYLVRHVTENRDDVFLDGTGWEGGDEWIRAQFAVYIHALLAATLQLDNEKILSDYGTTFVTAWKNTHNYRVWNSNKHPALAEINPNHPFQGQYSVSDMKLRFSHSVQNSERGKKIGNVMVTTSRNVVQTGKAVGQSVGGAFSSAKTAMSSWLSTFTTSTSQSLTEPPDEKP

SEQ ID NO: 35351 - protein, 60 aa, Artificial Sequence
  Synthetic polypeptide
KPACATKQDVISTKKDICVCLTWHCSSIIFSPMSPFGGLLLELLTSFFDNRNTSVMPLWK

SEQ ID NO: 35352 - protein, 65 aa, Artificial Sequence
  Synthetic polypeptide
HTCNPSTLGGRGGEDCLKPGSRNQPVQQSKTSSLQKRISVFALHGIAAASSSLRCHRSGVCCWSY

SEQ ID NO: 35353 - protein, 244 aa, Artificial Sequence
  Synthetic polypeptide
NQDLETSLCNKARRHLYKKGYLCLPYMALQQHHLLSDVTVRGFVAGATNILFRQQKHLSDAIVEVEEALIQIHDPELRKLLNPTTADLRFADYLVRHVTENRDDVFLDGTGWEGGDEWIRAQFAVYIHALLAATLQLDNEKILSDYGTTFVTAWKNTHNYRVWNSNKHPALAEINPNSVQNSERGKKIGNVMVTTSRNVVQTGKAVGQSVGGAFSSAKTAMSSWLSTFTTSTSQSLTEPPDEKP

SEQ ID NO: 35354 - protein, 251 aa, Artificial Sequence
  Synthetic polypeptide
NQDLETSLCNKARRHLYKKGYLCLPYMALQQHHLLSDVTVRGFVAGATNILFRQQKHLSDAIVEVEEALIQIHDPELRKLLNPTTADLRFADYLVRHVTENRDDVFLDGTGWEGGDEWIRAQFAVYIHALLAATLQLVLFRIVNVAKKLETSWSQLAGMLYKQEKLLASQLEELFPVQRQLCLHGFPLSPLPPPKVSLSHQMRSLEQGVRGCYCFLRFKCPLSVCCSQAVTSHRSTAGDHMSNCLHGCCSK

SEQ ID NO: 35355 - protein, 248 aa, Artificial Sequence
  Synthetic polypeptide
ALQFRGYLCLPYMALQQHHLLSDVTVRGFVAGATNILFRQQKHLSDAIVEVEEALIQIHDPELRKLLNPTTADLRFADYLVRHVTENRDDVFLDGTGWEGGDEWIRAQFAVYIHALLAATLQLDNEKILSDYGTTFVTAWKNTHNYRVWNSNKHPALAEINPNHPFQGQYSVSDMKLRFSHSVQNSERGKKIGNVMVTTSRNVVQTGKAVGQSVGGAFSSAKTAMSSWLSTFTTSTSQSLTEPPDEKP

SEQ ID NO: 35356 - protein, 69 aa, Artificial Sequence
  Synthetic polypeptide
TQDFQAAMSHDCATALQPELYSLEDICVCLTWHCSSIIFSPMSPFGGLLLELLTSFFDNRNTSVMPLWK

SEQ ID NO: 35357 - protein, 230 aa, Artificial Sequence
  Synthetic polypeptide
ALQFRGYLCLPYMALQQHHLLSDVTVRGFVAGATNILFRQQKHLSDAIVEVEEALIQIHDPELRKLLNPTTADLRFADYLVRHVTENRDDVFLDGTGWEGGDEWIRAQFAVYIHALLAATLQLDNEKILSDYGTTFVTAWKNTHNYRVWNSNKHPALAEINPNSVQNSERGKKIGNVMVTTSRNVVQTGKAVGQSVGGAFSSAKTAMSSWLSTFTTSTSQSLTEPPDEKP

SEQ ID NO: 35358 - protein, 237 aa, Artificial Sequence
  Synthetic polypeptide
ALQFRGYLCLPYMALQQHHLLSDVTVRGFVAGATNILFRQQKHLSDAIVEVEEALIQIHDPELRKLLNPTTADLRFADYLVRHVTENRDDVFLDGTGWEGGDEWIRAQFAVYIHALLAATLQLVLFRIVNVAKKLETSWSQLAGMLYKQEKLLASQLEELFPVQRQLCLHGFPLSPLPPPKVSLSHQMRSLEQGVRGCYCFLRFKCPLSVCCSQAVTSHRSTAGDHMSNCLHGCCSK

SEQ ID NO: 35359 - protein, 87 aa, Artificial Sequence
  Synthetic polypeptide
QLRVFWQWNKLPWENELTDMLEADPGREEGILNHMVCLFSKLYQKLNLKKLWQNLTLCSKKDMRISLISSNNIASPCSYFRLESAMY

SEQ ID NO: 35360 - protein, 10 aa, Artificial Sequence
  Synthetic polypeptide
KLTQAGKKVY

SEQ ID NO: 35361 - protein, 190 aa, Artificial Sequence
  Synthetic polypeptide
PRQGRRYTKSHGLLVQQALPKAKLKEIVAESDVMLKEGYENFFDKLQQHSIPVFIFSAGIGDVLEEVIRQAGVYHPNVKVVSNFMDFDETGVLKGFKGELIHVFNKHDGALRNTEYFNQLKDNSNIILLGDSQGDLRMADGVANVEHILKIGYLNDRVDELLEKYMDSYDIVLVQDESLEVANSILQKIL

SEQ ID NO: 35362 - protein, 98 aa, Artificial Sequence
  Synthetic polypeptide
PRQGRRYTKSHGLLVQQALPKAKLKEIVAESDVMLKEGYENFFDKLQQHSIPVFIFSAGIGDVLEEVIRQAGVYHPNVKVVSNFMDFDETVRISNRSS

SEQ ID NO: 35363 - protein, 29 aa, Artificial Sequence
  Synthetic polypeptide
FQHFGRLKQEDHLSPGVRDQPGQHNNNGL

SEQ ID NO: 35364 - protein, 263 aa, Artificial Sequence
  Synthetic polypeptide
AQEFETSLGNIIITDFDMTLSRFSYKGKRCPTCHNIIDNCKLVTDECRKKLLQLKEKYYAIEVDPVLTVEEKYPYMVEWYTKSHGLLVQQALPKAKLKEIVAESDVMLKEGYENFFDKLQQHSIPVFIFSAGIGDVLEEVIRQAGVYHPNVKVVSNFMDFDETGVLKGFKGELIHVFNKHDGALRNTEYFNQLKDNSNIILLGDSQGDLRMADGVANVEHILKIGYLNDRVDELLEKYMDSYDIVLVQDESLEVANSILQKIL

SEQ ID NO: 35365 - protein, 171 aa, Artificial Sequence
  Synthetic polypeptide
AQEFETSLGNIIITDFDMTLSRFSYKGKRCPTCHNIIDNCKLVTDECRKKLLQLKEKYYAIEVDPVLTVEEKYPYMVEWYTKSHGLLVQQALPKAKLKEIVAESDVMLKEGYENFFDKLQQHSIPVFIFSAGIGDVLEEVIRQAGVYHPNVKVVSNFMDFDETVRISNRSS

SEQ ID NO: 35366 - protein, 20 aa, Artificial Sequence
  Synthetic polypeptide
AQEFETSLGNIIITDFDMTL

SEQ ID NO: 35367 - protein, 530 aa, Artificial Sequence
  Synthetic polypeptide
ILALPPASWGCVFEGVQYQEGEEFQPEGSKCTKCSCTGGRTQCVREVCPILSCPQHLSHIPPGQCCPKCLGQRKVFDLPFGSCLFRSDVYDNGSSFLYDNCTACTCRDSTVVCKRKCSHPGGCDQGQEGCCEECLLRVPPEDIKVCKFGNKIFQDGEMWSSINCTICACVKGRTECRNKQCIPISSCPQGKILNRKGCCPICTEKPGVCTVFGDPHYNTFDGRTFNFQGTCQYVLTKDCSSPASPFQVLVKNDARRTRSFSWTKSVELVLGESRVSLQQHLTVRWNGSRIALPCRAPHFHIDLDGYLLKVTTKAGLEISWDGDSFVEVMAAPHLKGKLCGLCGNYNGHKRDDLIGGDGNFKFDVDDFAESWRVESNEFCNRPQRKPVPELCQGTVKVKLRAHRECQKLKSWEFQTCHSTVDYATFYRSCVTDMCECPVHKNCYCESFLAYTRACQREGIKVHWEPQQNCAATQCKHGAVYDTCGPGCIKTCDNWNEIGPCNKPCVAGCHCPANLVLHKGRCIKPVLCPQR

SEQ ID NO: 35368 - protein, 41 aa, Artificial Sequence
  Synthetic polypeptide
LCHLPAGAVCLRVCSIKKGRNFSQKEANVPSVPALEAGHNV

SEQ ID NO: 35369 - protein, 24 aa, Artificial Sequence
  Synthetic polypeptide
NSAADGSELILNSSSATCQLGLCV

SEQ ID NO: 35370 - protein, 37 aa, Artificial Sequence
  Synthetic polypeptide
ILALPPASWGCVFEGVQYQEGEEFQPEGSKCTKCSCT

SEQ ID NO: 35371 - protein, 35 aa, Artificial Sequence
  Synthetic polypeptide
LCHLPAGAVCLRVCSIKKGRNFSQKEANVPSVPAL

SEQ ID NO: 35372 - protein, 559 aa, Artificial Sequence
  Synthetic polypeptide
GRKFISLALPSLPPCKDTVFLSFGGCSNKAPSWKQRQQPLPDTKPASTLILDFPAFRTVRNKFLFFGGRTQCVREVCPILSCPQHLSHIPPGQCCPKCLGQRKVFDLPFGSCLFRSDVYDNGSSFLYDNCTACTCRDSTVVCKRKCSHPGGCDQGQEGCCEECLLRVPPEDIKVCKFGNKIFQDGEMWSSINCTICACVKGRTECRNKQCIPISSCPQGKILNRKGCCPICTEKPGVCTVFGDPHYNTFDGRTFNFQGTCQYVLTKDCSSPASPFQVLVKNDARRTRSFSWTKSVELVLGESRVSLQQHLTVRWNGSRIALPCRAPHFHIDLDGYLLKVTTKAGLEISWDGDSFVEVMAAPHLKGKLCGLCGNYNGHKRDDLIGGDGNFKFDVDDFAESWRVESNEFCNRPQRKPVPELCQGTVKVKLRAHRECQKLKSWEFQTCHSTVDYATFYRSCVTDMCECPVHKNCYCESFLAYTRACQREGIKVHWEPQQNCAATQCKHGAVYDTCGPGCIKTCDNWNEIGPCNKPCVAGCHCPANLVLHKGRCIKPVLCPQR

SEQ ID NO: 35373 - protein, 13 aa, Artificial Sequence
  Synthetic polypeptide
EINSCSLEAGHNV

SEQ ID NO: 35374 - protein, 24 aa, Artificial Sequence
  Synthetic polypeptide
IPVLWRQDTMCERSLSHSLLSPAP

SEQ ID NO: 35375 - protein, 18 aa, Artificial Sequence
  Synthetic polypeptide
PTRARRLHGVWRSPLQHF

SEQ ID NO: 35376 - protein, 332 aa, Artificial Sequence
  Synthetic polypeptide
DQPDQQEPGVCTVFGDPHYNTFDGRTFNFQGTCQYVLTKDCSSPASPFQVLVKNDARRTRSFSWTKSVELVLGESRVSLQQHLTVRWNGSRIALPCRAPHFHIDLDGYLLKVTTKAGLEISWDGDSFVEVMAAPHLKGKLCGLCGNYNGHKRDDLIGGDGNFKFDVDDFAESWRVESNEFCNRPQRKPVPELCQGTVKVKLRAHRECQKLKSWEFQTCHSTVDYATFYRSCVTDMCECPVHKNCYCESFLAYTRACQREGIKVHWEPQQNCAATQCKHGAVYDTCGPGCIKTCDNWNEIGPCNKPCVAGCHCPANLVLHKGRCIKPVLCPQR

SEQ ID NO: 35377 - protein, 41 aa, Artificial Sequence
  Synthetic polypeptide
GQEFETSLTNKSPAFARCLEIPTTTLLTVGHLTFRGRVSTF

SEQ ID NO: 35378 - protein, 388 aa, Artificial Sequence
  Synthetic polypeptide
GQAQWLTPLIPALWEAEAGGSRGQEIETILANKGILAMKPHFLKINVSELSLWVIQGCFWLFGTVILKYLTSKIFGIADDAHIGNLLTSKFFSYKDFDTLLYTCAAEFDFMEKETPLRYTKTLLLPVVLVVFVAIVRKIISDMWGVLAKQQTHVRKHQFDHGELVYHALQLLAYTALGILIMRLKLFLTPHMCVMASLICSRQLFGWLFCKVHPGAIVFAILAAMSIQGSANLQTQWNIVGEFSNLPQEELIEWIKYSTKPDAVFAGAMPTMASVKLSALRPIVNHPHYEDAGLRARTKIVYSMYSRKAAEEVKRELIKLKVNYYILEESWCVRRSKPGCSMPEIWDVEDPANAGKTPLCNLLVKDSKPHFTTVFQNSVYKVLEVVKE

SEQ ID NO: 35379 - protein, 28 aa, Artificial Sequence
  Synthetic polypeptide
SQHFGRLRQVDHEVRRSRPSWLTRVFWQ

SEQ ID NO: 35380 - protein, 16 aa, Artificial Sequence
  Synthetic polypeptide
QGYSGNETTFPENKCI

SEQ ID NO: 35381 - protein, 149 aa, Artificial Sequence
  Synthetic polypeptide
GQAQWLTPLIPALWEAEAGGSRGQEIETILANKGILAMKPHFLKINVSELSLWVIQGCFWLFGTVILKYLTSKIFGIADDAHIGNLLTSKFFSYKDFDTLLYTCAAEFDFMEKETPLRYTKTLLLPVVLVVFVAIVRKIISDMWGVLAK

SEQ ID NO: 35382 - protein, 51 aa, Artificial Sequence
  Synthetic polypeptide
SRRVENLDPDRRPTFIGEMALQLIDEGSEIGVFGQTASRSSAAERHSQKTR

SEQ ID NO: 35383 - protein, 373 aa, Artificial Sequence
  Synthetic polypeptide
ILTGGPPLLEKWLCNLLTKDQRLVYSGRLLPDHLQLKDILRKQDEYHMVHLVCTSRTPPSSPKSSTNRESHEALASSSNSSSDHSGSTTPSSGQETLSLAVGSSSEGLRQRTLPQAQTDQAQSHQFPYVMQGNVDNQFPGQAAPPGFPVYPAFSPLQMLWWQQMYAHQYYMQYQAAVSAQATSNVNPTQPTTSQPLNLAHVPGEEPPPAPNLVAQENRPMNENVQMNAQGGPVLNEEDFNRDWLDWMYTFSRAAILLSIVYFYSSFSRFIMVMGAMLLVYLHQAGWFPFRQEGGHQQAPNNNAEVNNDGQNANNLELEEMERLMDDGLEDESGEDGGEDASAIQRPGLMASAWSFITTFFTSLIPEGPPQVAN

SEQ ID NO: 35384 - protein, 14 aa, Artificial Sequence
  Synthetic polypeptide
QEAHLYWRNGSATY

SEQ ID NO: 35385 - protein, 19 aa, Artificial Sequence
  Synthetic polypeptide
KGHQTSSNMTWLAACYRLH

SEQ ID NO: 35386 - protein, 313 aa, Artificial Sequence
  Synthetic polypeptide
LGWQPVIDYIDSKFEDYLNAESRVNRRQMPDNRVQCCLYFIAPSGHGLKPLDIEFMKRLHEKVNIIPLIAKADTLTPEECQQFKKQIMKEIQEHKIKIYEFPETDDEEENKLVKKIKDRLPLAVVGSNTIIEVNGKRVRGRQYPWGVAEVENGEHCDFTILRNMLIRTHMQDLKDVTNNVHYENYRSRKLAAVTYNGVDNNKNKGQLTKSPLAQMEEERREHVAKMKKMEMEMEQVFEMKVKEKVQKLKDSEAELQRRHEQMKKNLEAQHKELEEKRRQFEDEKANWEAQQRILEQQNSSRTLEKNKKKGKIF

SEQ ID NO: 35387 - protein, 26 aa, Artificial Sequence
  Synthetic polypeptide
RSPNFKQHDLAGSLLSTTLIVNLRTT

SEQ ID NO: 35388 - protein, 112 aa, Artificial Sequence
  Synthetic polypeptide
LGWQPVIDYIDSKFEDYLNAESRVNRRQMPDNRVQCCLYFIAPSGHGLKPLDIEFMKRLHEKVNIIPLIAKADTLTPEECQQFKKQIMKEIQEHKIKIYEFPETAKKKKKKK

SEQ ID NO: 35389 - protein, 271 aa, Artificial Sequence
  Synthetic polypeptide
LGWQPVIDYIDSKFEDYLNAESRVNRRQMPDNRVQCCLYFIAPSGHGLKPLDIEFMKRLHEKVNIIPLIAKADTLTPEECQQFKKQIMKEIQEHKIKIYEFPETDDEEENKLVKKIKDRLPLAVVGSNTIIEVNGKRVRGRQYPWGVAEVENGEHCDFTILRNMLIRTHMQDLKDVTNNVHYENYRSRKLAAVTYNGVDNNKNKGQLTKSPLAQMEEERREHVAKMKKMEMEMEQVFEMKVKEKVQKLKDSEAEVISLISHLLADIVFLFK

SEQ ID NO: 35390 - protein, 289 aa, Artificial Sequence
  Synthetic polypeptide
ARMMTPPTRTEPSHGPHRGVCVKGLQHWHRFCTELNQPTLPNIRKWKGPRGCWKAVVAEKPSSQLQKGAGYAGFLWDAAAGMELRDAGSQESSPSNGHGKLAGPSPYLGRFKVGSHDLTLVNLHLAALTLLGSENPSKNHSDGHRLASFAQTLQETLKGEKDVIILGDFGQGPDSNDYDILRKEKFHHLIPAHTFTNISTKNPQGSKSLDNIWISKSLKKVFTGHWAVVREGLTNPWIPDNWSWGGVASEHCPVLAEFYTEKDWSKKDAPRNGSGVALERSEANIKHER

SEQ ID NO: 35391 - protein, 12 aa, Artificial Sequence
  Synthetic polypeptide
RACSIGTGSARS

SEQ ID NO: 35392 - protein, 68 aa, Artificial Sequence
  Synthetic polypeptide
LLQPCIRPLLSKDDDTSHPHRAITWTTSWRVCKGPAALAQVLHGAKPADPAQHPQVEGAPGMLEGCCC

SEQ ID NO: 35393 - protein, 114 aa, Artificial Sequence
  Synthetic polypeptide
VRSEMMLLHILKRSQAYHRSTWKGTALFSPALPKGAGLWSSSGCAMTVSSPPTAANISTLFHLCRSSMLGFTAAWCETEWEHSCKENQKFKSHIWEVSWIRTRGKQFLKDVQRF

SEQ ID NO: 35394 - protein, 11 aa, Artificial Sequence
  Synthetic polypeptide
PSCIRVECGVR

SEQ ID NO: 35395 - protein, 18 aa, Artificial Sequence
  Synthetic polypeptide
HRRWVISAFPSEVHLPET

SEQ ID NO: 35396 - protein, 21 aa, Artificial Sequence
  Synthetic polypeptide
FLHFHLRCIFPKPEEIYRKLV

SEQ ID NO: 35397 - protein, 397 aa, Artificial Sequence
  Synthetic polypeptide
GRSQDGRIGTALVYSSQRERRRRRVISAFPSENHVNPAMDFTQTPPGMLALDNMLYFAKHHQDAYIRIVLENSSREDKHECPFGRSSIELTKMLCEILKVGELPSETCNDFHPMFFTHDRSFEEFFCICIQLLNKTWKEMRATSEDFNKVMQVVKEQVMRALTTKPSSLDQFKSKLQNLSYTEILKIRQSERMNQEDFQSRPILELKEKIQPEILELIKQQRLNRLVEGTCFRKLNARRRQDKFWYCRLSPNHKVLHYGDLEESPQGEVPHDSLQDKLPVADIKAVVTGKDCPHMKEKGALKQNKEVLELAFSILYDSNCQLNFIAPDKHEYCIWTDGLNALLGKDMMSDLTRNDLDTLLSMEIKLRLLDLENIQIPDAPPPIPKEPSNYDFVYDCN

SEQ ID NO: 35398 - protein, 62 aa, Artificial Sequence
  Synthetic polypeptide
FLHFHLRIMSTLPWTSRRLHLGCWLWTTCCTLPSTTKMPTSGLCLRTVVEKTSMNVPLAAVV

SEQ ID NO: 35399 - protein, 114 aa, Artificial Sequence
  Synthetic polypeptide
GRSQDGRIGTALVYSSQRERRRRRVISAFPSENHVNPAMDFTQTPPGMLALDNMLYFAKHHQDAYIRIVLENSSREDKHECPFGRSSIELTKMLCEILKVGELHHLSPEKFTLP

SEQ ID NO: 35400 - protein, 83 aa, Artificial Sequence
  Synthetic polypeptide
GRSQDGRIGTALVYSSQRERRRRRVISAFPSENHVNPAMDFTQTPPGMLALDNMLYFAKHHQDAYIRIVLENSSREDKHECPF

SEQ ID NO: 35401 - protein, 58 aa, Artificial Sequence
  Synthetic polypeptide
FLHFHLRIMSTLPWTSRRLHLGCWLWTTCCTLPSTTKMPTSGLCLRTVVEKTSMNVPL

SEQ ID NO: 35402 - protein, 528 aa, Artificial Sequence
  Synthetic polypeptide
RQPKMMAEADNIVTLQPFRDKCEPVFLFSVNGKIIEKIQGANAPLVNKKVINLIDEERKIAAGEMARPQYPEIPLVDSDSEVSEESPCESVQELYSIAIIKPDAVISKKVLEIKRKITKAGFIIEAEHKTVLTEEQVVNFYSRIADQCDFEEFVSFMTSGLSYILVVSQGSKHNPPSEETEPQTDTEPNERSEDQPEVEAQVTPGMMKNKQDSLQEYLERQHLAQLCDIEEDAANVAKFMDAFFPDFKKMKSMKLEKTLALLRPNLFHERKDDVLRIIKDEDFKILEQRQVVLSEKEAQALCKEYENEDYFNKLIENMTSGPSLALVLLRDNGLQYWKQLLGPRTVEEAIEYFPESLCAQFAMDSLPVNQLYGSDSLETAEREIQHFFPLQSTLGLIKPHATSEQREQILKIVKEAGFDLTQVKKMFLTPEQIEKIYPKVTGKDFYKDLLEMLSVGPSMVMILTKWNAVAEWRRLMGPTDPEEAKLLSPDSIRAQFGISKLKNIVHGASNAYEAKEVVNRLFEDPEEN

SEQ ID NO: 35403 - protein, 14 aa, Artificial Sequence
  Synthetic polypeptide
CLEEMKTTKNDGRS

SEQ ID NO: 35404 - protein, 110 aa, Artificial Sequence
  Synthetic polypeptide
RQPKMMAEADNIVTLQPFRDKCEPVFLFSVNGKIIEKIQGANAPLVNKKVINLIDEERKIAAGEMARPQYPEIPLVDSDSEVSEESPCESVQELYSIAIIKPDAVISKKV

SEQ ID NO: 35405 - protein, 145 aa, Artificial Sequence
  Synthetic polypeptide
RQPKMMAEADNIVTLQPFRDKCEPVFLFSVNGKIIEKIQGANAPLVNKKVINLIDEERKIAAGEMARPQYPEIPLVDSDSEVSEESPCESVQELYSIAIIKPDAVISKKVLEIKRKITKAGFIIEAEHKTVLTEEQVVNFYSRIA

SEQ ID NO: 35406 - protein, 49 aa, Artificial Sequence
  Synthetic polypeptide
RQPKMMAEADNIVTLQPFRDKCEPVFLFSVMMFCVLLKMKTSKYWSKDK

SEQ ID NO: 35407 - protein, 90 aa, Artificial Sequence
  Synthetic polypeptide
KKFWRWMVLMVNKCECTQGHQTLKNDETWIGIYTVKDCYPVQETFTINYSVILSTRFFDIQLGIKDPSVFTPPSTCQMAQLEKMSEDCSW

SEQ ID NO: 35408 - protein, 37 aa, Artificial Sequence
  Synthetic polypeptide
WSTNVNVLKATKHLKMMKPGLASIQSRIAILSRKPLP

SEQ ID NO: 35409 - protein, 26 aa, Artificial Sequence
  Synthetic polypeptide
KKFWRWMVLMVNKCECTQGHQTLKND

SEQ ID NO: 35410 - protein, 17 aa, Artificial Sequence
  Synthetic polypeptide
WSTNVNVLKATKHLKMM

SEQ ID NO: 35411 - protein, 2 aa, Artificial Sequence
  Synthetic polypeptide
ND

SEQ ID NO: 35412 - protein, 66 aa, Artificial Sequence
  Synthetic polypeptide
NDETWIGIYTVKDCYPVQETFTINYSVILSTRFFDIQLGIKDPSVFTPPSTCQMAQLEKMSEDCSW

SEQ ID NO: 35413 - protein, 49 aa, Artificial Sequence
  Synthetic polypeptide
KKFWRWMVLMVNKCECTQGHQTLKNGKMMKPGLASIQSRIAILSRKPLP

SEQ ID NO: 35414 - protein, 29 aa, Artificial Sequence
  Synthetic polypeptide
KKFWRWMVLMVNKCECTQGHQTLKNGKMM

SEQ ID NO: 35415 - protein, 784 aa, Artificial Sequence
  Synthetic polypeptide
EPWSSQLLIVTQSPVKINQISLDESGEHMGVCSEDGKVQVFGLYSGEEFHETFDCPIKIIAVHPHFVRSSCKQFVTGGKKLLLFERSWMNRWKSAVLHEGEGNIRSVKWRGHLIAWANNMGVKIFDIISKQRITNVPRDDISLRPDMYPCSLCWKDNVTLIIGWGTSVKVCSVKERHASEMRDLPSRYVEIVSQFETEFYISGLAPLCDQLVVLSYVKEISEKTEREYCARPRLDIIQPLSETCEEISSDALTVRGFQENECRDYHLEYSEGESLFYIVSPRDVVVAKERDQDDHIDWLLEKKKYEEALMAAEISQKNIKRHKILDIGLAYINHLVERGDYDIAARKCQKILGKNAALWEYEVYKFKEIGQLKAISPYLPRGDPVLKPLIYEMILHEFLESDYEGFATLIREWPGDLYNNSVIVQAVRDHLKKDSQNKTLLKTLAELYTYDKNYGNALEIYLTLRHKDVFQLIHKHNLFSSIKDKIVLLMDFDSEKAVDMLLDNEDKISIKKVVEELEDRPELQHVYLHKLFKRDHHKGQRYHEKQISLYAEYDRPNLLPFLRDSTHCPLEKALEICQQRNFVEETVYLLSRMGNSRSALKMIMEELHDVDKAIEFAKEQDDGELWEDLILYSIDKPPFITGLLNNIGTHVDPILLIHRIKEGMEIPNLRDSLVKILQDYNLQILLREGCKKILVADSLSLLKKMHRTQMKGVLVDEENICESCLSPILPSDAAKPFSVVVFHCRHMFHKECLPMPSMNSAAQFCNICSAKNRGPGSAILEMKK

SEQ ID NO: 35416 - protein, 4 aa, Artificial Sequence
  Synthetic polypeptide
PRVL

SEQ ID NO: 35417 - protein, 26 aa, Artificial Sequence
  Synthetic polypeptide
DFFYIVRTLVFTTPYRNPESCEDKSD

SEQ ID NO: 35418 - protein, 160 aa, Artificial Sequence
  Synthetic polypeptide
EPWSSQLLIVTQSPVKINQISLDESGEHMGVCSEDGKVQVFGLYSGEEFHETFDCPIKIIAVHPHFVRSSCKQFVTGGKKLLLFERSWMNRWKSAVLHEGEGNIRSVKWRGHLIAWANNMGVKIFDIISKQRITNVPRDDISLRPDMYPCSLCWKDNVTL

SEQ ID NO: 35419 - protein, 139 aa, Artificial Sequence
  Synthetic polypeptide
EPWSSQLLIVTQSPVKINQISLDESGEHMGVCSEDGKVQVFGLYSGEEFHETFDCPIKIIAVHPHFVRSSCKQFVTGGKKLLLFERSWMNRWKSAVLHEGEGNIRSVKWRGHLIAWANNMSKKPEAWRVAKKMKSYLNN

SEQ ID NO: 35420 - protein, 120 aa, Artificial Sequence
  Synthetic polypeptide
EPWSSQLLIVTQSPVKINQISLDESGEHMGVCSEDGKVQVFGLYSGEEFHETFDCPIKIIAVHPHFVRSSCKQFVTGGKKLLLFERSWMNRWKSAVLHEGEGNIRSVKWRGHLIAWANNM

SEQ ID NO: 35421 - protein, 84 aa, Artificial Sequence
  Synthetic polypeptide
EPWSSQLLIVTQSPVKINQISLDESGEHMGVCSEDGKVQVFGLYSGEEFHETFDCPIKIIAVHPHFVRSSCKQFVTGGKKVSAV

SEQ ID NO: 35422 - protein, 53 aa, Artificial Sequence
  Synthetic polypeptide
EPWSSQLLIVTQSPVKINQISLDESGEHMGVCSEDGKVQVFGLYSGEEFHETF

SEQ ID NO: 35423 - protein, 21 aa, Artificial Sequence
  Synthetic polypeptide
KQPEALIRSRCWCRASGNWVP

SEQ ID NO: 35424 - protein, 878 aa, Artificial Sequence
  Synthetic polypeptide
SLHMPATLQPTAMSRSSLRPSSEADAGAVLLETGSLEESTDESEEEESEEEPKLKYERLSNGVTEILQKDAASCMTVHDKFLALGTHYGKVYLLDVQGNITQKFDVSPVKINQISLDESGEHMGVCSEDGKVQVFGLYSGEEFHETFDCPIKIIAVHPHFVRSSCKQFVTGGKKLLLFERSWMNRWKSAVLHEGEGNIRSVKWRGHLIAWANNMGVKIFDIISKQRITNVPRDDISLRPDMYPCSLCWKDNVTLIIGWGTSVKVCSVKERHASEMRDLPSRYVEIVSQFETEFYISGLAPLCDQLVVLSYVKEISEKTEREYCARPRLDIIQPLSETCEEISSDALTVRGFQENECRDYHLEYSEGESLFYIVSPRDVVVAKERDQDDHIDWLLEKKKYEEALMAAEISQKNIKRHKILDIGLAYINHLVERGDYDIAARKCQKILGKNAALWEYEVYKFKEIGQLKAISPYLPRGDPVLKPLIYEMILHEFLESDYEGFATLIREWPGDLYNNSVIVQAVRDHLKKDSQNKTLLKTLAELYTYDKNYGNALEIYLTLRHKDVFQLIHKHNLFSSIKDKIVLLMDFDSEKAVDMLLDNEDKISIKKVVEELEDRPELQHVYLHKLFKRDHHKGQRYHEKQISLYAEYDRPNLLPFLRDSTHCPLEKALEICQQRNFVEETVYLLSRMGNSRSALKMIMEELHDVDKAIEFAKEQDDGELWEDLILYSIDKPPFITGLLNNIGTHVDPILLIHRIKEGMEIPNLRDSLVKILQDYNLQILLREGCKKILVADSLSLLKKMHRTQMKGVLVDEENICESCLSPILPSDAAKPFSVVVFHCRHMFHKECLPMPSMNSAAQFCNICSAKNRGPGSAILEMKK

SEQ ID NO: 35425 - protein, 35 aa, Artificial Sequence
  Synthetic polypeptide
GPHQKQMLVPCFWKLGPLKNLQMSLRKKRAKRNPS

SEQ ID NO: 35426 - protein, 853 aa, Artificial Sequence
  Synthetic polypeptide
SLHMPATLQPTAMSRSSLRPSSEADAGAVLLETGSLEESTDESEEEESEEEPKLKYERLSNGVTEILQKDAASCMTVHDKFLALGTHYGKVYLLDVQGNITQKFDVVQVFGLYSGEEFHETFDCPIKIIAVHPHFVRSSCKQFVTGGKKLLLFERSWMNRWKSAVLHEGEGNIRSVKWRGHLIAWANNMGVKIFDIISKQRITNVPRDDISLRPDMYPCSLCWKDNVTLIIGWGTSVKVCSVKERHASEMRDLPSRYVEIVSQFETEFYISGLAPLCDQLVVLSYVKEISEKTEREYCARPRLDIIQPLSETCEEISSDALTVRGFQENECRDYHLEYSEGESLFYIVSPRDVVVAKERDQDDHIDWLLEKKKYEEALMAAEISQKNIKRHKILDIGLAYINHLVERGDYDIAARKCQKILGKNAALWEYEVYKFKEIGQLKAISPYLPRGDPVLKPLIYEMILHEFLESDYEGFATLIREWPGDLYNNSVIVQAVRDHLKKDSQNKTLLKTLAELYTYDKNYGNALEIYLTLRHKDVFQLIHKHNLFSSIKDKIVLLMDFDSEKAVDMLLDNEDKISIKKVVEELEDRPELQHVYLHKLFKRDHHKGQRYHEKQISLYAEYDRPNLLPFLRDSTHCPLEKALEICQQRNFVEETVYLLSRMGNSRSALKMIMEELHDVDKAIEFAKEQDDGELWEDLILYSIDKPPFITGLLNNIGTHVDPILLIHRIKEGMEIPNLRDSLVKILQDYNLQILLREGCKKILVADSLSLLKKMHRTQMKGVLVDEENICESCLSPILPSDAAKPFSVVVFHCRHMFHKECLPMPSMNSAAQFCNICSAKNRGPGSAILEMKK

SEQ ID NO: 35427 - protein, 233 aa, Artificial Sequence
  Synthetic polypeptide
SLHMPATLQPTAMSRSSLRPSSEADAGAVLLETGSLEESTDESEEEESEEEPKLKYERLSNGVTEILQKDAASCMTVHDKFLALGTHYGKVYLLDVQGNITQKFDVSPVKINQISLDESGEHMGVCSEDGKVQVFGLYSGEEFHETFDCPIKIIAVHPHFVRSSCKQFVTGGKKLLLFERSWMNRWKSAVLHEGEGNIRSVKWRGHLIAWANNMSKKPEAWRVAKKMKSYLNN

SEQ ID NO: 35428 - protein, 115 aa, Artificial Sequence
  Synthetic polypeptide
RLPIPQPTTGYLIPELPAPAAPAPAPAAAAAAAAAASPVNQPAPATSPTGALAVPAAAAAAHPTPAATTRLSAAASSYISAATGASAPAAPTPLPLPEPEPTISNPAELQPPAET

SEQ ID NO: 35429 - protein, 536 aa, Artificial Sequence
  Synthetic polypeptide
TRSLFKGCQFLSPLQATSSLNSQLQQLQLQLQQQQQQQQQQPPPSTNQHPQPAPQAPSQSQQQPLQPTPPQQPPPASQQPPAPTSQLQQAPQPQQHQPHSHSQNQNQPSPTQQSSSPPQKPSQSPGHGLPSPLTPPNPLQLVNNPLASQAAAAAAAMSSIASSQAFGNALSSLQGVTGQLVTNAQGQIIGTIPLMPNPGPSSQAASGTQGLQVQPITPQLLTNAQGQIIATVIGNQILPVINTQGITLSPIKPGQQLHQPSQTSVGQAASQGNLLHLAHSQASMSQSPVRQASSSSSSSSSSSALSVGQLVSNPQTAAGEVDGVNLEEIREFAKAFKIRRLSLGLTQTQVGQALSATEGPAYSQSAICRHTILRSHFFLPQEAQENTIASSLTAKLNPGLLYPARFEKLDITPKSAQKIKPVLERWMAEAEARHRAGMQNLTEFIGSEPSKKRKRRTSFTPQALEILNAHFEKNTHPSGQEMTEIAEKLNYDREVVRVWFCNKRQALKNTIKRLKQHEPATAVPLEPLTDSLEENS

SEQ ID NO: 35430 - protein, 19 aa, Artificial Sequence
  Synthetic polypeptide
PEACLKAANSSAHYRLPHP

SEQ ID NO: 35431 - protein, 500 aa, Artificial Sequence
  Synthetic polypeptide
TRSLFKGCQFLSPLQATSSLNSQLQQLQLQLQQQQQQQQQQPPPSTNQHPQPAPQAPSQSQQQPLQPTPPQQPPPASQQPPAPTSQLQQAPQPQQHQPHSHSQNQNQPSPTQQSSSPPQKPSQSPGHGLPSPLTPPNPLQLVNNPLASQAAAAAAAMSSIASSQAFGNALSSLQGVTGQLVTNAQGQIIGTIPLMPNPGPSSQAASGTQGLQVQPITPQLLTNAQGQIIATVIGNQILPVINTQGITLSPIKPGQQLHQPSQTSVGQAASQGNLLHLAHSQASMSQSPVRQASSSSSSSSSSSALSVGQLVSNPQTAAGEVDGVNLEEIREFAKAFKIRRLSLGLTQTQVGQALSATEGPAYSQSAICRFEKLDITPKSAQKIKPVLERWMAEAEARHRAGMQNLTEFIGSEPSKKRKRRTSFTPQALEILNAHFEKNTHPSGQEMTEIAEKLNYDREVVRVWFCNKRQALKNTIKRLKQHEPATAVPLEPLTDSLEENS

SEQ ID NO: 35432 - protein, 265 aa, Artificial Sequence
  Synthetic polypeptide
TRSLFKGCQFLSPLQATSSLNSQLQQLQLQLQQQQQQQQQQPPPSTNQHPQPAPQAPSQSQQQPLQPTPPQQPPPASQQPPAPTSQLQQAPQPQQHQPHSHSQNQNQPSPTQQSSSPPQKPSQSPGHGLPSPLTPPNPLQIIGTIPLMPNPGPSSQAASGTQGLQVQPITPQLLTNAQGQIIATVIGNQILPVINTQGITLSPIKPGQQLHQPSQTSVGQAASQGNLLHLAHSQASMSQSPVRQASSSSSSSSSSSALSVGQLVS

SEQ ID NO: 35433 - protein, 256 aa, Artificial Sequence
  Synthetic polypeptide
TRSLFKGCQFLSPLQATSSLNSQLQQLQLQLQQQQQQQQQQPPPSTNQHPQPAPQAPSQSQQQPLQPTPPQQPPPASQQPPAPTSQLQQAPQPQQHQPHSHSQNQNQPSPTQQSSSPPQKPSQSPGHGLPSPLTPPNPLQLVNNPLASQAAAAAAAMSSIASSQAFGNALSSLQGVTGQLVTNAQGQIIGTIPLMPNPGPSSQAASGTQGLQVQPITPQLLTNAQGQIIATVIGNQILPVINTQGITLSPIKPGQQ

SEQ ID NO: 35434 - protein, 489 aa, Artificial Sequence
  Synthetic polypeptide
TRSLFKGCQFLSPLQATSSLNSQLQQLQLQLQQQQQQQQQQPPPSTNQHPQPAPQAPSQSQQQPLQPTPPQQPPPASQQPPAPTSQLQQAPQPQQHQPHSHSQNQNQPSPTQQSSSPPQKPSQSPGHGLPSPLTPPNPLQIIGTIPLMPNPGPSSQAASGTQGLQVQPITPQLLTNAQGQIIATVIGNQILPVINTQGITLSPIKPGQQLHQPSQTSVGQAASQGNLLHLAHSQASMSQSPVRQASSSSSSSSSSSALSVGQLVSNPQTAAGEVDGVNLEEIREFAKAFKIRRLSLGLTQTQVGQALSATEGPAYSQSAICRHTILRSHFFLPQEAQENTIASSLTAKLNPGLLYPARFEKLDITPKSAQKIKPVLERWMAEAEARHRAGMQNLTEFIGSEPSKKRKRRTSFTPQALEILNAHFEKNTHPSGQEMTEIAEKLNYDREVVRVWFCNKRQALKNTIKRLKQHEPATAVPLEPLTDSLEENS

SEQ ID NO: 35435 - protein, 123 aa, Artificial Sequence
  Synthetic polypeptide
HRVLFTRKLKQELNGLEPTGLESPAEESGGWDATTAASPPGPRPHGERGDTEAAHGARGDAAEPGSPKRPRHSPLPRPAPGPRPWDAEPPPAFQTQTPPRPCSSLPRLAARGTFQLRNTFFNI

SEQ ID NO: 35436 - protein, 124 aa, Artificial Sequence
  Synthetic polypeptide
NRNSTDWSLLGLRAPLRSPEVGTQLLPRPLPVPGHMASGATPKQPTELEATLLSLVPQSGRATPRFPARLRAPGPGTPSHRRRFRRKPHRDPAAACPAWPPEAPSNSETHFSTYNRIIIRGGHI

SEQ ID NO: 35437 - protein, 14 aa, Artificial Sequence
  Synthetic polypeptide
KIETGTQRIGAYWA

SEQ ID NO: 35438 - protein, 1181 aa, Artificial Sequence
  Synthetic polypeptide
PGTVAHACNPSTLRCQGRRIPGAQEFKTSLGSRVRPCLYKVSWAWWRTPVVPATQEAEVEDCFSPRSRGCSELRSGKSRSRSPYSSRHSRSRSRHRLSRSRSRHSSISPSTLTLKSSLAAELNKNKKARAAEAARAAEAAKAAEATKAAEAAAKAAKASNTSTPTKGNTETSASASQTNHVKDVKKIKIEHAPSPSSGGTLKNDKAKTKPPLQVTKVENNLIVDKATKKAVIVGKESKSAATKEESVSLKEKTKPLTPSIGAKEKEQHVALVTSTLPPLPLPPMLPEDKEADSLRGNISVKAVKKEVEKKLRCLLADLPLPPELPGGDDLSKSPEEKKTATQLHSKRRPKICGPRYGETKEKDIDWGKRCVDKFDIIGIIGEGTYGQVYKARDKDTGEMVALKKVRLDNEKEGFPITAIREIKILRQLTHQSIINMKEIVTDKEDALDFKKDKGAFYLVFEYMDHDLMGLLESGLVHFNENHIKSFMRQLMEGLDYCHKKNFLHRDIKCSNILLNNRGQIKLADFGLARLYSSEESRPYTNKVITLWYRPPELLLGEERYTPAIDVWSCGCILGELFTKKPIFQANQELAQLELISRICGSPCPAVWPDVIKLPYFNTMKPKKQYRRKLREEFVFIPAAALDLFDYMLALDPSKRCTAEQALQCEFLRDVEPSKMPPPDLPLWQDCHELWSKKRRRQKQMGMTDDVSTIKAPRKDLSLGLDDSRTNTPQGVLPSSQLKSQGSSNVAPVKTGPGQHLNHSELAILLNLLQSKTSVNMADFVQVLNIKVNSETQQQLNKINLPAGILATGEKQTDPSTPQQESSKPLGGIQPSSQTIQPKVETDAAQAAVQSAFAVLLTQLIKAQQSKQKDVLLEERENGSGHEASLQLRPPPEPSTPVSGQDDLIQHQDMRILELTPEPDRPRILPPDQRPPEPPEPPPVTEEDLDYRTENQHVPTTSSSLTDPHAGVKAALLQLLAQHQPQDDPKREGGIDYQAGDTYVSTSDYKDNFGSSSFSSAPYVSNDGLGSSSAPPLERRSFIGNSDIQSLDNYSTASSHSGGPPQPSAFSESFPSSVAGYGDIYLNAGPMLFSGDKDHRFEYSHGPIAVLANSSDPSTGPESTHPLPAKMHNYNYGGNLQENPSGPSLMHGQTWTSPAQGPGYSQGYRGHISTSTGRGRGRGLPY

SEQ ID NO: 35439 - protein, 77 aa, Artificial Sequence
  Synthetic polypeptide
DPVSTKLAGHGGAHLLSQLLRKLRWRIALAQEVEAAVSYGLENPEAEARIHLGIQDLVAGTDCLDPEVVILVFLLAH

SEQ ID NO: 35440 - protein, 14 aa, Artificial Sequence
  Synthetic polypeptide
ATVWKIPKQKPVFI

SEQ ID NO: 35441 - protein, 1121 aa, Artificial Sequence
  Synthetic polypeptide
PGTVAHACNPSTLRCQGRRIPGAQEFKTSLGSRVRPCLYKVSWAWWRTPVVPATQEAEVEDCFSPRSRGCSELRSGKSRSRSPYSSRHSRSRSRHRLSRSRSRHSSISPSTLTLKSSLAAELNKNKKARAAEAARAAEAAKAAEATKAAEAAAKAAKASNTSTPTKGNTETSASASQTNHVKDVKKIKIEHAPSPSSGGTLKNDKAKTKPPLQVTKVENNLIVDKATKKAVIVGKESKSAATKEESVSLKEKTKPLTPSIGAKEKEQHVALVTSTLPPLPLPPMLPEDKEADSLRGNISVKAVKKEVEKKLRCLLADLPLPPELPGGDDLSKSPEEKKTATQLHSKRRPKICGPRYGETKEKDIDWGKRCVDKFDIIGIIGEGTYGQVYKARDKDTGEMVALKKVRLDNEKEGFPITAIREIKILRQLTHQSIINMKEIVTDKEDALDFKKDKGAFYLVFEYMDHDLMGLLESGLVHFNENHIKSFMRQLMEGLDYCHKKNFLHRDIKCSNILLNNRGQIKLADFGLARLYSSEESRPYTNKVITLWYRPPELLLGEERYTPAIDVWSCGCILGELFTKKPIFQANQELAQLELISRICGSPCPAVWPDVIKLPYFNTMKPKKQYRRKLREEFVFIPAAALDLFDYMLALDPSKRCTAEQALQCEFLRDVEPSKMPPPDLPLWQDCHELWSKKRRRQKQMGMTDDVSTIKAPRKDLSLGLDDSRTNTPQGVLPSSQLKSQGSSNVAPGEKQTDPSTPQQESSKPLGGIQPSSQTIQPKVETDAAQAAVQSAFAVLLTQLIKAQQSKQKDVLLEERENGSGHEASLQLRPPPEPSTPVSGQDDLIQHQDMRILELTPEPDRPRILPPDQRPPEPPEPPPVTEEDLDYRTENQHVPTTSSSLTDPHAGVKAALLQLLAQHQPQDDPKREGGIDYQAGDTYVSTSDYKDNFGSSSFSSAPYVSNDGLGSSSAPPLERRSFIGNSDIQSLDNYSTASSHSGGPPQPSAFSESFPSSVAGYGDIYLNAGPMLFSGDKDHRFEYSHGPIAVLANSSDPSTGPESTHPLPAKMHNYNYGGNLQENPSGPSLMHGQTWTSPAQGPGYSQGYRGHISTSTGRGRGRGLPY

SEQ ID NO: 35442 - protein, 21 aa, Artificial Sequence
  Synthetic polypeptide
GWEFKTSLANMLTRKYFSKSS

SEQ ID NO: 35443 - protein, 909 aa, Artificial Sequence
  Synthetic polypeptide
CEAKAGGSLEVGSSRPAWPTCLRGNISVKAVKKEVEKKLRCLLADLPLPPELPGGDDLSKSPEEKKTATQLHSKRRPKICGPRYGETKEKDIDWGKRCVDKFDIIGIIGEGTYGQVYKARDKDTGEMVALKKVRLDNEKEGFPITAIREIKILRQLTHQSIINMKEIVTDKEDALDFKKDKGAFYLVFEYMDHDLMGLLESGLVHFNENHIKSFMRQLMEGLDYCHKKNFLHRDIKCSNILLNNRGQIKLADFGLARLYSSEESRPYTNKVITLWYRPPELLLGEERYTPAIDVWSCGCILGELFTKKPIFQANQELAQLELISRICGSPCPAVWPDVIKLPYFNTMKPKKQYRRKLREEFVFIPAAALDLFDYMLALDPSKRCTAEQALQCEFLRDVEPSKMPPPDLPLWQDCHELWSKKRRRQKQMGMTDDVSTIKAPRKDLSLGLDDSRTNTPQGVLPSSQLKSQGSSNVAPVKTGPGQHLNHSELAILLNLLQSKTSVNMADFVQVLNIKVNSETQQQLNKINLPAGILATGEKQTDPSTPQQESSKPLGGIQPSSQTIQPKVETDAAQAAVQSAFAVLLTQLIKAQQSKQKDVLLEERENGSGHEASLQLRPPPEPSTPVSGQDDLIQHQDMRILELTPEPDRPRILPPDQRPPEPPEPPPVTEEDLDYRTENQHVPTTSSSLTDPHAGVKAALLQLLAQHQPQDDPKREGGIDYQAGDTYVSTSDYKDNFGSSSFSSAPYVSNDGLGSSSAPPLERRSFIGNSDIQSLDNYSTASSHSGGPPQPSAFSESFPSSVAGYGDIYLNAGPMLFSGDKDHRFEYSHGPIAVLANSSDPSTGPESTHPLPAKMHNYNYGGNLQENPSGPSLMHGQTWTSPAQGPGYSQGYRGHISTSTGRGRGRGLPY

SEQ ID NO: 35444 - protein, 27 aa, Artificial Sequence
  Synthetic polypeptide
VRPRRVDHLRLGVQDQPGQHAYEEIFQ

SEQ ID NO: 35445 - protein, 849 aa, Artificial Sequence
  Synthetic polypeptide
CEAKAGGSLEVGSSRPAWPTCLRGNISVKAVKKEVEKKLRCLLADLPLPPELPGGDDLSKSPEEKKTATQLHSKRRPKICGPRYGETKEKDIDWGKRCVDKFDIIGIIGEGTYGQVYKARDKDTGEMVALKKVRLDNEKEGFPITAIREIKILRQLTHQSIINMKEIVTDKEDALDFKKDKGAFYLVFEYMDHDLMGLLESGLVHFNENHIKSFMRQLMEGLDYCHKKNFLHRDIKCSNILLNNRGQIKLADFGLARLYSSEESRPYTNKVITLWYRPPELLLGEERYTPAIDVWSCGCILGELFTKKPIFQANQELAQLELISRICGSPCPAVWPDVIKLPYFNTMKPKKQYRRKLREEFVFIPAAALDLFDYMLALDPSKRCTAEQALQCEFLRDVEPSKMPPPDLPLWQDCHELWSKKRRRQKQMGMTDDVSTIKAPRKDLSLGLDDSRTNTPQGVLPSSQLKSQGSSNVAPGEKQTDPSTPQQESSKPLGGIQPSSQTIQPKVETDAAQAAVQSAFAVLLTQLIKAQQSKQKDVLLEERENGSGHEASLQLRPPPEPSTPVSGQDDLIQHQDMRILELTPEPDRPRILPPDQRPPEPPEPPPVTEEDLDYRTENQHVPTTSSSLTDPHAGVKAALLQLLAQHQPQDDPKREGGIDYQAGDTYVSTSDYKDNFGSSSFSSAPYVSNDGLGSSSAPPLERRSFIGNSDIQSLDNYSTASSHSGGPPQPSAFSESFPSSVAGYGDIYLNAGPMLFSGDKDHRFEYSHGPIAVLANSSDPSTGPESTHPLPAKMHNYNYGGNLQENPSGPSLMHGQTWTSPAQGPGYSQGYRGHISTSTGRGRGRGLPY

SEQ ID NO: 35446 - protein, 51 aa, Artificial Sequence
  Synthetic polypeptide
YPRENKSLYQKDTCMCVFIAAQFTIAKIWNQPKCPSAEEWIKKMWCILSGV

SEQ ID NO: 35447 - protein, 731 aa, Artificial Sequence
  Synthetic polypeptide
RKCGAFYLVFEYMDHDLMGLLESGLVHFNENHIKSFMRQLMEGLDYCHKKNFLHRDIKCSNILLNNRGQIKLADFGLARLYSSEESRPYTNKVITLWYRPPELLLGEERYTPAIDVWSCGCILGELFTKKPIFQANQELAQLELISRICGSPCPAVWPDVIKLPYFNTMKPKKQYRRKLREEFVFIPAAALDLFDYMLALDPSKRCTAEQALQCEFLRDVEPSKMPPPDLPLWQDCHELWSKKRRRQKQMGMTDDVSTIKAPRKDLSLGLDDSRTNTPQGVLPSSQLKSQGSSNVAPVKTGPGQHLNHSELAILLNLLQSKTSVNMADFVQVLNIKVNSETQQQLNKINLPAGILATGEKQTDPSTPQQESSKPLGGIQPSSQTIQPKVETDAAQAAVQSAFAVLLTQLIKAQQSKQKDVLLEERENGSGHEASLQLRPPPEPSTPVSGQDDLIQHQDMRILELTPEPDRPRILPPDQRPPEPPEPPPVTEEDLDYRTENQHVPTTSSSLTDPHAGVKAALLQLLAQHQPQDDPKREGGIDYQAGDTYVSTSDYKDNFGSSSFSSAPYVSNDGLGSSSAPPLERRSFIGNSDIQSLDNYSTASSHSGGPPQPSAFSESFPSSVAGYGDIYLNAGPMLFSGDKDHRFEYSHGPIAVLANSSDPSTGPESTHPLPAKMHNYNYGGNLQENPSGPSLMHGQTWTSPAQGPGYSQGYRGHISTSTGRGRGRGLPY

SEQ ID NO: 35448 - protein, 20 aa, Artificial Sequence
  Synthetic polypeptide
GVDKENVVHFIWCLNIWTMI

SEQ ID NO: 35449 - protein, 671 aa, Artificial Sequence
  Synthetic polypeptide
RKCGAFYLVFEYMDHDLMGLLESGLVHFNENHIKSFMRQLMEGLDYCHKKNFLHRDIKCSNILLNNRGQIKLADFGLARLYSSEESRPYTNKVITLWYRPPELLLGEERYTPAIDVWSCGCILGELFTKKPIFQANQELAQLELISRICGSPCPAVWPDVIKLPYFNTMKPKKQYRRKLREEFVFIPAAALDLFDYMLALDPSKRCTAEQALQCEFLRDVEPSKMPPPDLPLWQDCHELWSKKRRRQKQMGMTDDVSTIKAPRKDLSLGLDDSRTNTPQGVLPSSQLKSQGSSNVAPGEKQTDPSTPQQESSKPLGGIQPSSQTIQPKVETDAAQAAVQSAFAVLLTQLIKAQQSKQKDVLLEERENGSGHEASLQLRPPPEPSTPVSGQDDLIQHQDMRILELTPEPDRPRILPPDQRPPEPPEPPPVTEEDLDYRTENQHVPTTSSSLTDPHAGVKAALLQLLAQHQPQDDPKREGGIDYQAGDTYVSTSDYKDNFGSSSFSSAPYVSNDGLGSSSAPPLERRSFIGNSDIQSLDNYSTASSHSGGPPQPSAFSESFPSSVAGYGDIYLNAGPMLFSGDKDHRFEYSHGPIAVLANSSDPSTGPESTHPLPAKMHNYNYGGNLQENPSGPSLMHGQTWTSPAQGPGYSQGYRGHISTSTGRGRGRGLPY

SEQ ID NO: 35450 - protein, 19 aa, Artificial Sequence
  Synthetic polypeptide
VGAKLWVHFIWCLNIWTMI

SEQ ID NO: 35451 - protein, 49 aa, Artificial Sequence
  Synthetic polypeptide
KRMRVSFAATWMELEAIILSEVTQEWKTKYCYVLTYKWELSCGCILSGV

SEQ ID NO: 35452 - protein, 730 aa, Artificial Sequence
  Synthetic polypeptide
AVGAFYLVFEYMDHDLMGLLESGLVHFNENHIKSFMRQLMEGLDYCHKKNFLHRDIKCSNILLNNRGQIKLADFGLARLYSSEESRPYTNKVITLWYRPPELLLGEERYTPAIDVWSCGCILGELFTKKPIFQANQELAQLELISRICGSPCPAVWPDVIKLPYFNTMKPKKQYRRKLREEFVFIPAAALDLFDYMLALDPSKRCTAEQALQCEFLRDVEPSKMPPPDLPLWQDCHELWSKKRRRQKQMGMTDDVSTIKAPRKDLSLGLDDSRTNTPQGVLPSSQLKSQGSSNVAPVKTGPGQHLNHSELAILLNLLQSKTSVNMADFVQVLNIKVNSETQQQLNKINLPAGILATGEKQTDPSTPQQESSKPLGGIQPSSQTIQPKVETDAAQAAVQSAFAVLLTQLIKAQQSKQKDVLLEERENGSGHEASLQLRPPPEPSTPVSGQDDLIQHQDMRILELTPEPDRPRILPPDQRPPEPPEPPPVTEEDLDYRTENQHVPTTSSSLTDPHAGVKAALLQLLAQHQPQDDPKREGGIDYQAGDTYVSTSDYKDNFGSSSFSSAPYVSNDGLGSSSAPPLERRSFIGNSDIQSLDNYSTASSHSGGPPQPSAFSESFPSSVAGYGDIYLNAGPMLFSGDKDHRFEYSHGPIAVLANSSDPSTGPESTHPLPAKMHNYNYGGNLQENPSGPSLMHGQTWTSPAQGPGYSQGYRGHISTSTGRGRGRGLPY

SEQ ID NO: 35453 - protein, 670 aa, Artificial Sequence
  Synthetic polypeptide
AVGAFYLVFEYMDHDLMGLLESGLVHFNENHIKSFMRQLMEGLDYCHKKNFLHRDIKCSNILLNNRGQIKLADFGLARLYSSEESRPYTNKVITLWYRPPELLLGEERYTPAIDVWSCGCILGELFTKKPIFQANQELAQLELISRICGSPCPAVWPDVIKLPYFNTMKPKKQYRRKLREEFVFIPAAALDLFDYMLALDPSKRCTAEQALQCEFLRDVEPSKMPPPDLPLWQDCHELWSKKRRRQKQMGMTDDVSTIKAPRKDLSLGLDDSRTNTPQGVLPSSQLKSQGSSNVAPGEKQTDPSTPQQESSKPLGGIQPSSQTIQPKVETDAAQAAVQSAFAVLLTQLIKAQQSKQKDVLLEERENGSGHEASLQLRPPPEPSTPVSGQDDLIQHQDMRILELTPEPDRPRILPPDQRPPEPPEPPPVTEEDLDYRTENQHVPTTSSSLTDPHAGVKAALLQLLAQHQPQDDPKREGGIDYQAGDTYVSTSDYKDNFGSSSFSSAPYVSNDGLGSSSAPPLERRSFIGNSDIQSLDNYSTASSHSGGPPQPSAFSESFPSSVAGYGDIYLNAGPMLFSGDKDHRFEYSHGPIAVLANSSDPSTGPESTHPLPAKMHNYNYGGNLQENPSGPSLMHGQTWTSPAQGPGYSQGYRGHISTSTGRGRGRGLPY

SEQ ID NO: 35454 - protein, 62 aa, Artificial Sequence
  Synthetic polypeptide
LKESSHTVVTTLCTDQGRRSRRSGVLQGHLHHLDQGVLEKKECLMSWKIISSLQCLKILGLA

SEQ ID NO: 35455 - protein, 28 aa, Artificial Sequence
  Synthetic polypeptide
QLCAQTKEGEAAGAGFSKDIYTIWIRAC

SEQ ID NO: 35456 - protein, 88 aa, Artificial Sequence
  Synthetic polypeptide
RILTYCGDNSVHRPRKEKPQERGSPRTSTPFGSGRVREKRMSNELENYFKPSMLEDPWAGLEPVSVVDISQQYSNTQTFTGKKGRYFC

SEQ ID NO: 35457 - protein, 9 aa, Artificial Sequence
  Synthetic polypeptide
SIKLCLRSF

SEQ ID NO: 35458 - protein, 564 aa, Artificial Sequence
  Synthetic polypeptide
MLPAHGCRMELSPPFLVLVLSEDHPILTPFFDQLNSASEVSRNRGASLLARPGHSLVAAIRSQHQHESLPLAYNDKIVAFLRQPNIFEMLQERQPSLARNHTLREKIHYIRTEGNHGLEKLSCDADLVILLSLFEEEIMSYVPLQAAFHPGYSFSPRCSPCSSPQNSPGLQRASARAPSPYRRDFEAKLRNFYRKLEAKGFGQGPGKIKLIIRRDHLLEGTFNQVMAYSRKELQRNKLYVTFVGEEGLDYSGPSREFFFLLSQELFNPYYGLFEYSANDTYTVQISPMSAFVENHLEWFRFSGRILGLALIHQYLLDAFFTRPFYKALLRLPCDLSDLEYLDEEFHQSLQWMKDNNITDILDLTFTVNEEVFGQVTERELKSGGANTQVTEKNKKEYIERMVKWRVERGVVQQTEALVRGFYEVVDSRLVSVFDARELELVIAGTAEIDLNDWRNNTEYRGGYHDGHLVIRWFWAAVERFNNEQRLRLLQFVTGTSSVPYEGFAALRGSNGLRRFCIEKWGKITSLPRAHTCFNRLDLPPYPSYSMLYEKLLTAVEETSTFGLE

SEQ ID NO: 35459 - protein, 21 aa, Artificial Sequence
  Synthetic polypeptide
TLPQKFLETEEPLYWPGQDTA

SEQ ID NO: 35460 - protein, 317 aa, Artificial Sequence
  Synthetic polypeptide
QTYRTLHPTIAEYTFFSSVPRTLTKPERKFGVVVVGVGRAGSVRMRDLRNPHPSSAFLNLIGFVSRRELGSIDGVQQISLEDALSSQEVEVAYICSESSSHEDYIRQFLNAGKHVLVEYPMTLSLAAAQELWELAEQKGKVLHEEHVELLMEEFAFLKKEVVGKDLLKGSLLFTAGPLEEERFGFPAFSGISRLTWLVSLFGELSLVSATLEERKEDQYMKMTVCLETEKKSPLSWIEEKGPGLKRNRYLSFHFKSGSLENVPNVGVNKNIFLKDQNIFVQKLLGQFSEKELAAEKKRILHCLGLAEEIQKYCCSRK

SEQ ID NO: 35461 - protein, 21 aa, Artificial Sequence
  Synthetic polypeptide
PSPRGSLAWWWLVLAEPAPCG

SEQ ID NO: 35462 - protein, 68 aa, Artificial Sequence
  Synthetic polypeptide
NTPPNNSRIHILFKCAQNINQAREEVWRGGGWCWPSRLRADEGLAESTPFLSVPEPDWLRVEKGAREH

SEQ ID NO: 35463 - protein, 123 aa, Artificial Sequence
  Synthetic polypeptide
QTYRTLHPTIAEYTFFSSVPRTLTKPERKFGVVVVGVGRAGSVRMRDLRNPHPSSAFLNLIGFVSRRELGSIDGVQQISLEDALSSQEVEVAYICSESSSHEDYIRQFLNAGKHVLVEYPMTL

SEQ ID NO: 35464 - protein, 72 aa, Artificial Sequence
  Synthetic polypeptide
ERAHALEQKGLLPFTTSVTSGAVLEPRAALRLARPAHLPGLRQEPGGPSTRKQGGQAGDLRGGTRAALHRPP

SEQ ID NO: 35465 - protein, 156 aa, Artificial Sequence
  Synthetic polypeptide
PQVLSWSRELPCAWRALHTSPVCAKNRAARVRVSKGDKPVTYEEAHAPHYIAHRKGWLSLHTGNLDGEDHAAERTVEDVFLRKFMWGTFPGCLADQLVLKRRGNQLEICAVVLRQLSPHKYYFLVGYSETLLSYFYKCPVRLHLQTVPSKVVYKYL

SEQ ID NO: 35466 - protein, 50 aa, Artificial Sequence
  Synthetic polypeptide
KSTCFGAKRPATIYYFCNLRCCPGAESCLALGAPCTPPRSAPRTGRPEYA

SEQ ID NO: 35467 - protein, 54 aa, Artificial Sequence
  Synthetic polypeptide
PQVLSWSRELPCAWRALHTSPVCAKNRAARVRVSKGDKPVTYEEAHAPHYIAHR

SEQ ID NO: 35468 - protein, 38 aa, Artificial Sequence
  Synthetic polypeptide
GRARWLTTVIPALWEAEAGRSQGQEIETILANTAVEWE

SEQ ID NO: 35469 - protein, 33 aa, Artificial Sequence
  Synthetic polypeptide
SQHFGRPRRADHKVKRLRPSWLTRQWSGSEEAV

SEQ ID NO: 35470 - protein, 397 aa, Artificial Sequence
  Synthetic polypeptide
HGSGVGVKKLCELQPEEKCCVVGTLFKAMPLQPSILREVSEEHNLLPQPPRSKYIHPDDELVLEDELQRIKLKGTIDVSKLVTGTVLAVFGSVRDDGKFLVEDYCFADLAPQKPAPPLDTDRFVLLVSGLGLGGGGGESLLGTQLLVDVVTGQLGDEGEQCSAAHVSRVILAGNLLSHSTQSRDSINKAKYLTKKTQAASVEAVKMLDEILLQLSASVPVDVMPGEFDPTNYTLPQQPLHPCMFPLATAYSTLQLVTNPYQATIDGVRFLGTSGQNVSDIFRYSSMEDHLEILEWTLRVRHISPTAPDTLGCYPFYKTDPFIFPECPHVYFCGNTPSFGSKIIRGPEDQTVLLVTVPDFSATQTACLVNLRSLACQPISFSGFGAEDDDLGGLGLGP

SEQ ID NO: 35471 - protein, 383 aa, Artificial Sequence
  Synthetic polypeptide
HGSGVGVKKLCELQPEEKCCVVGTLFKAMPLQPSILREVSEEHNLLPQPPRSKYIHPDDELVLEDELQRIKLKGTIDVSKLVTGTVLAVFGSVRDDGKFLVEDYCFADLAPQKPAPPLDTDRFVLLVSGLGLGGGGGESLLGTQLLVDVVTGQLGDEGEQCSAAHVSRVILAGNLLSHSTQSRDSINKAKYLTKKTQAASVEAVKMLDEILLQLSASVPVDVMPGEFDPTNYTLPQQPLHPCMFPLATAYSTLQLVTNPYQATIDGVRFLGTSGQNVSDIFRYSSMEDHLEILEWTLRVRHISPTAPDTLECPHVYFCGNTPSFGSKIIRGPEDQTVLLVTVPDFSATQTACLVNLRSLACQPISFSGFGAEDDDLGGLGLGP

SEQ ID NO: 35472 - protein, 148 aa, Artificial Sequence
  Synthetic polypeptide
HGSGVGVKKLCELQPEEKCCVVGTLFKAMPLQPSILREVSEEHNLLPQPPRSKYIHPDDELVLEDELQRIKLKGTIDVSKLVTGTVLAVFGSVRDDGKFLVEDYCFADLAPQKPAPPLDTDRFVLLVSGLGLGGGGGESLLGTQLLVD

SEQ ID NO: 35473 - protein, 83 aa, Artificial Sequence
  Synthetic polypeptide
HGSGVGVKKLCELQPEEKCCVVGTLFKAMPLQPSILREVSEEHNLLPQPPRSKYIHPDDELVLEDELQRIKLKGTIDVSKLVT

SEQ ID NO: 35474 - protein, 76 aa, Artificial Sequence
  Synthetic polypeptide
HGSGVGVKKLCELQPEEKCCVVGTLFKAMPLQPSILREVSEEHNLLPQPPRSKYIHPDDELVLEDELQRIKLKGTI

SEQ ID NO: 35475 - protein, 26 aa, Artificial Sequence
  Synthetic polypeptide
GRARWLTTVIPALWEAEAGRSQVEWE

SEQ ID NO: 35476 - protein, 21 aa, Artificial Sequence
  Synthetic polypeptide
SQHFGRPRRADHKWSGSEEAV

SEQ ID NO: 35477 - protein, 416 aa, Artificial Sequence
  Synthetic polypeptide
PGTVAHDCNPSTLGGRGGQITSGVGVKKLCELQPEEKCCVVGTLFKAMPLQPSILREVSEEHNLLPQPPRSKYIHPDDELVLEDELQRIKLKGTIDVSKLVTGTVLAVFGSVRDDGKFLVEDYCFADLAPQKPAPPLDTDRFVLLVSGLGLGGGGGESLLGTQLLVDVVTGQLGDEGEQCSAAHVSRVILAGNLLSHSTQSRDSINKAKYLTKKTQAASVEAVKMLDEILLQLSASVPVDVMPGEFDPTNYTLPQQPLHPCMFPLATAYSTLQLVTNPYQATIDGVRFLGTSGQNVSDIFRYSSMEDHLEILEWTLRVRHISPTAPDTLGCYPFYKTDPFIFPECPHVYFCGNTPSFGSKIIRGPEDQTVLLVTVPDFSATQTACLVNLRSLACQPISFSGFGAEDDDLGGLGLGP

SEQ ID NO: 35478 - protein, 402 aa, Artificial Sequence
  Synthetic polypeptide
PGTVAHDCNPSTLGGRGGQITSGVGVKKLCELQPEEKCCVVGTLFKAMPLQPSILREVSEEHNLLPQPPRSKYIHPDDELVLEDELQRIKLKGTIDVSKLVTGTVLAVFGSVRDDGKFLVEDYCFADLAPQKPAPPLDTDRFVLLVSGLGLGGGGGESLLGTQLLVDVVTGQLGDEGEQCSAAHVSRVILAGNLLSHSTQSRDSINKAKYLTKKTQAASVEAVKMLDEILLQLSASVPVDVMPGEFDPTNYTLPQQPLHPCMFPLATAYSTLQLVTNPYQATIDGVRFLGTSGQNVSDIFRYSSMEDHLEILEWTLRVRHISPTAPDTLECPHVYFCGNTPSFGSKIIRGPEDQTVLLVTVPDFSATQTACLVNLRSLACQPISFSGFGAEDDDLGGLGLGP

SEQ ID NO: 35479 - protein, 167 aa, Artificial Sequence
  Synthetic polypeptide
PGTVAHDCNPSTLGGRGGQITSGVGVKKLCELQPEEKCCVVGTLFKAMPLQPSILREVSEEHNLLPQPPRSKYIHPDDELVLEDELQRIKLKGTIDVSKLVTGTVLAVFGSVRDDGKFLVEDYCFADLAPQKPAPPLDTDRFVLLVSGLGLGGGGGESLLGTQLLVD

SEQ ID NO: 35480 - protein, 102 aa, Artificial Sequence
  Synthetic polypeptide
PGTVAHDCNPSTLGGRGGQITSGVGVKKLCELQPEEKCCVVGTLFKAMPLQPSILREVSEEHNLLPQPPRSKYIHPDDELVLEDELQRIKLKGTIDVSKLVT

SEQ ID NO: 35481 - protein, 95 aa, Artificial Sequence
  Synthetic polypeptide
PGTVAHDCNPSTLGGRGGQITSGVGVKKLCELQPEEKCCVVGTLFKAMPLQPSILREVSEEHNLLPQPPRSKYIHPDDELVLEDELQRIKLKGTI

SEQ ID NO: 35482 - protein, 63 aa, Artificial Sequence
  Synthetic polypeptide
SRRNFSDGQQLHSVSGEFHIGLLCGFQTGLASPHNHDSGAVPEKSRQLQWCCPRELHLVTGLY

SEQ ID NO: 35483 - protein, 197 aa, Artificial Sequence
  Synthetic polypeptide
PAPTIMIQEQFQKNPDSYNGAVRENYTWSQDYTDLEVRVPVPKHVVKGKQVSVALSSSSIRVAMLEENGERVLMEGKLTHKINTESSLWSLEPGKCVLVNLSKVGEYWWNAILEGEEPIDIDKINKERSMATVDEEEQAVLDRLTFDYHQKLQGKPQSHELKVHEMLKKGWDAEGSPFRGQRFDPAMFNISPGAVQF

SEQ ID NO: 35484 - protein, 73 aa, Artificial Sequence
  Synthetic polypeptide
VLLWQTLWAGVQVTWILVRPCYHQPLHRSGGRTGSERPCSCSYQGAGTASTVHDSAAGYLLCSGCPSGQCLSC

SEQ ID NO: 35485 - protein, 499 aa, Artificial Sequence
  Synthetic polypeptide
CCCGKHSGLEFRLPGSLSGPATTNLCTGPVVEQAVRGLVLVPTKELARQAQSMIQQLATYCARDVRVANVSAAEDSVSQRAVLMEKPDVVVGTPSRILSHLQQDSLKLRDSLELLVVDEADLLFSFGFEEELKSLLCHLPRIYQAFLMSATFNEDVQALKELILHNPVTLKLQESQLPGPDQLQQFQVVCETEEDKFLLLYALLKLSLIRGKSLLFVNTLERSYRLRLFLEQFSIPTCVLNGELPLRSRCHIISQFNQGFYDCVIATDAEVLGAPVKGKRRGRGPKGDKASDPEAGVARGIDFHHVSAVLNFDLPPTPEAYIHRAGRTARANNPGIVLTFVLPTEQFHLGKIEELLSGENRGPILLPYQFRMEEIEGFRYRCRDAMRSVTKQAIREARLKEIKEELLHSEKLKTYFEDNPRDLQLLRHDLPLHPAVVKPHLGHVPDYLVPPALRGLVRPHKKRKKLSSSCRKAKRAKSQNPLRSFKHKGKKFRPTAKPS

SEQ ID NO: 35486 - protein, 30 aa, Artificial Sequence
  Synthetic polypeptide
AVVANTLGWSSGYLDPCPALLPPTFAQVRW

SEQ ID NO: 35487 - protein, 137 aa, Artificial Sequence
  Synthetic polypeptide
CCCGKHSGLEFRLPGSLSGPATTNLCTGPVVEQAVRGLVLVPTKELARQAQSMIQQLATYCARDVRVANVSAAEDSVSQRAVLMEKPDVVVGTPSRILSHLQQDSLKLRDSLELLVVDEADLLFSFGFEEELKSLLW

SEQ ID NO: 35488 - protein, 327 aa, Artificial Sequence
  Synthetic polypeptide
CCCGKHSGLEFRLPGSLSGPATTNLCTGPVVEQAVRGLVLVPTKELARQAQSMIQQLATYCARDVRVANVSAAEDSVSQRAVLMEKPDVVVGTPSRILSHLQQDSLKLRDSLELLVVDEADLLFSFGFEEELKSLLCHLPRIYQAFLMSATFNEDVQALKELILHNPVTLKLQESQLPGPDQLQQFQVVCETEEDKFLLLYALLKLSLIRGKSLLFVNTLERSYRLRLFLEQFSIPTCVLNGELPLRSRCHIISQFNQGFYDCVIATDAEVLGAPVKGKRRGRGPKGDKASDPEAGVARGIDFHHVSAVLNFDLPPTPEAYIHRAGR

SEQ ID NO: 35489 - protein, 394 aa, Artificial Sequence
  Synthetic polypeptide
CCCGKHSGLEFRLPGSLSGPATTNLCTGPVVEQAVRGLVLVPTKELARQAQSMIQQLATYCARDVRVANVSAAEDSVSQRAVLMEKPDVVVGTPSRILSHLQQDSLKLRDSLELLVVDEADLLFSFGFEEELKSLLCHLPRIYQAFLMSATFNEDVQALKELILHNPVTLKLQESQLPGPDQLQQFQVVCETEEDKFLLLYALLKLSLIRGKSLLFVNTLERSYRLRLFLEQFSIPTCVLNGELPLRSRCHIISQFNQGFYDCVIATDAEVLGAPVKGKRRGRGPKGDKASDPEAGVARGIDFHHVSAVLNFDLPPTPEAYIHRAGRTARANNPGIVLTFVLPTEQFHLGKIEELLSGENRGPILLPYQFRMEEIEGFRYRCRCPPPGCHALSD

SEQ ID NO: 35490 - protein, 459 aa, Artificial Sequence
  Synthetic polypeptide
CCCGKHSGLEFRLPGSLSGPATTNLCTGPVVEQAVRGLVLVPTKELARQAQSMIQQLATYCARDVRVANVSAAEDSVSQRAVLMEKPDVVVGTPSRILSHLQQDSLKLRDSLELLVVDEADLLFSFGFEEELKSLLCHLPRIYQAFLMSATFNEDVQALKELILHNPVTLKLQESQLPGPDQLQQFQVVCETEEDKFLLLYALLKLSLIRGKSLLFVNTLERSYRLRLFLEQFSIPTCVLNGELPLRSRASDPEAGVARGIDFHHVSAVLNFDLPPTPEAYIHRAGRTARANNPGIVLTFVLPTEQFHLGKIEELLSGENRGPILLPYQFRMEEIEGFRYRCRDAMRSVTKQAIREARLKEIKEELLHSEKLKTYFEDNPRDLQLLRHDLPLHPAVVKPHLGHVPDYLVPPALRGLVRPHKKRKKLSSSCRKAKRAKSQNPLRSFKHKGKKFRPTAKPS

SEQ ID NO: 35491 - protein, 219 aa, Artificial Sequence
  Synthetic polypeptide
TSLGNMDLKEANFDINQLYDCNWVVVNCSTPGNFFHVLRRQILLPFRKPLIIFTPKSLLRHPEARSSFDEMLPGTHFQRVIPEDGPAAQNPENVKRLLFCTGKVYYDLTRERKARDMVGQVAITRIEQLSPFPFDLLLKEVQKYPNAELAWCQEEHKNQGYYDYVKPRLRTTISRAKPVWYAGRDPAAAPATGNKKTHLTELQRLLDTAFDLDVFKNFS

SEQ ID NO: 35492 - protein, 49 aa, Artificial Sequence
  Synthetic polypeptide
PAWATWTLKKPTSTSISYMTAIGLLSTAPLLATSSTCYDARSCCHSGSR

SEQ ID NO: 35493 - protein, 7 aa, Artificial Sequence
  Synthetic polypeptide
QPGQHGP

SEQ ID NO: 35494 - protein, 866 aa, Artificial Sequence
  Synthetic polypeptide
AHGAARAGGRHGEGPGQAGRSDGSFAYESVPWQQSATQPAGSLSVVTTVWGVGNATQSQCLGQQAFAEGGANKGYVQQGVYSRGGYPGAPGFTTGYAGGPGGLGLPSHAARPSTDFTQAAAAAAVAAAAATATATATATVAALQEKQSQELSQYGAMGAGQSFNSQFLQHGGPRGPSVPAGMNPTGIGGVMGPSGLSPLAMNPTRAAGMTPLYAGQRLPQHGYPGPPQAQPLPRQGVKRTYSEVYPGQQYLQGGQYAPSTAQFAPSPGQPPAPSPSYPGHRLPLQQGMTQSLSVPGPTGLHYKPTRSIPGYPSSPLPGNPTPPMTPSSSVPYMSPNQEVKSPFLPDLKPNLNSLHSSPSGSGPCDELRLTFPVRDGVVLEPFRLQHNLAVSNHVFQLRDSVYKTLIMRPDLELQFKCYHHEDRQMNTNWPASVQVSVNATPLTIERGDNKTSHKPLYLKHVCQPGRNTIQITVTACCCSHLFVLQLVHRPSVRSVLQGLLKKRLLPAEHCITKIKRNFSSGTIPGTPGPNGEDGVEQTAIKVSLKCPITFRRIQLPARGHDCRHIQCFDLESYLQLNCERGTWRCPVCNKTALLEGLEVDQYMLGILIYIQNSDYEEITIDPTCSWKPVPVKPDMHIKEEPDGPALKRCRTVSPAHVLMPSVMEMIAALGPGAAPFAPLQPPSVPAPSDYPGQGSSFLGPGTFPESFPPTTPSTPTLAEFTPGPPPISYQSDIPSSLLTSEKSTACLPSQMAPAGHLDPTHNPGTPGLHTSNLGAPPGPQLHHSNPPPASRQSLGQASLGPTGELAFSPATGVMGPPSMSGAGEAPEPALDLLPELTNPDELLSYLGPPDLPTNNNDDLLSLFENN

SEQ ID NO: 35495 - protein, 174 aa, Artificial Sequence
  Synthetic polypeptide
ERAAARWRGWRRPRGGGRRGGRAERMERRGPGAATARGRARPGGVMVHSHMSLCLGNKAPLSRLDRCLWSLLCGELATRHRASAWDSRRLLKAAPTRATCSKACTAAGATLGPPASPPGMQAARGAWASPHMLQDPPLTSRKRQLLQLWLLRQPLPPPQPQPPWLLSRRSRARS

SEQ ID NO: 35496 - protein, 93 aa, Artificial Sequence
  Synthetic polypeptide
AHGAARAGGRHGEGPGQAGRSDGSFAYESVPWQQSATQPAGSLSVVTTVWGVGNATQSQVLGNPMGPAGSPSGSSMMPGVAGGSSALTSPQCL

SEQ ID NO: 35497 - protein, 99 aa, Artificial Sequence
  Synthetic polypeptide
ERAAARWRGWRRPRGGGRRGGRAERMERRGPGAATARGRARPGGVMVHSHMSLCLGNKAPLSRLDRCLWSLLCGELATRHRARFWGTPWALQGVPLAAP

SEQ ID NO: 35498 - protein, 924 aa, Artificial Sequence
  Synthetic polypeptide
AHGAARAGGRHGEGPGQAGRSDGSFAYESVPWQQSATQPAGSLSVVTTVWGVGNATQSQVLGNPMGPAGSPSGSSMMPGVAGGSSALTSPQCLGQQAFAEGGANKGYVQQGVYSRGGYPGAPGFTTGYAGGPGGLGLPSHAARPSTDFTQAAAAAAVAAAAATATATATATVAALQEKQSQELSQYGAMGAGQSFNSQFLQHGGPRGPSVPAGMNPTGIGGVMGPSGLSPLAMNPTRAAGMTPLYAGQRLPQHGYPGPPQAQPLPRQGVKRTYSEVYPGQQYLQGGQYAPSTAQFAPSPGQPPAPSPSYPGHRLPLQQGMTQSLSVPGPTGLHYKPTEQFNGQGASFNGGSVSYSQPGLSGPTRSIPGYPSSPLPGNPTPPMTPSSSVPYMSPNQEVKSPFLPDLKPNLNSLHSSPSGSGPCDELRLTFPVRDGVVLEPFRLQHNLAVSNHVFQLRDSVYKTLIMRPDLELQFKCYHHEDRQMNTNWPASVQVSVNATPLTIERGDNKTSHKPLYLKHVCQPGRNTIQITVTACCCSHLFVLQLVHRPSVRSVLQGLLKKRLLPAEHCITKIKRNFSSGTIPGTPGPNGEDGVEQTAIKVSLKCPITFRRIQLPARGHDCRHIQCFDLESYLQLNCERGTWRCPVCNKTALLEGLEVDQYMLGILIYIQNSDYEEITIDPTCSWKPVPVKPDMHIKEEPDGPALKRCRTVSPAHVLMPSVMEMIAALGPGAAPFAPLQPPSVPAPSDYPGQGSSFLGPGTFPESFPPTTPSTPTLAEFTPGPPPISYQSDIPSSLLTSEKSTACLPSQMAPAGHLDPTHNPGTPGLHTSNLGAPPGPQLHHSNPPPASRQSLGQASLGPTGELAFSPATGVMGPPSMSGAGEAPEPALDLLPELTNPDELLSYLGPPDLPTNNNDDLLSLFENN

SEQ ID NO: 35499 - protein, 66 aa, Artificial Sequence
  Synthetic polypeptide
AHGAARAGGRHGEGPGQAGRSDGSFAYESVPWQQSATQPAGSLSVVTTVWGVGNATQSQGVPLAAP

SEQ ID NO: 35500 - protein, 90 aa, Artificial Sequence
  Synthetic polypeptide
ERAAARWRGWRRPRGGGRRGGRAERMERRGPGAATARGRARPGGVMVHSHMSLCLGNKAPLSRLDRCLWSLLCGELATRHRARESLWQLH

SEQ ID NO: 35501 - protein, 892 aa, Artificial Sequence
  Synthetic polypeptide
AHGAARAGGRHGEGPGQAGRSDGSFAYESVPWQQSATQPAGSLSVVTTVWGVGNATQSQCLGQQAFAEGGANKGYVQQGVYSRGGYPGAPGFTTGYAGGPGGLGLPSHAARPSTDFTQAAAAAAVAAAAATATATATATVAALQEKQSQELSQYGAMGAGQSFNSQFLQHGGPRGPSVPAGMNPTGIGGVMGPSGLSPLAMNPTRAAGMTPLYAGQRLPQHGYPGPPQAQPLPRQGVKRTYSEVYPGQQYLQGGQYAPSTAQFAPSPGQPPAPSPSYPGHRLPLQQGMTQSLSVPGPTGLHYKPTEQFNGQGASFNGGSVSYSQPGLSGPTRSIPGYPSSPLPGNPTPPMTPSSSVPYMSPNQEVKSPFLPDLKPNLNSLHSSPSGSGPCDELRLTFPVRDGVVLEPFRLQHNLAVSNHVFQLRDSVYKTLIMRPDLELQFKCYHHEDRQMNTNWPASVQVSVNATPLTIERGDNKTSHKPLYLKHVCQPGRNTIQITVTACCCSHLFVLQLVHRPSVRSVLQGLLKKRLLPAEHCITKIKRNFSSGTIPGTPGPNGEDGVEQTAIKVSLKCPITFRRIQLPARGHDCRHIQCFDLESYLQLNCERGTWRCPVCNKTALLEGLEVDQYMLGILIYIQNSDYEEITIDPTCSWKPVPVKPDMHIKEEPDGPALKRCRTVSPAHVLMPSVMEMIAALGPGAAPFAPLQPPSVPAPSDYPGQGSSFLGPGTFPESFPPTTPSTPTLAEFTPGPPPISYQSDIPSSLLTSEKSTACLPSQMAPAGHLDPTHNPGTPGLHTSNLGAPPGPQLHHSNPPPASRQSLGQASLGPTGELAFSPATGVMGPPSMSGAGEAPEPALDLLPELTNPDELLSYLGPPDLPTNNNDDLLSLFENN

SEQ ID NO: 35502 - protein, 898 aa, Artificial Sequence
  Synthetic polypeptide
AHGAARAGGRHGEGPGQAGRSDGSFAYESVPWQQSATQPAGSLSVVTTVWGVGNATQSQVLGNPMGPAGSPSGSSMMPGVAGGSSALTSPQCLGQQAFAEGGANKGYVQQGVYSRGGYPGAPGFTTGYAGGPGGLGLPSHAARPSTDFTQAAAAAAVAAAAATATATATATVAALQEKQSQELSQYGAMGAGQSFNSQFLQHGGPRGPSVPAGMNPTGIGGVMGPSGLSPLAMNPTRAAGMTPLYAGQRLPQHGYPGPPQAQPLPRQGVKRTYSEVYPGQQYLQGGQYAPSTAQFAPSPGQPPAPSPSYPGHRLPLQQGMTQSLSVPGPTGLHYKPTRSIPGYPSSPLPGNPTPPMTPSSSVPYMSPNQEVKSPFLPDLKPNLNSLHSSPSGSGPCDELRLTFPVRDGVVLEPFRLQHNLAVSNHVFQLRDSVYKTLIMRPDLELQFKCYHHEDRQMNTNWPASVQVSVNATPLTIERGDNKTSHKPLYLKHVCQPGRNTIQITVTACCCSHLFVLQLVHRPSVRSVLQGLLKKRLLPAEHCITKIKRNFSSGTIPGTPGPNGEDGVEQTAIKVSLKCPITFRRIQLPARGHDCRHIQCFDLESYLQLNCERGTWRCPVCNKTALLEGLEVDQYMLGILIYIQNSDYEEITIDPTCSWKPVPVKPDMHIKEEPDGPALKRCRTVSPAHVLMPSVMEMIAALGPGAAPFAPLQPPSVPAPSDYPGQGSSFLGPGTFPESFPPTTPSTPTLAEFTPGPPPISYQSDIPSSLLTSEKSTACLPSQMAPAGHLDPTHNPGTPGLHTSNLGAPPGPQLHHSNPPPASRQSLGQASLGPTGELAFSPATGVMGPPSMSGAGEAPEPALDLLPELTNPDELLSYLGPPDLPTNNNDDLLSLFENN

SEQ ID NO: 35503 - protein, 49 aa, Artificial Sequence
  Synthetic polypeptide
SQHFGRPRRADHLRLEAKLERTVGRPRLRQYLAHRELGYSFLWAASTDT

SEQ ID NO: 35504 - protein, 119 aa, Artificial Sequence
  Synthetic polypeptide
AGGSLEAGGKAGKDSGKAKAKAVSRSQRAGLQFPVGRIHRHLKTRTTSHGRVGATAAVYSAAILEYLTAEVLELAGNASKDLKVKRITPRHLQLAIRGDEELDSLIKATIAGGEKRRCS

SEQ ID NO: 35505 - protein, 53 aa, Artificial Sequence
  Synthetic polypeptide
SQHFGRPRRADHLRLEAKLERTVGRPRLRQYLAHRELGYRCWSWQVMLLRISK

SEQ ID NO: 35506 - protein, 81 aa, Artificial Sequence
  Synthetic polypeptide
AGGSLEAGGKAGKDSGKAKAKAVSRSQRAGLQVLELAGNASKDLKVKRITPRHLQLAIRGDEELDSLIKATIAGGEKRRCS

SEQ ID NO: 35507 - protein, 95 aa, Artificial Sequence
  Synthetic polypeptide
AGGSLEAGGKAGKDSGKAKAKAVSRSQRAGLQVLELAGNASKDLKVKRITPRHLQLAIRGDEELDSLIKATIAGGGVIPHIHKSLIGKKGQQKTA

SEQ ID NO: 35508 - protein, 133 aa, Artificial Sequence
  Synthetic polypeptide
AGGSLEAGGKAGKDSGKAKAKAVSRSQRAGLQFPVGRIHRHLKTRTTSHGRVGATAAVYSAAILEYLTAEVLELAGNASKDLKVKRITPRHLQLAIRGDEELDSLIKATIAGGGVIPHIHKSLIGKKGQQKTA

SEQ ID NO: 35509 - protein, 71 aa, Artificial Sequence
  Synthetic polypeptide
AGGSLEAGGKAGKDSGKAKAKAVSRSQRAGLQFPVGRIHRHLKTRTTSHGRVGATAAVYSAAILEYLTAEV

SEQ ID NO: 35510 - protein, 127 aa, Artificial Sequence
  Synthetic polypeptide
AGGSLEAGGKAGKDSGKAKAKAVSRSQRAGLQFPVGRIHRHLKTRTTSHGRVGATAAVYSAAILEYLTAEVLELAGNASKDLKVKRITPRHLQLAIRGDEELDSLIKATIAGGGMYYYLSLDSYWSF

SEQ ID NO: 35511 - protein, 36 aa, Artificial Sequence
  Synthetic polypeptide
ERTWEVERAQVWGPGGDSSLKLSPATNWPGVHGLCC

SEQ ID NO: 35512 - protein, 36 aa, Artificial Sequence
  Synthetic polypeptide
KEPRFGDQEEIHLSSLALLPTGQVSMDSVVRYRAEF

SEQ ID NO: 35513 - protein, 111 aa, Artificial Sequence
  Synthetic polypeptide
PCYQLARCPWTLLLGTEQNFEDALILSSHEGSVQEQVTKWRPETKRTNELSYRDLLVLLPLFTTRRQTSLIFKKLLFDLSESQPRNHGCMIFDLDFEDSFYKEKSEQWPRR

SEQ ID NO: 35514 - protein, 12 aa, Artificial Sequence
  Synthetic polypeptide
PAGRINLESARF

SEQ ID NO: 35515 - protein, 1243 aa, Artificial Sequence
  Synthetic polypeptide
SLPLSSPDQPEELTSSLHAFKNKAFKKSKVCGVCKQIIDGQGISCRACKYSCHKKCEAKVVIPCGVQVRLEQAPGSSTLSSSLCRDKPLRPVILSPTMEEGHGLDLTYITERIIAVSFPAGCSEESYLHNLQEVTRMLKSKHGDNYLVLNLSEKRYDLTKLNPKIMDVGWPELHAPPLDKMCTICKAQESWLNSNLQHVVVIHCRGGKGRIGVVISSYMHFTNVSASADQALDRFAMKKFYDDKVSALMQPSQKRYVQFLSGLLSGSVKMNASPLFLHFVILHGTPNFDTGGVCRPFLKLYQAMQPVYTSGIYNVGPENPSRICIVIEPAQLLKGDVMVKCYHKKYRSATRDVIFRLQFHTGAVQGYGLVFGKEDLDNASKDDRFPDYGKVELVFSATPEKIQGSEHLYNDHGVIVDYNTTDPLIRWDSYENLSADGEVLHTQGPVDGSLYAKVRKKSSSDPGIPGGPQAIPATNSPDHSDHTLSVSSDSGHSTASARTDKTEERLAPGTRRGLSAQEKAELDQLLSGFGLEDPGSSLKEMTDARSKYSGTRHVVPAQVHVNGDAALKDRETDILDDEMPHHDLHSVDSLGTLSSSEGPQSAHLGPFTCHKSSQNSLLSDGFGSNVGEDPQGTLVPDLGLGMDGPYERERTFGSREPKQPQPLLRKPSVSAQMQAYGQSSYSTQTWVRQQQMVVAHQYSFAPDGEARLVSRCPADNPGLVQAQPRVPLTPTRGTSSRVAVQRGVGSGPHPPDTQQPSPSKAFKPRFPGDQVVNGAGPELSTGPSPGSPTLDIDQSIEQLNRLILELDPTFEPIPTHMNALGSQANGSVSPDSVGGGLRASSRLPDTGEGPSRATGRQGSSAEQPLGGRLRKLSLGQYDNDAGGQLPFSKCAWGKAGVDYAPNLPPFPSPADVKETMTPGYPQDLDIIDGRILSSKESMCSTPAFPVSPETPYVKTALRHPPFSPPEPPLSSPASQHKGGREPRSCPETLTHAVGMSESPIGPKSTMLRADASSTPSFQQAFASSCTISSNGPGQRRESSSSAERQWVESSPKPMVSLLGSGRPTGSPLSAEFSGTRKDSPVLSCFPPSELQAPFHSHELSLAEPPDSLAPPSSQAFLGFGTAPVGSGLPPEEDLGALLANSHGASPTPSIPLTATGAADNGFLSHNFLTVAPGHSSHHSPGLQGQGVTLPGQPPLPEKKRASEGDRSLGSVSPSSSGFSSPHSGSTISIPFPNVLPDFSKASE

SEQ ID NO: 35516 - protein, 24 aa, Artificial Sequence
  Synthetic polypeptide
KLRVASRPDSPDPSHFLRLTSRKN

SEQ ID NO: 35517 - protein, 552 aa, Artificial Sequence
  Synthetic polypeptide
SLPLSSPDQPEELTSSLHAFKNKAFKKSKVCGVCKQIIDGQGISCRACKYSCHKKCEAKVVIPCGVQVRLEQAPGSSTLSSSLCRDKPLRPVILSPTMEEGHGLDLTYITERIIAVSFPAGCSEESYLHNLQEVTRMLKSKHGDNYLVLNLSEKRYDLTKLNPKIMDVGWPELHAPPLDKMCTICKAQESWLNSNLQHVVVIHCRGGKGRIGVVISSYMHFTNVSASADQALDRFAMKKFYDDKVSALMQPSQKRYVQFLSGLLSGSVKMNASPLFLHFVILHGTPNFDTGGVCRPFLKLYQAMQPVYTSGIYNVGPENPSRICIVIEPAQLLKGDVMVKCYHKKYRSATRDVIFRLQFHTGAVQGYGLVFGKEDLDNASKDDRFPDYGKVELVFSATPEKIQGSEHLYNDHGVIVDYNTTDPLIRWDSYENLSADGEVLHTQGPVDGSLYAKVRKKSSSDPGIPGGPQAIPATNSPDHSDHTLSVSSDSGHSTASARTDKTEERLAPGTRRGLSAQEKAELDQLLSGFGLEDPGSSLKEMTDARSKYSGTR

SEQ ID NO: 35518 - protein, 95 aa, Artificial Sequence
  Synthetic polypeptide
SLPLSSPDQPEELTSSLHAFKNKAFKKSKVCGVCKQIIDGQGISCRACKYSCHKKCEAKVVIPCGVQVRLEQAPGSSTLSSSLCRDKPLRPVILS

SEQ ID NO: 35519 - protein, 486 aa, Artificial Sequence
  Synthetic polypeptide
ASVPNSCPASPRGAGSSSYRFVQNVTSDLQLAAEFAAKAASEQQADTSGGDSPKDESKPPFSYAQLIVQAISSAQDRQLTLSGIYAHITKHYPYYRTADKGWQNSIRHNLSLNRYFIKVPRSQEEPGKGSFWRIDPASEAKLVEQAFRKRRQRGVSCFRTPFGPLSSRSAPASPTHPGLMSPRSGGLQTPECLSREGSPIPHDPEFGSKLASVPEYRYSQSAPGSPVSAQPVIMAVPPRPSSLVAKPVAYMPASIVTSQQPAGHAIHVVQQAPTVTMVRVVTTSANSANGYILTSQGAAGGSHDAAGAAVLDLGSEARGLEEKPTIAFATIPAAGGVIQTVASQMAPGVPGHTVTILQPATPVTLGQHHLPVRAVTQNGKHAVPTNSLAGNAYALTSPLQLLATQASSSAPVVVTRVCEVGPKEPAAAVAATATTTPATATTASASASSTGEPEVKRSRVEEPSGAVTTPAGVIAAAGPQGPGTGE

SEQ ID NO: 35520 - protein, 29 aa, Artificial Sequence
  Synthetic polypeptide
KYKNEPVSPTPAQPVHAVPAPPVTALCRT

SEQ ID NO: 35521 - protein, 65 aa, Artificial Sequence
  Synthetic polypeptide
NPISTENTKMSQCPQLLPSQSTRCRLLQLPLCAERDLGPAAGSRVCSKGRVGAAGRHVWRRQPQG

SEQ ID NO: 35522 - protein, 55 aa, Artificial Sequence
  Synthetic polypeptide
ASVPNSCPASPRGAGSSSYRFVQNVTSDLQLAAEFAAKAASEQQADTSGGDSPKV

SEQ ID NO: 35523 - protein, 66 aa, Artificial Sequence
  Synthetic polypeptide
NPISTENTKMSQCPQLLPSQSTRCRLLQLPLCAERDLGPAAGSRVCSKGRVGAAGRHVWRRQPQGL

SEQ ID NO: 35524 - protein, 72 aa, Artificial Sequence
  Synthetic polypeptide
DEGITKKCEGEEIFLGQFIYNKTGTTVQTFELQHAVSEYLLCVKLNIFSNWGHPKYTCLYRFRVHGTPGKHI

SEQ ID NO: 35525 - protein, 14 aa, Artificial Sequence
  Synthetic polypeptide
MRASQKNVKEKKFS

SEQ ID NO: 35526 - protein, 63 aa, Artificial Sequence
  Synthetic polypeptide
DEGITKKCEGEEIFLGQFIYNKTGTTVQTFELQGPWHTRQAHLEELVQKAMPHVQNIQECLFS

SEQ ID NO: 35527 - protein, 84 aa, Artificial Sequence
  Synthetic polypeptide
DEVQRYMCRFVIQAGITKKCEGEEIFLGQFIYNKTGTTVQTFELQHAVSEYLLCVKLNIFSNWGHPKYTCLYRFRVHGTPGKHI

SEQ ID NO: 35528 - protein, 26 aa, Artificial Sequence
  Synthetic polypeptide
MRFRGICAGLLYRRASQKNVKEKKFS

SEQ ID NO: 35529 - protein, 128 aa, Artificial Sequence
  Synthetic polypeptide
DEPDVYPGKCWAFPGSQGHTLIKLATKIIPTAVTMEHISEKVSPSGNISSAPKEFSVYGITKKCEGEEIFLGQFIYNKTGTTVQTFELQHAVSEYLLCVKLNIFSNWGHPKYTCLYRFRVHGTPGKHI

SEQ ID NO: 35530 - protein, 20 aa, Artificial Sequence
  Synthetic polypeptide
MSRMSTLESAGLFQVPRVIP

SEQ ID NO: 35531 - protein, 119 aa, Artificial Sequence
  Synthetic polypeptide
DEPDVYPGKCWAFPGSQGHTLIKLATKIIPTAVTMEHISEKVSPSGNISSAPKEFSVYGITKKCEGEEIFLGQFIYNKTGTTVQTFELQGPWHTRQAHLEELVQKAMPHVQNIQECLFS

SEQ ID NO: 35532 - protein, 140 aa, Artificial Sequence
  Synthetic polypeptide
DEPDVYPGKCWAFPGSQGHTLIKLATKIIPTAVTMEHISEKVSPSGNISSAPKEFSVYVQRYMCRFVIQAGITKKCEGEEIFLGQFIYNKTGTTVQTFELQHAVSEYLLCVKLNIFSNWGHPKYTCLYRFRVHGTPGKHI

SEQ ID NO: 35533 - protein, 28 aa, Artificial Sequence
  Synthetic polypeptide
GRAQWLMPVIPALGRPRQADHEGRKAPL

SEQ ID NO: 35534 - protein, 24 aa, Artificial Sequence
  Synthetic polypeptide
SQRLGGQGRQITREGKPPCKRYSR

SEQ ID NO: 35535 - protein, 182 aa, Artificial Sequence
  Synthetic polypeptide
PGAVAHACNPSAWEAKAGRSRGKESPPVSDTPDEGDEPMPIPEDLSTTSGGQQSSKSDRVVVTYGADDFRDFHAIIPKSFSRKYMPCFWKTKACLHLLSCKYRTCMFLHQPPRYIKYSLFYSLDTYHIIFGYLYHKVQNEGLGSCAVSWEHGSGVTVRVGVTVALMGLLLRRCCWTALRLLL

SEQ ID NO: 35536 - protein, 485 aa, Artificial Sequence
  Synthetic polypeptide
PGAVAHACNPSAWEAKAGRSRGKESPPVSDTPDEGDEPMPIPEDLSTTSGGQQSSKSDRVVASNVKVETQSDEENGRACEMNGEECAEDLRMLDASGEKMNGSHRDQGSSALSGVGGIRLPNGKLKCDICGIICIGPNVLMVHKRSHTGERPFQCNQCGASFTQKGNLLRHIKLHSGEKPFKCHLCNYACRRRDALTGHLRTHSVIKEETNHSEMAEDLCKIGSERSLVLDRLASNVAKRKSSMPQKFLGDKGLSDTPYDSSASYEKENEMMKSHVMDQAINNAINYLGAESLRPLVQTPPGGSEVVPVISPMYQLHKPLAEGTPRSNHSAQDSAVENLLLLSKAKLVPSEREASPSNSCQDSTDTESNNEEQRSGLIYLTNHIAPHARNGLSLKEEHRAYDLLRAASENSQDALRVVSTSGEQMKVYKCEHCRVLFLDHVMYTIHMGCHGFRDPFECNMCGYHSQDRYEFSSHITRGEHRFHMS

SEQ ID NO: 35537 - protein, 234 aa, Artificial Sequence
  Synthetic polypeptide
PGAVAHACNPSAWEAKAGRSRGKESPPVSDTPDEGDEPMPIPEDLSTTSGGQQSSKSDRVVASNVKVETQSDEENGRACEMNGEECAEDLRMLDASGEKMNGSHRDQGSSALSGVGGIRLPNGKLKCDICGIICIGPNVLMVHKRSHTGERPFQCNQCGASFTQKGNLLRHIKLHSGEKPFKCHLCNYACRRRDALTGHLRTHSVIKEETNHSEMAEDLCKIGSEISRAGQTSK

SEQ ID NO: 35538 - protein, 527 aa, Artificial Sequence
  Synthetic polypeptide
PGAVAHACNPSAWEAKAGRSRGKESPPVSDTPDEGDEPMPIPEDLSTTSGGQQSSKSDRVVASNVKVETQSDEENGRACEMNGEECAEDLRMLDASGEKMNGSHRDQGSSALSGVGGIRLPNGKLKCDICGIICIGPNVLMVHKRSHTGERPFQCNQCGASFTQKGNLLRHIKLHSGEKPFKCHLCNYACRRRDALTGHLRTHSVGKPHKCGYCGRSYKQRSSLEEHKERCHNYLESMGLPGTLYPVIKEETNHSEMAEDLCKIGSERSLVLDRLASNVAKRKSSMPQKFLGDKGLSDTPYDSSASYEKENEMMKSHVMDQAINNAINYLGAESLRPLVQTPPGGSEVVPVISPMYQLHKPLAEGTPRSNHSAQDSAVENLLLLSKAKLVPSEREASPSNSCQDSTDTESNNEEQRSGLIYLTNHIAPHARNGLSLKEEHRAYDLLRAASENSQDALRVVSTSGEQMKVYKCEHCRVLFLDHVMYTIHMGCHGFRDPFECNMCGYHSQDRYEFSSHITRGEHRFHMS

SEQ ID NO: 35539 - protein, 440 aa, Artificial Sequence
  Synthetic polypeptide
PGAVAHACNPSAWEAKAGRSRGKESPPVSDTPDEGDEPMPIPEDLSTTSGGQQSSKSDRVVGERPFQCNQCGASFTQKGNLLRHIKLHSGEKPFKCHLCNYACRRRDALTGHLRTHSVGKPHKCGYCGRSYKQRSSLEEHKERCHNYLESMGLPGTLYPVIKEETNHSEMAEDLCKIGSERSLVLDRLASNVAKRKSSMPQKFLGDKGLSDTPYDSSASYEKENEMMKSHVMDQAINNAINYLGAESLRPLVQTPPGGSEVVPVISPMYQLHKPLAEGTPRSNHSAQDSAVENLLLLSKAKLVPSEREASPSNSCQDSTDTESNNEEQRSGLIYLTNHIAPHARNGLSLKEEHRAYDLLRAASENSQDALRVVSTSGEQMKVYKCEHCRVLFLDHVMYTIHMGCHGFRDPFECNMCGYHSQDRYEFSSHITRGEHRFHMS

SEQ ID NO: 35540 - protein, 297 aa, Artificial Sequence
  Synthetic polypeptide
PGAVAHACNPSAWEAKAGRSRGKESPPVSDTPDEGDEPMPIPEDLSTTSGGQQSSKSDRVVGDKGLSDTPYDSSASYEKENEMMKSHVMDQAINNAINYLGAESLRPLVQTPPGGSEVVPVISPMYQLHKPLAEGTPRSNHSAQDSAVENLLLLSKAKLVPSEREASPSNSCQDSTDTESNNEEQRSGLIYLTNHIAPHARNGLSLKEEHRAYDLLRAASENSQDALRVVSTSGEQMKVYKCEHCRVLFLDHVMYTIHMGCHGFRDPFECNMCGYHSQDRYEFSSHITRGEHRFHMS

SEQ ID NO: 35541 - protein, 384 aa, Artificial Sequence
  Synthetic polypeptide
PGAVAHACNPSAWEAKAGRSRGKESPPVSDTPDEGDEPMPIPEDLSTTSGGQQSSKSDRVVASNVKVETQSDEENGRACEMNGEECAEDLRMLDASGEKMNGSHRDQGSSALSGVGGIRLPNGKLKCDICGIICIGPNVLMVHKRSHTGDKGLSDTPYDSSASYEKENEMMKSHVMDQAINNAINYLGAESLRPLVQTPPGGSEVVPVISPMYQLHKPLAEGTPRSNHSAQDSAVENLLLLSKAKLVPSEREASPSNSCQDSTDTESNNEEQRSGLIYLTNHIAPHARNGLSLKEEHRAYDLLRAASENSQDALRVVSTSGEQMKVYKCEHCRVLFLDHVMYTIHMGCHGFRDPFECNMCGYHSQDRYEFSSHITRGEHRFHMS

SEQ ID NO: 35542 - protein, 440 aa, Artificial Sequence
  Synthetic polypeptide
PGAVAHACNPSAWEAKAGRSRGKESPPVSDTPDEGDEPMPIPEDLSTTSGGQQSSKSDRVVASNVKVETQSDEENGRACEMNGEECAEDLRMLDASGEKMNGSHRDQGSSALSGVGGIRLPNGKLKCDICGIICIGPNVLMVHKRSHTGERPFQCNQCGASFTQKGNLLRHIKLHSGEKPFKCHLCNYACRRRDALTGHLRTHSGDKGLSDTPYDSSASYEKENEMMKSHVMDQAINNAINYLGAESLRPLVQTPPGGSEVVPVISPMYQLHKPLAEGTPRSNHSAQDSAVENLLLLSKAKLVPSEREASPSNSCQDSTDTESNNEEQRSGLIYLTNHIAPHARNGLSLKEEHRAYDLLRAASENSQDALRVVSTSGEQMKVYKCEHCRVLFLDHVMYTIHMGCHGFRDPFECNMCGYHSQDRYEFSSHITRGEHRFHMS

SEQ ID NO: 35543 - protein, 53 aa, Artificial Sequence
  Synthetic polypeptide
GVTSEPPTSELTASRTRWSRHLAVNKTRQDQDSPHSLTDLRITRRMMWTWKPW

SEQ ID NO: 35544 - protein, 25 aa, Artificial Sequence
  Synthetic polypeptide
LPLGQGGADTSQSTRPGRTRTPRTV

SEQ ID NO: 35545 - protein, 587 aa, Artificial Sequence
  Synthetic polypeptide
TTYIRADCLSDKVEQTPRSQQDPAGPGLPAQSDRLANHQEDDVDLEALVNDMNASLESLYSACSMQSDTVPLLQNGQHARSQPRASGPPRSIQPQVSPRQRVQRSQPVHILAVRRLQEEDQQFRTSSLPAIPNPFPELCGPGSPPVLTPGSLPPSQAAAKQDVKVFSEDGTSKVVEILADMTARDLCQLLVYKSHCVDDNSWTLVEHHPHLGLERCLEDHELVVQVESTMASESKFLFRKNYAKYEFFKNPMNFFPEQMVTWCQQSNGSQTQLLQNFLNSSSCPEIQGFLHVKELGKKSWKKLYVCLRRSGLYCSTKGTSKEPRHLQLLADLEDSNIFSLIAGRKQYNAPTDHGLCIKPNKVRNETKELRLLCAEDEQTRTCWMTAFRLLKYGMLLYQNYRIPQQRKALLSPFSTPVRSVSENSLVAMDFSGQTGRVIENPAEAQSAALEEGHAWRKRSTRMNILGSQSPLHPSTLSTVIHRTQHWFHGRISREESHRIIKQQGLVDGLFLLRDSQSNPKAFVLTLCHHQKIKNFQILPCEDDGQTFFSLDDGNTKFSDLIQLVDFYQLNKGVLPCKLKHHCIRVAL

SEQ ID NO: 35546 - protein, 541 aa, Artificial Sequence
  Synthetic polypeptide
TTYIRADCLSDKVEQTPRSQQDPAGPGLPAQSDRLANHQEDDVDLEALVNDMNASLESLYSACSMQSDTVPLLQNGQHARSQPRASGPPRSIQPQVSPRQRVQRSQPVHILAVRRLQEEDQQFRTSSLPAIPNPFPELCGPGSPPVLTPGSLPPSQAAAKQDVKVFSEDGTSKVVEILADMTARDLCQLLVYKSHCVDDNSWTLVEHHPHLGLERCLEDHELVVQVESTMASESKFLFRKNYAKYEFFKNPMNFFPEQMVTWCQQSNGSQTQLLQEPRHLQLLADLEDSNIFSLIAGRKQYNAPTDHGLCIKPNKVRNETKELRLLCAEDEQTRTCWMTAFRLLKYGMLLYQNYRIPQQRKALLSPFSTPVRSVSENSLVAMDFSGQTGRVIENPAEAQSAALEEGHAWRKRSTRMNILGSQSPLHPSTLSTVIHRTQHWFHGRISREESHRIIKQQGLVDGLFLLRDSQSNPKAFVLTLCHHQKIKNFQILPCEDDGQTFFSLDDGNTKFSDLIQLVDFYQLNKGVLPCKLKHHCIRVAL

SEQ ID NO: 35547 - protein, 113 aa, Artificial Sequence
  Synthetic polypeptide
TTYIRADCLSDKVEQTPRSQQDPAGPGLPAQSDRLANHQEDDVDLEALVNDMNASLESLYSACSMQSDTVPLLQNGQHARSQPRASGPPRSIQPQVSPRQRVQRSQPVHILAV

SEQ ID NO: 35548 - protein, 17 aa, Artificial Sequence
  Synthetic polypeptide
QDPHLYNTEMSQVPLLV

SEQ ID NO: 35549 - protein, 7 aa, Artificial Sequence
  Synthetic polypeptide
ARCPCSC

SEQ ID NO: 35550 - protein, 29 aa, Artificial Sequence
  Synthetic polypeptide
GQEFETSLGNITRPPSLQYRNEPGALARV

SEQ ID NO: 35551 - protein, 28 aa, Artificial Sequence
  Synthetic polypeptide
ALQDGARYGRCVHCREIVLQQPSGHRQP

SEQ ID NO: 35552 - protein, 389 aa, Artificial Sequence
  Synthetic polypeptide
HCRMAPDTEDVCIVERLFSSSLVAIVSLKAPRKLKVCHFKKGTEICNYSYSNTILAVKLNRQRLIVCLEESLYIHNIRDMKVLHTIRETPPNPAGLCALSINNDNCYLAYPGSATIGEVQVFDTINLRAANMIPAHDSPLAALAFDASGTKLATASEKGTVIRVFSIPEGQKLFEFRRGVKRCVSICSLAFSMDGMFLSASSNTETVHIFKLETVKEKPPEEPTTWTGYFGKVLMASTSYLPSQVTEMFNQGRAFATVRLPFCGHKNICSLATIQKIPRLLVGAADGYLYMYNLDPQEGGECALMKQHRLDGSLETTNEILDSASHDCPLVTQTYGAAAGKGTYVPSSPTRLAYTDDLGAVGGACLEDEASALRLDEDSEHPPMILRTD

SEQ ID NO: 35553 - protein, 13 aa, Artificial Sequence
  Synthetic polypeptide
TAGWRPIRKMCAL

SEQ ID NO: 35554 - protein, 378 aa, Artificial Sequence
  Synthetic polypeptide
HCRMAPDTEDVCIVERLFSSSLVAIVSLKAPRKLKVCHFKKGTEICNYSYSNTILAVKLNRQRLIVCLEESLYIHNIRDMKVLHTIRETPPNPAGLCALSINNDNCYLAYPGSATIGEVQVFDTINLRAANMIPAHDSPLAALAFDASGTKLATASEKGTVIRVFSIPEGQKLFEFRRGVKRCVSICSLAFSMDGMFLSASSNTETVHIFKLETVKEKPPEEPTTWTGYFGKVLMASTSYLPSQVTEMFNQGRAFATVRLPFCGHKNICSLATIQKIPRLLVGAADGYLYMYNLDPQEGGECALMKQHRLDGSLETTNEILDSASHDCPLVTQTYGAAAGKAYTDDLGAVGGACLEDEASALRLDEDSEHPPMILRTD

SEQ ID NO: 35555 - protein, 29 aa, Artificial Sequence
  Synthetic polypeptide
HCRMARSRYGRCVHCREIVLQQPSGHRQP

SEQ ID NO: 35556 - protein, 390 aa, Artificial Sequence
  Synthetic polypeptide
TAGWRVADTEDVCIVERLFSSSLVAIVSLKAPRKLKVCHFKKGTEICNYSYSNTILAVKLNRQRLIVCLEESLYIHNIRDMKVLHTIRETPPNPAGLCALSINNDNCYLAYPGSATIGEVQVFDTINLRAANMIPAHDSPLAALAFDASGTKLATASEKGTVIRVFSIPEGQKLFEFRRGVKRCVSICSLAFSMDGMFLSASSNTETVHIFKLETVKEKPPEEPTTWTGYFGKVLMASTSYLPSQVTEMFNQGRAFATVRLPFCGHKNICSLATIQKIPRLLVGAADGYLYMYNLDPQEGGECALMKQHRLDGSLETTNEILDSASHDCPLVTQTYGAAAGKGTYVPSSPTRLAYTDDLGAVGGACLEDEASALRLDEDSEHPPMILRTD

SEQ ID NO: 35557 - protein, 379 aa, Artificial Sequence
  Synthetic polypeptide
TAGWRVADTEDVCIVERLFSSSLVAIVSLKAPRKLKVCHFKKGTEICNYSYSNTILAVKLNRQRLIVCLEESLYIHNIRDMKVLHTIRETPPNPAGLCALSINNDNCYLAYPGSATIGEVQVFDTINLRAANMIPAHDSPLAALAFDASGTKLATASEKGTVIRVFSIPEGQKLFEFRRGVKRCVSICSLAFSMDGMFLSASSNTETVHIFKLETVKEKPPEEPTTWTGYFGKVLMASTSYLPSQVTEMFNQGRAFATVRLPFCGHKNICSLATIQKIPRLLVGAADGYLYMYNLDPQEGGECALMKQHRLDGSLETTNEILDSASHDCPLVTQTYGAAAGKAYTDDLGAVGGACLEDEASALRLDEDSEHPPMILRTD

SEQ ID NO: 35558 - protein, 56 aa, Artificial Sequence
  Synthetic polypeptide
SQHFGRPRRADHKVRRSRPSSQTRRRKGKRLGQELGCRRPELLPCPLRPGLLTPAP

SEQ ID NO: 35559 - protein, 55 aa, Artificial Sequence
  Synthetic polypeptide
QGAFAHACNPSTLGGRGGQITRSGDRDHPRKHEEERERGWARSWAAAAPSSCLAL

SEQ ID NO: 35560 - protein, 951 aa, Artificial Sequence
  Synthetic polypeptide
RARLLMPVIPALWEAEAGRSQGQEIETILANTKKKGKEAGPGAGLPPPRAPALPSEARAPHASSLTAAKRSKAKAKGKEVKKENRGKGGAVSKLMESMAAEEDFEPNQDSSFSEDEHLPRGGAVERPLTPAPRSCIIDKDELKDGLRVLIPMDDKLLYAGHVQTVHSPDIYRVVVEGERGNRPHIYCLEQLLQEAIIDVRPASTRFLPQGTRIAAYWSQQYRCLYPGTVVRGLLDLEDDGDLITVEFDDGDTGRIPLSHIRLLPPDYKIQCAEPSPALLVPSAKRRSRKTSKDTGEGKDGGTAGSEEPGAKARGRGRKPSAKAKGGRAATLEEGNPTDEVPSTPLALEPSSTPGSKKSPPEPVDKRAKAPKARPAPPQPSPAPPAFTSCPAPEPFAELPAPATSLAPAPLITMPATRPKPKKARAAEESGAKGPRRPGEEAELLVKLDHEGVTSPKSKKAKEALLLREDPGAGGWQEPKSLLSLGSYPPAAGSSEPKAPWPKATDGDLAQEPGPGLTFEDSGNPKSPDKAQAEQDGAEESESSSSSSSGSSSSSSSSSSSGSETEGEEEGDKNGDGGCGTGGRNCSAASSRAASPASSSSSSSSSSSSSSSSSSSSSSSSSSSSSSSSSSSSSSSSSSSSSSSSSSSSSSSSSSTTDEDSSCSSDDEAAPAPTAGPSAQAALPTKATKQAGKARPSAHSPGKKTPAPQPQAPPPQPTQPLQPKAQAGAKSRPKKREGVHLPTTKELAKRQRLPSVENRPKIAAFLPARQLWKWFGKPTQRRGMKGKARKLFYKAIVRGKEMIRIGDCAVFLSAGRPNLPYIGRIQSMWESWGNNMVVRVKWFYHPEETSPGKQFHQGQHWDQKSSRSLPAALRVSSQRKDFMERALYQSSHVDENDVQTVSHKCLVVGLEQYEQMLKTKKYQDSEGLYYLAGTYEPTTGMIFSTDGVPVLC

SEQ ID NO: 35561 - protein, 951 aa, Artificial Sequence
  Synthetic polypeptide
RARLLMPVIPALWEAEAGRSQGQEIETILANTKKKGKEAGPGAGLPPPRAPALPSEARAPHASSLTAAKRSKAKAKGKEVKKENRGKGGAVSKLMESMAAEEDFEPNQDSSFSEDEHLPRGGAVERPLTPAPRSCIIDKDELKDGLRVLIPMDDKLLYAGHVQTVHSPDIYRVVVEGERGNRPHIYCLEQLLQEAIIDVRPASTRFLPQGTRIAAYWSQQYRCLYPGTVVRGLLDLEDDGDLITVEFDDGDTGRIPLSHIRLLPPDYKIQCAEPSPALLVPSAKRRSRKTSKDTGEGKDGGTAGSEEPGAKARGRGRKPSAKAKGDRAATLEEGNPTDEVPSTPLALEPSSTPGSKKSPPEPVDKRAKAPKARPAPPQPSPAPPAFTSCPAPEPFAELPAPATSLAPAPLITMPATRPKPKKARAAEESGAKGPRRPGEEAELLVKLDHEGVTSPKSKKAKEALLLREDPGAGGWQEPKSLLSLGSYPPAAGSSEPKAPWPKATDGDLAQEPGPGLTFEDSGNPKSPDKAQAEQDGAEESESSSSSSSGSSSSSSSSSSSGSETEGEEEGDKNGDGGCGTGGRNCSAASSRAASPASSSSSSSSSSSSSSSSSSSSSSSSSSSSSSSSSSSSSSSSSSSSSSSSSSSSSSSSSSTTDEDSSCSSDDEAAPAPTAGPSAQAALPTKATKQAGKARPSAHSPGKKTPAPQPQAPPPQPTQPLQPKAQAGAKSRPKKREGVHLPTTKELAKRQRLPSVENRPKIAAFLPARQLWKWFGKPTQRRGMKGKARKLFYKAIVRGKEMIRIGDCAVFLSAGRPNLPYIGRIQSMWESWGNNMVVRVKWFYHPEETSPGKQFHQGQHWDQKSSRSLPAALRVSSQRKDFMERALYQSSHVDENDVQTVSHKCLVVGLEQYEQMLKTKKYQDSEGLYYLAGTYEPTTGMIFSTDGVPVLC

SEQ ID NO: 35562 - protein, 127 aa, Artificial Sequence
  Synthetic polypeptide
RARLLMPVIPALWEAEAGRSQGQEIETILANTKKKGKEAGPGAGLPPPRAPALPSEARAPHASSLTAAKRSKAKAKGKEVKKENRGKGGAVSKLMESMAAEEDFEPNQDSSFSEDEHLPRGGAVERP

SEQ ID NO: 35563 - protein, 40 aa, Artificial Sequence
  Synthetic polypeptide
LKETGKMQLLKAMRGLLGQLCGQRDGALGLVPWEPSATAL

SEQ ID NO: 35564 - protein, 2908 aa, Artificial Sequence
  Synthetic polypeptide
RQCEAFLGSFVASGMGPSASSHGSPVPLPSDLSFRSPTPSNLPMVQLWAAHAHEGFSHLPSGLYPSYLHLNHLEPPSSGSPLLSQLGQPSIFDTQKGQGPGGDGFYLPTAGAPGSLHSHAPSARTPGGGHSSGAPAKGSSSRDGPAKERAGRGGEPPPLFGKKDPRARGEEASGPRGVVDLTQEARAEGRQDRGPPRLAERLSPFLAESKTKNAALQPSVLTMCNGGAGDVGLPALVAEAGRGGAKEAARQDEGARLLRRTETLLPGPRPCPSPLPPPPAPPKGPPAPPAATPAGVYTVFREQGREHRVVAPTFVPSVEAFDERPGPIQIASQARDARAREREAGRPGVLQAPPGSPRPLDRPEGLREKNSVIRSLKRPPPADAPTVRATRASPDPRAYVPAKELLKPEADPRPCERAPRGPAGPAAQQAAKLFGLEPGRPPPTGPEHKWKPFELGNFAATQMAVLAAQHHHSRAEEEAAVVAASSSKKAYLDPGAVLPRSAATCGRPVADMHSAAHGSGEASAMQSLIKYSGSFARDAVAVRPGGCGKKSPFGGLGTMKPEPAPTSAGASRAQARLPHSGGPAAGGGRQLKRDPERPESAKAFGREGSGAQGEAEVRHPPVGIAVAVARQKDSGGSGRLGPGLVDQERSLSLSNVKGHGRADEDCVDDRARHREERLLGARLDRDQEKLLRESKELADLARLHPTSCAPNGLNPNLMVTGGPALAGSGRWSADPAAHLATHPWLPRSGNASMWLAGHPYGLGPPSLHQGMAPAFPPGLGGSLPSAYQFVRDPQSGQLVVIPSDHLPHFAELMERATVPPLWPALYPPGRSPLHHAQQLQLFSQQHFLRQQEFLYLQQQAAQALELQRSAQLVQERLKAQEHRAEMEEKGSKRGLEAAGKAGLATAGPGLLPRKPPGLAAGPAGTYGKAVSPPPSPRASPVAALKAKVIQKLEDVSKPPAYAYPATPSSHPTSPPPASPPPTPGITRKEEAPENVVEKKDLELEKEAPSPFQALFSDIPPRYPFQALPPHYGRPYPFLLQPTAAADADGLAPDVPLPADGPERLALSPEDKPIRLSPSKITEPLREGPEEEPLAEREVKAEVEDMDEGPTELPPLESPLPLPAAEAMATPSPAGGCGGGLLEAQALSATGQSCAEPSECPDFVEGPEPRVDSPGRTEPCTAALDLGVQLTPETLVEAKEEPVEVPVAVPVVEAVPEEGLAQVAPSESQPTLEMSDCDVPAGEGQCPSLEPQEAVPVLGSTCFLEEASSDQFLPSLEDPLAGMNALAAAAELPQARPLPSPGAAGAQALEKLEAAESLVLEQSFLHGITLLSEIAELELERRSQEMGGAERALVARPSLESLLAAGSHMLREVLDGPVVDPLKNLRLPRELKPNKKYSWMRKKEERMYAMKSSLEDMDALELDFRMRLAEVQRQYKEKQRELVKLQRRRDSEDRREEPHRSLARRGPGRPRKRTHAPSALSPPRKRGKSGHSSGKLSSKSLLTSDDYELGAGIRKRHKGSEEEHDALIGMGKARGRNQTWDEHEASSDFISQLKIKKKKMASDQEQLASKLDKALSLTKQDKLKSPFKFSDSAGGKSKTSGGCGRYLTPYDSLLGKNRKALAKGLGLSLKSSREGKHKRAAKTRKMEVGFKARGQPKSAHSPFASEVSSYSYNTDSEEDEEFLKDEWPAQGPSSSKLTPSLLCSMVAKNSKAAGGPKLTKRGLAAPRTLKPKPATSRKQPFCLLLREAEARSSFSDSSEESFDQDESSEEEDEEEELEEEDEASGGGYRLGARERALSPGLEESGLGLLARFAASALPSPTVGPSLSVVQLEAKQKARKKEERQSLLGTEFEYTDSESEVKVRKRSPAGLLRPKKGLGEPGPSLAAPTPGARGPDPSSPDKAKLAVEKGRKARKLRGPKEPGFEAGPEASDDDLWTRRRSERIFLHDASAAAPAPVSTAPATKTSRCAKGGPLSPRKDAGRAKDRKDPRKKKKGKEAGPGAGLPPPRAPALPSEARAPHASSLTAAKRSKAKAKGKEVKKENRGKGGAVSKLMESMAAEEDFEPNQDSSFSEDEHLPRGGAVERPLTPAPRSCIIDKDELKDGLRVLIPMDDKLLYAGHVQTVHSPDIYRVVVEGERGNRPHIYCLEQLLQEAIIDVRPASTRFLPQGTRIAAYWSQQYRCLYPGTVVRGLLDLEDDGDLITVEFDDGDTGRIPLSHIRLLPPDYKIQCAEPSPALLVPSAKRRSRKTSKDTGEGKDGGTAGSEEPGAKARGRGRKPSAKAKGGRAATLEEGNPTDEVPSTPLALEPSSTPGSKKSPPEPVDKRAKAPKARPAPPQPSPAPPAFTSCPAPEPFAELPAPATSLAPAPLITMPATRPKPKKARAAEESGAKGPRRPGEEAELLVKLDHEGVTSPKSKKAKEALLLREDPGAGGWQEPKSLLSLGSYPPAAGSSEPKAPWPKATDGDLAQEPGPGLTFEDSGNPKSPDKAQAEQDGAEESESSSSSSSGSSSSSSSSSSSGSETEGEEEGDKNGDGGCGTGGRNCSAASSRAASPASSSSSSSSSSSSSSSSSSSSSSSSSSSSSSSSSSSSSSSSSSSSSSSSSSSSSSSSSSTTDEDSSCSSDDEAAPAPTAGPSAQAALPTKATKQAGKARPSAHSPGKKTPAPQPQAPPPQPTQPLQPKAQAGAKSRPKKREGVHLPTTKELAKRQRLPSVENRPKIAAFLPARQLWKWFGKPTQRRGMKGKARKLFYKAIVRGKEMIRIGDCAVFLSAGRPNLPYIGRIQSMWESWGNNMVVRVKWFYHPEETSPGKQFHQGQHWDQKSSRSLPAALRVSSQRKDFMERALYQSSHVDENDVQTVSHKCLVVGLEQYEQMLKTKKYQDSEGLYYLAGTYEPTTGMIFSTDGVPVLC

SEQ ID NO: 35565 - protein, 109 aa, Artificial Sequence
  Synthetic polypeptide
IEGHFTELVWTLKKMSMACKAEEGGELFLIKRDWKNATAKGNARPSWAALWPAGWGPRPRPMGAQCHCPLTCLSAPQPLATCPWCSCGPPTPMKASPTCPVGCTHPTST

SEQ ID NO: 35566 - protein, 2908 aa, Artificial Sequence
  Synthetic polypeptide
RQCEAFLGSFVASGMGPSASSHGSPVPLPSDLSFRSPTPSNLPMVQLWAAHAHEGFSHLPSGLYPSYLHLNHLEPPSSGSPLLSQLGQPSIFDTQKGQGPGGDGFYLPTAGAPGSLHSHAPSARTPGGGHSSGAPAKGSSSRDGPAKERAGRGGEPPPLFGKKDPRARGEEASGPRGVVDLTQEARAEGRQDRGPPRLAERLSPFLAESKTKNAALQPSVLTMCNGGAGDVGLPALVAEAGRGGAKEAARQDEGARLLRRTETLLPGPRPCPSPLPPPPAPPKGPPAPPAATPAGVYTVFREQGREHRVVAPTFVPSVEAFDERPGPIQIASQARDARAREREAGRPGVLQAPPGSPRPLDRPEGLREKNSVIRSLKRPPPADAPTVRATRASPDPRAYVPAKELLKPEADPRPCERAPRGPAGPAAQQAAKLFGLEPGRPPPTGPEHKWKPFELGNFAATQMAVLAAQHHHSRAEEEAAVVAASSSKKAYLDPGAVLPRSAATCGRPVADMHSAAHGSGEASAMQSLIKYSGSFARDAVAVRPGGCGKKSPFGGLGTMKPEPAPTSAGASRAQARLPHSGGPAAGGGRQLKRDPERPESAKAFGREGSGAQGEAEVRHPPVGIAVAVARQKDSGGSGRLGPGLVDQERSLSLSNVKGHGRADEDCVDDRARHREERLLGARLDRDQEKLLRESKELADLARLHPTSCAPNGLNPNLMVTGGPALAGSGRWSADPAAHLATHPWLPRSGNASMWLAGHPYGLGPPSLHQGMAPAFPPGLGGSLPSAYQFVRDPQSGQLVVIPSDHLPHFAELMERATVPPLWPALYPPGRSPLHHAQQLQLFSQQHFLRQQEFLYLQQQAAQALELQRSAQLVQERLKAQEHRAEMEEKGSKRGLEAAGKAGLATAGPGLLPRKPPGLAAGPAGTYGKAVSPPPSPRASPVAALKAKVIQKLEDVSKPPAYAYPATPSSHPTSPPPASPPPTPGITRKEEAPENVVEKKDLELEKEAPSPFQALFSDIPPRYPFQALPPHYGRPYPFLLQPTAAADADGLAPDVPLPADGPERLALSPEDKPIRLSPSKITEPLREGPEEEPLAEREVKAEVEDMDEGPTELPPLESPLPLPAAEAMATPSPAGGCGGGLLEAQALSATGQSCAEPSECPDFVEGPEPRVDSPGRTEPCTAALDLGVQLTPETLVEAKEEPVEVPVAVPVVEAVPEEGLAQVAPSESQPTLEMSDCDVPAGEGQCPSLEPQEAVPVLGSTCFLEEASSDQFLPSLEDPLAGMNALAAAAELPQARPLPSPGAAGAQALEKLEAAESLVLEQSFLHGITLLSEIAELELERRSQEMGGAERALVARPSLESLLAAGSHMLREVLDGPVVDPLKNLRLPRELKPNKKYSWMRKKEERMYAMKSSLEDMDALELDFRMRLAEVQRQYKEKQRELVKLQRRRDSEDRREEPHRSLARRGPGRPRKRTHAPSALSPPRKRGKSGHSSGKLSSKSLLTSDDYELGAGIRKRHKGSEEEHDALIGMGKARGRNQTWDEHEASSDFISQLKIKKKKMASDQEQLASKLDKALSLTKQDKLKSPFKFSDSAGGKSKTSGGCGRYLTPYDSLLGKNRKALAKGLGLSLKSSREGKHKRAAKTRKMEVGFKARGQPKSAHSPFASEVSSYSYNTDSEEDEEFLKDEWPAQGPSSSKLTPSLLCSMVAKNSKAAGGPKLTKRGLAAPRTLKPKPATSRKQPFCLLLREAEARSSFSDSSEESFDQDESSEEEDEEEELEEEDEASGGGYRLGARERALSPGLEESGLGLLARFAASALPSPTVGPSLSVVQLEAKQKARKKEERQSLLGTEFEYTDSESEVKVRKRSPAGLLRPKKGLGEPGPSLAAPTPGARGPDPSSPDKAKLAVEKGRKARKLRGPKEPGFEAGPEASDDDLWTRRRSERIFLHDASAAAPAPVSTAPATKTSRCAKGGPLSPRKDAGRAKDRKDPRKKKKGKEAGPGAGLPPPRAPALPSEARAPHASSLTAAKRSKAKAKGKEVKKENRGKGGAVSKLMESMAAEEDFEPNQDSSFSEDEHLPRGGAVERPLTPAPRSCIIDKDELKDGLRVLIPMDDKLLYAGHVQTVHSPDIYRVVVEGERGNRPHIYCLEQLLQEAIIDVRPASTRFLPQGTRIAAYWSQQYRCLYPGTVVRGLLDLEDDGDLITVEFDDGDTGRIPLSHIRLLPPDYKIQCAEPSPALLVPSAKRRSRKTSKDTGEGKDGGTAGSEEPGAKARGRGRKPSAKAKGDRAATLEEGNPTDEVPSTPLALEPSSTPGSKKSPPEPVDKRAKAPKARPAPPQPSPAPPAFTSCPAPEPFAELPAPATSLAPAPLITMPATRPKPKKARAAEESGAKGPRRPGEEAELLVKLDHEGVTSPKSKKAKEALLLREDPGAGGWQEPKSLLSLGSYPPAAGSSEPKAPWPKATDGDLAQEPGPGLTFEDSGNPKSPDKAQAEQDGAEESESSSSSSSGSSSSSSSSSSSGSETEGEEEGDKNGDGGCGTGGRNCSAASSRAASPASSSSSSSSSSSSSSSSSSSSSSSSSSSSSSSSSSSSSSSSSSSSSSSSSSSSSSSSSSTTDEDSSCSSDDEAAPAPTAGPSAQAALPTKATKQAGKARPSAHSPGKKTPAPQPQAPPPQPTQPLQPKAQAGAKSRPKKREGVHLPTTKELAKRQRLPSVENRPKIAAFLPARQLWKWFGKPTQRRGMKGKARKLFYKAIVRGKEMIRIGDCAVFLSAGRPNLPYIGRIQSMWESWGNNMVVRVKWFYHPEETSPGKQFHQGQHWDQKSSRSLPAALRVSSQRKDFMERALYQSSHVDENDVQTVSHKCLVVGLEQYEQMLKTKKYQDSEGLYYLAGTYEPTTGMIFSTDGVPVLC

SEQ ID NO: 35567 - protein, 1070 aa, Artificial Sequence
  Synthetic polypeptide
GLLKRTVWFCQGTSNKLTQLGTFEDHFLSLQRMFNNCEVVLGNLEITYVQRNYDLSFLKTIQEVAGYVLIALNTVERIPLENLQIIRGNMYYENSYALAVLSNYDANKTGLKELPMRNLQGQKCDPSCPNGSCWGAGEENCQKLTKIICAQQCSGRCRGKSPSDCCHNQCAAGCTGPRESDCLVCRKFRDEATCKDTCPPLMLYNPTTYQMDVNPEGKYSFGATCVKKCPRNYVVTDHGSCVRACGADSYEMEEDGVRKCKKCEGPCRKVCNGIGIGEFKDSLSINATNIKHFKNCTSISGDLHILPVAFRGDSFTHTPPLDPQELDILKTVKEITGFLLIQAWPENRTDLHAFENLEIIRGRTKQHGQFSLAVVSLNITSLGLRSLKEISDGDVIISGNKNLCYANTINWKKLFGTSGQKTKIISNRGENSCKATGQVCHALCSPEGCWGPEPRDCVSCRNVSRGRECVDKCNLLEGEPREFVENSECIQCHPECLPQAMNITCTGRGPDNCIQCAHYIDGPHCVKTCPAGVMGENNTLVWKYADAGHVCHLCHPNCTYGCTGPGLEGCPTNGPKIPSIATGMVGALLLLLVVALGIGLFMRRRHIVRKRTLRRLLQERELVEPLTPSGEAPNQALLRILKETEFKKIKVLGSGAFGTVYKGLWIPEGEKVKIPVAIKELREATSPKANKEILDEAYVMASVDNPHVCRLLGICLTSTVQLITQLMPFGCLLDYVREHKDNIGSQYLLNWCVQIAKGMNYLEDRRLVHRDLAARNVLVKTPQHVKITDFGLAKLLGAEEKEYHAEGGKVPIKWMALESILHRIYTHQSDVWSYGVTVWELMTFGSKPYDGIPASEISSILEKGERLPQPPICTIDVYMIMVKCWMIDADSRPKFRELIIEFSKMARDPQRYLVIQGDERMHLPSPTDSNFYRALMDEEDMDDVVDADEYLIPQQGFFSSPSTSRTPLLSSLSATSNNSTVACIDRNGLQSCPIKEDSFLQRYSSDPTGALTEDSIDDTFLPVPGEWLVWKQSCSSTSSTHSAAASLQCPSQVLPPASPEGETVADLQTQ

SEQ ID NO: 35568 - protein, 59 aa, Artificial Sequence
  Synthetic polypeptide
HKACSRGQCGFAKARVTSSRSWALLKIIFSASRGCSITVRWSLGIWKLPMCRGIMIFPS

SEQ ID NO: 35569 - protein, 23 aa, Artificial Sequence
  Synthetic polypeptide
TSKLLCCDIRLAQEDSVVLPRHE

SEQ ID NO: 35570 - protein, 607 aa, Artificial Sequence
  Synthetic polypeptide
GLLKRTVWFCQGTSNKLTQLGTFEDHFLSLQRMFNNCEVVLGNLEITYVQRNYDLSFLKTIQEVAGYVLIALNTVERIPLENLQIIRGNMYYENSYALAVLSNYDANKTGLKELPMRNLQEILHGAVRFSNNPALCNVESIQWRDIVSSDFLSNMSMDFQNHLGSCQKCDPSCPNGSCWGAGEENCQKLTKIICAQQCSGRCRGKSPSDCCHNQCAAGCTGPRESDCLVCRKFRDEATCKDTCPPLMLYNPTTYQMDVNPEGKYSFGATCVKKCPRNYVVTDHGSCVRACGADSYEMEEDGVRKCKKCEGPCRKVCNGIGIGEFKDSLSINATNIKHFKNCTSISGDLHILPVAFRGDSFTHTPPLDPQELDILKTVKEITGFLLIQAWPENRTDLHAFENLEIIRGRTKQHGQFSLAVVSLNITSLGLRSLKEISDGDVIISGNKNLCYANTINWKKLFGTSGQKTKIISNRGENSCKATGQVCHALCSPEGCWGPEPRDCVSCRNVSRGRECVDKCNLLEGEPREFVENSECIQCHPECLPQAMNITCTGRGPDNCIQCAHYIDGPHCVKTCPAGVMGENNTLVWKYADAGHVCHLCHPNCTYGS

SEQ ID NO: 35571 - protein, 684 aa, Artificial Sequence
  Synthetic polypeptide
GLLKRTVWFCQGTSNKLTQLGTFEDHFLSLQRMFNNCEVVLGNLEITYVQRNYDLSFLKTIQEVAGYVLIALNTVERIPLENLQIIRGNMYYENSYALAVLSNYDANKTGLKELPMRNLQEILHGAVRFSNNPALCNVESIQWRDIVSSDFLSNMSMDFQNHLGSCQKCDPSCPNGSCWGAGEENCQKLTKIICAQQCSGRCRGKSPSDCCHNQCAAGCTGPRESDCLVCRKFRDEATCKDTCPPLMLYNPTTYQMDVNPEGKYSFGATCVKKCPRNYVVTDHGSCVRACGADSYEMEEDGVRKCKKCEGPCRKVCNGIGIGEFKDSLSINATNIKHFKNCTSISGDLHILPVAFRGDSFTHTPPLDPQELDILKTVKEITGFLLIQAWPENRTDLHAFENLEIIRGRTKQHGQFSLAVVSLNITSLGLRSLKEISDGDVIISGNKNLCYANTINWKKLFGTSGQKTKIISNRGENSCKATGQVCHALCSPEGCWGPEPRDCVSCRNVSRGRECVDKCNLLEGEPREFVENSECIQCHPECLPQAMNITCTGRGPDNCIQCAHYIDGPHCVKTCPAGVMGENNTLVWKYADAGHVCHLCHPNCTYGPGNESLKAMLFCLFKLSSCNQSNDGSVSHQSGSPAAQESCLGWIPSLLPSEFQLGWGGCSHLHAWPSASVIITASSCH

SEQ ID NO: 35572 - protein, 384 aa, Artificial Sequence
  Synthetic polypeptide
GLLKRTVWFCQGTSNKLTQLGTFEDHFLSLQRMFNNCEVVLGNLEITYVQRNYDLSFLKTIQEVAGYVLIALNTVERIPLENLQIIRGNMYYENSYALAVLSNYDANKTGLKELPMRNLQEILHGAVRFSNNPALCNVESIQWRDIVSSDFLSNMSMDFQNHLGSCQKCDPSCPNGSCWGAGEENCQKLTKIICAQQCSGRCRGKSPSDCCHNQCAAGCTGPRESDCLVCRKFRDEATCKDTCPPLMLYNPTTYQMDVNPEGKYSFGATCVKKCPRNYVVTDHGSCVRACGADSYEMEEDGVRKCKKCEGPCRKVCNGIGIGEFKDSLSINATNIKHFKNCTSISGDLHILPVAFRGDSFTHTPPLDPQELDILKTVKEITGLS

SEQ ID NO: 35573 - protein, 1189 aa, Artificial Sequence
  Synthetic polypeptide
GLLKRTVWFCQGTSNKLTQLGTFEDHFLSLQRMFNNCEVVLGNLEITYVQRNYDLSFLKTIQEVAGYVLIALNTVERIPLENLQIIRGNMYYENSYALAVLSNYDANKTGLKELPMRNLQEILHGAVRFSNNPALCNVESIQWRDIVSSDFLSNMSMDFQNHLGSCQKCDPSCPNGSCWGAGEENCQKLTKIICAQQCSGRCRGKSPSDCCHNQCAAGCTGPRESDCLVCRKFRDEATCKDTCPPLMLYNPTTYQMDVNPEGKYSFGATCVKKCPRNYVVTDHGSCVRACGADSYEMEEDGVRKCKKCEGPCRKVCNGIGIGEFKDSLSINATNIKHFKNCTSISGDLHILPVAFRGDSFTHTPPLDPQELDILKTVKEITGFLLIQAWPENRTDLHAFENLEIIRGRTKQHGQFSLAVVSLNITSLGLRSLKEISDGDVIISGNKNLCYANTINWKKLFGTSGQKTKIISNRGENSCKATGQVCHALCSPEGCWGPEPRDCVSCRNVSRGRECVDKCNLLEGEPREFVENSECIQCHPECLPQAMNITCTGRGPDNCIQCAHYIDGPHCVKTCPAGVMGENNTLVWKYADAGHVCHLCHPNCTYGCTGPGLEGCPTNGPKIPSIATGMVGALLLLLVVALGIGLFMRRRHIVRKRTLRRLLQERELVEPLTPSGEAPNQALLRILKETEFKKIKVLGSGAFGTVYKGLWIPEGEKVKIPVAIKELREATSPKANKEILDEAYVMASVDNPHVCRLLGICLTSTVQLITQLMPFGCLLDYVREHKDNIGSQYLLNWCVQIAKGMNYLEDRRLVHRDLAARNVLVKTPQHVKITDFGLAKLLGAEEKEYHAEGGKVPIKWMALESILHRIYTHQSDVWSYGVTVWELMTFGSKPYDGIPASEISSILEKGERLPQPPICTIDVYMIMVKCWMIDADSRPKFRELIIEFSKMARDPQRYLVIQGDERMHLPSPTDSNFYRALMDEEDMDDVVDADEYLIPQQGFFSSPSTSRTPLLSSLSATSNNSTVACIDRNGLQSCPIKEDSFLQRYSSDPTGALTEDSIDDTFLPVPEYINQSVPKRPAGSVQNPVYHNQPLNPAPSRDPHYQDPHSTAVGNPEYLNTVQPTCVNSTFDSPAHWAQKGSHQISLDNPDYQQDFFPKEAKPNGIFKGSTAENAEYLRVAPQSSEFIGA

SEQ ID NO: 35574 - protein, 636 aa, Artificial Sequence
  Synthetic polypeptide
GLLKRTVWFCQGTSNKLTQLGTFEDHFLSLQRMFNNCEVVLGNLEITYVQRNYDLSFLKTIQEVAGYVLIALNTVERIPLENLQIIRGNMYYENSYALAVLSNYDANKTGLKELPMRNLQEILHGAVRFSNNPALCNVESIQWRDIVSSDFLSNMSMDFQNHLGSCQKCDPSCPNGSCWGAGEENCQKLTKIICAQQCSGRCRGKSPSDCCHNQCAAGCTGPRESDCLVCRKFRDEATCKDTCPPLMLYNPTTYQMDVNPEGKYSFGATCVKKCPRNYVVTDHGSCVRACGADSYEMEEDGVRKCKKCEGPCRKVCNGIGIGEFKDSLSINATNIKHFKNCTSISGDLHILPVAFRGDSFTHTPPLDPQELDILKTVKEITGFLLIQAWPENRTDLHAFENLEIIRGRTKQHGQFSLAVVSLNITSLGLRSLKEISDGDVIISGNKNLCYANTINWKKLFGTSGQKTKIISNRGENSCKATGQVCHALCSPEGCWGPEPRDCVSCRNVSRGRECVDKCNLLEGEPREFVENSECIQCHPECLPQAMNITCTGRGPDNCIQCAHYIDGPHCVKTCPAGVMGENNTLVWKYADAGHVCHLCHPNCTYGCTGPGLEGCPTNGSYIVSHFPRSFYKMSVH

SEQ ID NO: 35575 - protein, 80 aa, Artificial Sequence
  Synthetic polypeptide
GWVRWLMPVIPALWARRVDHELRRSRPSWLTRAQKPKSIAGISKDSIQPIIYAAPTRTAVAPGAVCGPSPYRGCGTSGSF

SEQ ID NO: 35576 - protein, 156 aa, Artificial Sequence
  Synthetic polypeptide
HVHRSQKALLVFRRTLSNLLYMPLLRGLLWLQVLCAGPLHTEAVVLLVPSDDGRAFLLRSRLLHPEAHVPPAADRGASLQCVLHQAAPKSRPRSPAAGAALLHRPRRTGDEPCREFHGNGFPGPTQLTPGECGLPAPSSLLQHASAPVRTGSEGQV

SEQ ID NO: 35577 - protein, 185 aa, Artificial Sequence
  Synthetic polypeptide
MGAVAHACNPGTLGEAGGSRAQEIETILANTCTEAKKHCWYFEGLYPTYYICRSYEDCCGSRCCVRALSIQRLWYFWFLLMMGVLFCCGAGFFIRRRMYPPPLIEEPAFNVSYTRQPPNPGPGAQQPGPPYYTDPGGPGMNPVGNSMAMAFQVPPNSPQGSVACPPPPAYCNTPPPPYEQVVKAK

SEQ ID NO: 35578 - protein, 55 aa, Artificial Sequence
  Synthetic polypeptide
ANRAPTSGSLHSPWMMISPRSSSTTAPACARPASRATMPPGPSSPPSWGAPGTRA

SEQ ID NO: 35579 - protein, 14 aa, Artificial Sequence
  Synthetic polypeptide
PIGLPRQGLCTHHG

SEQ ID NO: 35580 - protein, 108 aa, Artificial Sequence
  Synthetic polypeptide
QSGSHVRVFALTMDDDIAALVVDNGSGMCKAGFAGDDAPRAVFPSIVGRPRHQGVMVGMGQKDSYVGDEAQSKRGILTLKYPIEHGIVTNWDDMEKIWHHTFYNELRV

SEQ ID NO: 35581 - protein, 479 aa, Artificial Sequence
  Synthetic polypeptide
VWWLMLVIAALWQAKQIQHPTASLIAKVATAQDDITGDGTTSNVLIIGELLKQADLYISEGLHPRIITEGFEAAKEKALQFLEEVKVSREMDRETLIDVARTSLRTKVHAELADVLTEAVVDSILAIKKQDEPIDLFMIEIMEMKHKSETDTSLIRGLVLDHGARHPDMKKRVEDAYILTCNVSLEYEKTEVNSGFFYKSAEEREKLVKAERKFIEDRVKKIIELKRKVCGDSDKGFVVINQKGIDPFSLDALSKEGIVALRRAKRRNMERLTLACGGVALNSFDDLSPDCLGHAGLVYEYTLGEEKFTFIEKCNNPRSVTLLIKGPNKHTLTQIKDAVRDGLRAVKNAIDDGCVVPGAGAVEVAMAEALIKHKPSVKGRAQLGVQAFADALLIIPKVLAQNSGFDLQETLVKIQAEHSESGQLVGVDLNTGEPMVAAEVGVWDNYCVKKQLLHSCTVIATNILLVDEIMRAGMSSLKG

SEQ ID NO: 35582 - protein, 16 aa, Artificial Sequence
  Synthetic polypeptide
SQHFGRPSKFNTQQLP

SEQ ID NO: 35583 - protein, 34 aa, Artificial Sequence
  Synthetic polypeptide
LGVVAYACNRSTLAGQANSTPNSFLNSKGSNSPG

SEQ ID NO: 35584 - protein, 56 aa, Artificial Sequence
  Synthetic polypeptide
GLVRWLTPVMPALWESKVWTCLPIRTRRPTRRPSSWRSTATPKSVPSVPTRASTGR

SEQ ID NO: 35585 - protein, 66 aa, Artificial Sequence
  Synthetic polypeptide
CQHFGSPRYGPVCQSGRGDRPGDLPAGDRPRHQKVCLPYPHGQVLDADGHRGRAVHRLQQECQLLL

SEQ ID NO: 35586 - protein, 232 aa, Artificial Sequence
  Synthetic polypeptide
PGAVAHACNASTLGVQGMDLSANQDEETDQETFQLEIDRDTKKCAFRTHTGKYWTLTATGGVQSTASSKNASCYFDIEWRDRRITLRASNGKFVTSKKNGQLAASVETAGDSELFLMKLINRPIIVFRGEHGFIGCRKVTGTLDANRSSYDVFQLEFNDGAYNIKDSTGKYWTVGSDSAVTSSGDTPVDFFFEFCDYNKVAIKVGGRYLKGDHAGVLKASAETVDPASLWEY

SEQ ID NO: 35587 - protein, 205 aa, Artificial Sequence
  Synthetic polypeptide
GSEEKMTAARIRKCHKCGTGLIKSEGCNRMSCRCGAQMCYLCRVSINGYDHFCQHPRSPGAPCQECSRCSLWTDPTEDDEKLIEEIQKEAEEEQKRKNGENTFKRIGPPLEKPVEKVQRVEALPRPVPQNLPQPQMPPYAFAHPPFPLPPVRPVFNNFPLNMGPIPAPYVPPLPNVRVNYDFGPIHMPLEHNLPMHFGPQPRHRF

SEQ ID NO: 35588 - protein, 17 aa, Artificial Sequence
  Synthetic polypeptide
LRPVILAFWEAKAVKKK

SEQ ID NO: 35589 - protein, 71 aa, Artificial Sequence
  Synthetic polypeptide
SQHFGRPSWSSAAWKAAARVRSQPVSWRRCSPRPSCISTMSEKPRRRLRQPTPTSLSGARPVAFRLCWTVM

SEQ ID NO: 35590 - protein, 30 aa, Artificial Sequence
  Synthetic polypeptide
VAHACNPSTLGGRVGAQLHGRQLHVFVPNQ

SEQ ID NO: 35591 - protein, 325 aa, Artificial Sequence
  Synthetic polypeptide
WLTPVIPALWEAELELSCMEGSCTCSFPTSELEKVLPQTILYKYYERKAEEEVAAAYADELVRCPSCSFPALLDSDVKRFSCPNPHCRKETCRKCQGLWKEHNGLTCEELAEKDDIKYRTSIEEKMTAARIRKCHKCGTGLIKSEGCNRMSCRCGAQMCYLCRVSINGYDHFCQHPRSPGAPCQECSRCSLWTDPTEDDEKLIEEIQKEAEEEQKRKNGENTFKRIGPPLEKPVEKVQRVEALPRPVPQNLPQPQMPPYAFAHPPFPLPPVRPVFNNFPLNMGPIPAPYVPPLPNVRVNYDFGPIHMPLEHNLPMHFGPQPRHRF

SEQ ID NO: 35592 - protein, 453 aa, Artificial Sequence
  Synthetic polypeptide
CQELESSRGNKEENKILFYHPNEVEKNEKIRNVGLCEAIVQFTRTFSPSKPAKSLHTQKNRQFFNEPEENFWMVMVVRNPIIEKQSKDGKPVIEYQEEELLDKVYSSVLRQCYSMYKLFNGTFLKAMEDGGVKLLKERLEKFFHRYLQTLHLQSCDLLDIFGGISFFPLDKMTYLKIQSFINRMEESLNIVKYTAFLYNDQLIWSGLEQDDMRILYKYLTTSLFPRHIEPELAGRDSPIRAEMPGNLQHYGRFLTGPLNLNDPDAKCRFPKIFVNTDDTYEELHLIVYKAMSAAVCFMIDASVHPTLDFCRRLDSIVGPQLTVLASDICEQFNINKRMSGSEKEPQFKFIYFNHMNLAEKSTVHMRKTPSVSLTSVHPDLMKILGDINSDFTRVDEDEEIIVKAMSDYWVVGKKSDRRELYVILNQKNANLIEVNEEVKKLCATQFNNIFFLD

SEQ ID NO: 35593 - protein, 19 aa, Artificial Sequence
  Synthetic polypeptide
RAAGATKRKIRFYFIIQMR

SEQ ID NO: 35594 - protein, 21 aa, Artificial Sequence
  Synthetic polypeptide
QRQEDPLMPRVREQPGQQRGK

SEQ ID NO: 35595 - protein, 12 aa, Artificial Sequence
  Synthetic polypeptide
EQPGQHNLRLST

SEQ ID NO: 35596 - protein, 20 aa, Artificial Sequence
  Synthetic polypeptide
AQEFESSLGNITSDSQLNCC

SEQ ID NO: 35597 - protein, 30 aa, Artificial Sequence
  Synthetic polypeptide
SRHFGRPRWADHFRSGVRDQPDQHDLRLST

SEQ ID NO: 35598 - protein, 42 aa, Artificial Sequence
  Synthetic polypeptide
PGTVAHAYNPGTLGGRGGQITSGREFETSLTNMTSDSQLNCC

SEQ ID NO: 35599 - protein, 216 aa, Artificial Sequence
  Synthetic polypeptide
SFSPSSRLRPLLLQGGLKLSLSGKTMFAEMEIIGQFNLGFIITKLNEDIFIVDQHATDEKYNFEMLQQHTVLQGQRLIAPQTLNLTAVNEAVLIENLEIFRKNGFDFVIDENAPVTERAKLISLPTSKNWTFGPQDVDELIFMLSDSPGVMCRPSRVKQMFASRACRKSVMIGTALNTSEMKKLITHMGEMDHPWNCPHGRPTMRHIANLGVISQN

SEQ ID NO: 35600 - protein, 19 aa, Artificial Sequence
  Synthetic polypeptide
VVKRCLQKWKSLVSLTWDL

SEQ ID NO: 35601 - protein, 51 aa, Artificial Sequence
  Synthetic polypeptide
GRAPWLTPVIPALWEAEAGGSPEVRSSRLAWPTWKSLTCLCKLLSPAKMIF

SEQ ID NO: 35602 - protein, 7 aa, Artificial Sequence
  Synthetic polypeptide
PGQHGRV

SEQ ID NO: 35603 - protein, 286 aa, Artificial Sequence
  Synthetic polypeptide
GQEFETSLANMEESNLSLQALESRQDDILKRLYELKAAVDGLSKMIQTPDADLDVTNIIQADEPTTLTTNALDLNSVLGKDYGALKDIVINANPASPPLSLLVLHRLLCEHFRVLSTVHTHSSVKSVPENLLKCFGEQNKKQPRQDYQLGFTLIWKNVPKTQMKFSIQTMCPIEGEGNIARFLFSLFGQKHNAVNATLIDSWVDIAIFQLKEGSSKEKAAVFRSMNSALGKSPWLAGNELTVADVVLWSVLQQIGGCSVTVPANVQRWMRSCENLAPFNTALKLLK

SEQ ID NO: 35604 - protein, 97 aa, Artificial Sequence
  Synthetic polypeptide
AKITPLHSSMDNRGTASVLQRRSPNEEYVEVGRLGPSDYFGEIALLLNRPRAATVVARGPLKCVKLDRPRFERVLGPCSEILKRNIQRYNSFISLTV

SEQ ID NO: 35605 - protein, 68 aa, Artificial Sequence
  Synthetic polypeptide
SQLLGRLKQENRLNPGDGGCSEPRSHHCTPAWTTEAPRPCCSAGPPMRSTWRWGAWDPLTTSGRLHCC

SEQ ID NO: 35606 - protein, 33 aa, Artificial Sequence
  Synthetic polypeptide
TREMEVAVSQDHTIALQHGQQRHRVRAAAPVPQ

SEQ ID NO: 35607 - protein, 615 aa, Artificial Sequence
  Synthetic polypeptide
GQARWLTPVIPALWEAEAGGSPEVRSSRPAWPSAPGAERGPPEDRDAEPQPGSPAAESLEEPDAAAGLSSTKKAPPPRDPGTPATKEGAWEAMAVAPEEPPPSAGEDIVGDTAPPDLCDPGSLTGDASPLSQDAKGMIAEGPRDSALAEAPEGLSPAPPARSEEPCEQPLLVHPSGDHARDAQDPSQSLGAPEAAERPPAPVLDMAPAGHPEGDAEPSPGERVEDAAAPKAPGPSPAKEKIGSLRKVDRGHYRSRRERSSSGEPARESRSKTEGHRHRRRRTCPRERDRQDRHAPEHHPGHGDRLSPGERRSLGRCSHHHSRHRSGVELDWVRHHYTEGERGWGREKFYPDRPRWDRCRYYHDRYALYAARDWKPFHGGREHERAGLHERPHKDHNRGRRGCEPARERERHRPSSPRAGAPHALAPHPDRFSHDRTALVAGDNCNLSDRFHEHENGKSRKRRHDSVENSDSHVEKKARRSEQKDPLEEPKAKKHKKSKKKKKSKDKHRDRDSRHQQDSDLSAACSDADLHRHKKKKKKKKRHSRKSEDFVKDSELHLPRVTSLETVAQFRRAQGGFPLSGGPPLEGVGPFREKTKHLRMESRDDRCRLFEYGQGD

SEQ ID NO: 35608 - protein, 113 aa, Artificial Sequence
  Synthetic polypeptide
SQHFGRLRRADHLRSGVRDQLGQVHLEQRGALPRTATPSLSLAAPPPNPWRSQMRPPASAAPRRLRRPAIPAPPLPKKAPGRPWPSPPRSLRPAPARTSWGTQHPLTCVIPGA

SEQ ID NO: 35609 - protein, 92 aa, Artificial Sequence
  Synthetic polypeptide
GQEFETSLAKCTWSREGPSRGPRRRASAWQPRRRIPGGARCGRRPQQHQEGSAAPRSRHPRYQRRRLGGHGRRPRGASAQRRRGHRGGHSTP

SEQ ID NO: 35610 - protein, 496 aa, Artificial Sequence
  Synthetic polypeptide
GQARWLTPVIPALWEAEAGGSPEVRSSRPAWPSAPGAERGPPEDRDAEPQPGSPAAESLEEPDAAAGLSSTKKAPPPRDPGTPATKEGAWEAMAVAPEEPPPSAGEDIVGDTAPPDLCDPGSLTGDASPLSQDAKGMIAEGPRDSALAEAPEGLSPAPPARSEEPCEQPLLVHPSGDHARDAQDPSQSLGAPEAAERPPAPVLDMAPAGHPEGDAEPSPGERVEDAAAPKAPGPSPAKEKIGSLRKVDRGHYRSRRERSSSGEPARESRSKTEGHRHRRRRTCPRERDRQDRHAPEHHPGHGDRLSPGERRSLGRCSHHHSRHRSGVELDWVRHHYTEGERGWGREKFYPDRPRWDRCRYYHDRYALYAARDWKPFHGGREHERAGLHERPHKDHNRGRRGCEPARERERHRPSSPRAGAPHALAPHPDRFSHDRTALVAGDNCNLSDRFHEHENGKSRKRRHDSVENSDSHVEKKARRSEQKDPLEEPKAKKHKK

SEQ ID NO: 35611 - protein, 17 aa, Artificial Sequence
  Synthetic polypeptide
EAEAGESLRTQEAEISG

SEQ ID NO: 35612 - protein, 297 aa, Artificial Sequence
  Synthetic polypeptide
SQLLRRLRQESRFEPRRQRFRDEFNIKVLQAFVELHEFADLNLVQALRQFLWSFRLPGEAQKIDRMMEAFASRYCLCNPGVFQSTDTCYVLSFAIIMLNTSLHNHNVRDKPTAERFIAMNRGINEGGDLPEELLRNLYESIKNEPFKIPEDDGNDLTHTFFNPDREGWLLKLGGRVKTWKRRWFILTDNCLYYFEYTTDKEPRGIIPLENLSIREVEDPRKPNCFELYNPSHKGQVIKACKTEADGRVVEGNHVVYRISAPSPEEKEEWMKSIKASISRDPFYDMLATRKRRIANKK

SEQ ID NO: 35613 - protein, 39 aa, Artificial Sequence
  Synthetic polypeptide
GRRVASNPGGRDFGMNLILKFFKPLLNSMSLLISTLYKP

SEQ ID NO: 35614 - protein, 408 aa, Artificial Sequence
  Synthetic polypeptide
SQLRGRLRQENRLSLGGAGCVPEDLSLEEREELLDIRRRKKELIDDIERLKYEIAEVMTEIDNLTSVEESKTTQRNKQIAMGRKKFNMDPKKGIQFLIENDLLQSSPEDVAQFLYKGEGLNKTVIGDYLGERDEFNIKVLQAFVELHEFADLNLVQALRQFLWSFRLPGEAQKIDRMMEAFASRYCLCNPGVFQSTDTCYVLSFAIIMLNTSLHNHNVRDKPTAERFIAMNRGINEGGDLPEELLRNLYESIKNEPFKIPEDDGNDLTHTFFNPDREGWLLKLGGRVKTWKRRWFILTDNCLYYFEYTTDKEPRGIIPLENLSIREVEDPRKPNCFELYNPSHKGQVIKACKTEADGRVVEGNHVVYRISAPSPEEKEEWMKSIKASISRDPFYDMLATRKRRIANKK

SEQ ID NO: 35615 - protein, 13 aa, Artificial Sequence
  Synthetic polypeptide
AWEVQVACLKTSH

SEQ ID NO: 35616 - protein, 36 aa, Artificial Sequence
  Synthetic polypeptide
KNTKISREWWCVPVISATREAEAGESLEPGRCRLRA

SEQ ID NO: 35617 - protein, 19 aa, Artificial Sequence
  Synthetic polypeptide
NTHSWTLSKPAESHYIEDH

SEQ ID NO: 35618 - protein, 542 aa, Artificial Sequence
  Synthetic polypeptide
QRICLKHPFMDPFQTCRITLHRGPLTFRDVAIEFSLEEWQCLDTAQRNLYRKVMFENYRNLVFLGIAVSKPHLITCLEQGKEPWNRKRQEMVAKPPVIYSHFTEDLWPEHSIKDSFQKVILRGYGKCGHENLQLRISCKSVDESKVFKEGYNELNQCLRTTQSKIFQCDKYVKVFHKFSNSNSHKKRNTGKKVFKCKECGKSFCMLSHLTQHIRIHTRENSYKCEECGKVLNWFSELIKHKGIHMGEKPYKCEECGKAFNQSSTLIKHKKIHIEEKPFKCEECGKAFSLFSILSKHKIIHTGDKPYKCDECHKAFNWFATLTNHKRIHTGEKPFKCEECGKDFNQFSNLTKHKKIHTGEKPYKCEECGKAFNQFANLTRHKKIHTGEKSYKCEECGKAFIQSSNLTEHMRIHTGEKPYKCEECGKAFNGCSSLTRHKRIHTRENTYKCEECGKGFTLFSTLTNHKVIHTGEKSYKCDECGNVFNWPATLANHKRIHAREKPYKCEECGKAFNRSSHLTRHKKIHTGEKLYKPEKCDNNFDNT

SEQ ID NO: 35619 - protein, 135 aa, Artificial Sequence
  Synthetic polypeptide
QRICLKHPFMDPFQTCRITLHRGPLTFRDVAIEFSLEEWQCLDTAQRNLYRKVMFENYRNLVFLGIAVSKPHLITCLEQGKEPWNRKRQEMVAKPPESYCVAQADLELLVSSYLTALASLKMWDYRNNPLCQATM

SEQ ID NO: 35620 - protein, 331 aa, Artificial Sequence
  Synthetic polypeptide
QDILLEPKTLTLAGPLTFMDVAIEFSLEEWQCLDTAQRNVYRHVMLENYRNLVFLDLITCLEQGKEPWNMKRHEMVVAKHSALCSRFAQDLWLEQNIKDSFQKVTLSRYGKYGHKNLQLRKGCKSVDECKGHQGGFNGLNQCLKITTSKIFQCNKYVKVMHKFSNSNRHKIRHTENKHFRCKECDKSLCMLSRLTQHKKIHTRENFYKCEECGKTFNWSTNLSKPKKIHTGEKPYKCEVCGKAFHQSSILTKHKIIRTGEKPYKCAHCGKAFKQSSHLTRHKIIHTEEKPYKCEQCGKVFKQSPTLTKHQIIYTGEEPYKCEECGKAFNLS

SEQ ID NO: 35621 - protein, 35 aa, Artificial Sequence
  Synthetic polypeptide
AKNIDISGTTDIYGCGHRVLFGGVAVPGHCTAECI

SEQ ID NO: 35622 - protein, 138 aa, Artificial Sequence
  Synthetic polypeptide
QDILLEPKTLTLAGPLTFMDVAIEFSLEEWQCLDTAQRNVYRHVMLENYRNLVFLDLITCLEQGKEPWNMKRHEMVVAKHSAVAFTFDLSGLNILSFQSILPFVSALYVMGNRNQCLQKHLEARNKDLCVLVLPKTFG

SEQ ID NO: 35623 - protein, 305 aa, Artificial Sequence
  Synthetic polypeptide
QDILLEPKTLTLAGPLTFMDVAIEFSLEEWQCLDTAQRNVYRHVMLENYRNLVFLALCSRFAQDLWLEQNIKDSFQKVTLSRYGKYGHKNLQLRKGCKSVDECKGHQGGFNGLNQCLKITTSKIFQCNKYVKVMHKFSNSNRHKIRHTENKHFRCKECDKSLCMLSRLTQHKKIHTRENFYKCEECGKTFNWSTNLSKPKKIHTGEKPYKCEVCGKAFHQSSILTKHKIIRTGEKPYKCAHCGKAFKQSSHLTRHKIIHTEEKPYKCEQCGKVFKQSPTLTKHQIIYTGEEPYKCEECGKAFNLS

SEQ ID NO: 35624 - protein, 74 aa, Artificial Sequence
  Synthetic polypeptide
QDILLEPKTLTLAGPLTFMDVAIEFSLEEWQCLDTAQRNVYRHVMLENYRNLVFLARPDYLSGTRKRALEYEET

SEQ ID NO: 35625 - protein, 305 aa, Artificial Sequence
  Synthetic polypeptide
AVAPVIPALWEAKDVLTDLSAESEVLDVECEVQDRLAHKGISQAARYVYQRLINDGILSQAFSIAPEYRLVIVGHSLGGGAAALLATMLRAAYPQVRCYAFSPPRGLWSKALQEYSQSFIVSLVLGKDVIPRLSVTNLEDLKRRILRVVAHCNKPKYKILLHGLWYELFGGNPNNLPTELDGGDQEVLTQPLLGEQSLLTRWSPAYSFSSDSPLDSSPKYPPLYPPGRIIHLQEEGASGRFGCCSAAHYSAKWSHEAEFSKILIGPKMLTDHMPDILMRALDSVVSDRAACVSCPAQGVSSVDVA

SEQ ID NO: 35626 - protein, 52 aa, Artificial Sequence
  Synthetic polypeptide
SQHFGRPRMSLRTCQRRVRCWTWSVRCRTAWHTRVFLKLPDTFTNDSSTTGF

SEQ ID NO: 35627 - protein, 22 aa, Artificial Sequence
  Synthetic polypeptide
SGACNPSTLGGQGCPYGPVSGE

SEQ ID NO: 35628 - protein, 139 aa, Artificial Sequence
  Synthetic polypeptide
AVAPVIPALWEAKDVLTDLSAESEVLDVECEVQDRLAHKGISQAARYVYQRLINDGILSQAFSIAPEYRLVIVGHSLGGGAAALLATMLRAAYPQQSSAGIFSELHRVTRPGEGCDSQAQCDQLGRSEEKNLASGRALQ

SEQ ID NO: 35629 - protein, 109 aa, Artificial Sequence
  Synthetic polypeptide
AVAPVIPALWEAKDVLTDLSAESEVLDVECEVQDRLAHKGISQAARYVYQRLINDGILSQAFSIAPEYRLVIVGHSLGGGAAALLATMLRAAYPQVRCYAFSPPRGLWR

SEQ ID NO: 35630 - protein, 422 aa, Artificial Sequence
  Synthetic polypeptide
GGTQWLTPVIPALWEAEEADLDAELENCHHYMQFAAAAYGWPLYIYRNPLTGLCRIGGDCCRSRTTDYDLVGGDQLNCHFGSILHTTGLQYRDFIHVSFHDKVYELPFLVALDHRKESVVVAVRGTMSLQDVLTDLSAESEVLDVECEVQDRLAHKGISQAARYVYQRLINDGILSQAFSIAPEYRLVIVGHSLGGGAAALLATMLRAAYPQVRCYAFSPPRGLWSKALQEYSQSFIVSLVLGKDVIPRLSVTNLEDLKRRILRVVAHCNKPKYKILLHGLWYELFGGNPNNLPTELDGGDQEVLTQPLLGEQSLLTRWSPAYSFSSDSPLDSSPKYPPLYPPGRIIHLQEEGASGRFGCCSAAHYSAKWSHEAEFSKILIGPKMLTDHMPDILMRALDSVVSDRAACVSCPAQGVSSVDVA

SEQ ID NO: 35631 - protein, 15 aa, Artificial Sequence
  Synthetic polypeptide
SQHFGKPRKLIWMQN

SEQ ID NO: 35632 - protein, 18 aa, Artificial Sequence
  Synthetic polypeptide
RDTVAHTCNPSTLGSRGS

SEQ ID NO: 35633 - protein, 256 aa, Artificial Sequence
  Synthetic polypeptide
GGTQWLTPVIPALWEAEEADLDAELENCHHYMQFAAAAYGWPLYIYRNPLTGLCRIGGDCCRSRTTDYDLVGGDQLNCHFGSILHTTGLQYRDFIHVSFHDKVYELPFLVALDHRKESVVVAVRGTMSLQDVLTDLSAESEVLDVECEVQDRLAHKGISQAARYVYQRLINDGILSQAFSIAPEYRLVIVGHSLGGGAAALLATMLRAAYPQQSSAGIFSELHRVTRPGEGCDSQAQCDQLGRSEEKNLASGRALQ

SEQ ID NO: 35634 - protein, 463 aa, Artificial Sequence
  Synthetic polypeptide
GGTQWLTPVIPALWEAEDTDLVPSDIAAGLALLHQQQDNIRNNQEPAQVVCHAPGSSQEADLDAELENCHHYMQFAAAAYGWPLYIYRNPLTGLCRIGGDCCRSRTTDYDLVGGDQLNCHFGSILHTTGLQYRDFIHVSFHDKVYELPFLVALDHRKESVVVAVRGTMSLQDVLTDLSAESEVLDVECEVQDRLAHKGISQAARYVYQRLINDGILSQAFSIAPEYRLVIVGHSLGGGAAALLATMLRAAYPQVRCYAFSPPRGLWSKALQEYSQSFIVSLVLGKDVIPRLSVTNLEDLKRRILRVVAHCNKPKYKILLHGLWYELFGGNPNNLPTELDGGDQEVLTQPLLGEQSLLTRWSPAYSFSSDSPLDSSPKYPPLYPPGRIIHLQEEGASGRFGCCSAAHYSAKWSHEAEFSKILIGPKMLTDHMPDILMRALDSVVSDRAACVSCPAQGVSSVDVA

SEQ ID NO: 35635 - protein, 56 aa, Artificial Sequence
  Synthetic polypeptide
SQHFGKPRTQIWCPATLRRASPCFISNRTISGTTKSLPRWSAMPQGAPRKLIWMQN

SEQ ID NO: 35636 - protein, 59 aa, Artificial Sequence
  Synthetic polypeptide
RDTVAHTCNPSTLGSRGHRSGAQRHCGGPRPASSATGQYQEQPRACPGGLPCPRELPGS

SEQ ID NO: 35637 - protein, 66 aa, Artificial Sequence
  Synthetic polypeptide
GGTQWLTPVIPALWEAEDTDLVPSDIAAGLALLHQQQDNIRNNQEPAQVVCHAPGSSQLQKQNHRL

SEQ ID NO: 35638 - protein, 411 aa, Artificial Sequence
  Synthetic polypeptide
SQHFGKPRTQIWCPATLRRASPCFISNRTISGTTKSLPRWSAMPQGAPSCRSRTTDYDLVGGDQLNCHFGSILHTTGLQYRDFIHVSFHDKVYELPFLVALDHRKESVVVAVRGTMSLQDVLTDLSAESEVLDVECEVQDRLAHKGISQAARYVYQRLINDGILSQAFSIAPEYRLVIVGHSLGGGAAALLATMLRAAYPQVRCYAFSPPRGLWSKALQEYSQSFIVSLVLGKDVIPRLSVTNLEDLKRRILRVVAHCNKPKYKILLHGLWYELFGGNPNNLPTELDGGDQEVLTQPLLGEQSLLTRWSPAYSFSSDSPLDSSPKYPPLYPPGRIIHLQEEGASGRFGCCSAAHYSAKWSHEAEFSKILIGPKMLTDHMPDILMRALDSVVSDRAACVSCPAQGVSSVDVA

SEQ ID NO: 35639 - protein, 106 aa, Artificial Sequence
  Synthetic polypeptide
RDTVAHTCNPSTLGSRGHRSGAQRHCGGPRPASSATGQYQEQPRACPGGLPCPRELPAAEAEPQTMTWSEAISSTVTSAPSCTPQGCSTGTSSTSASMTRFTSCRF

SEQ ID NO: 35640 - protein, 297 aa, Artificial Sequence
  Synthetic polypeptide
GGTQWLTPVIPALWEAEDTDLVPSDIAAGLALLHQQQDNIRNNQEPAQVVCHAPGSSQEADLDAELENCHHYMQFAAAAYGWPLYIYRNPLTGLCRIGGDCCRSRTTDYDLVGGDQLNCHFGSILHTTGLQYRDFIHVSFHDKVYELPFLVALDHRKESVVVAVRGTMSLQDVLTDLSAESEVLDVECEVQDRLAHKGISQAARYVYQRLINDGILSQAFSIAPEYRLVIVGHSLGGGAAALLATMLRAAYPQQSSAGIFSELHRVTRPGEGCDSQAQCDQLGRSEEKNLASGRALQ

SEQ ID NO: 35641 - protein, 215 aa, Artificial Sequence
  Synthetic polypeptide
SQHFGKPRTQIWCPATLRRASPCFISNRTISGTTKSLPRWSAMPQGAPSCRSRTTDYDLVGGDQLNCHFGSILHTTGLQYRDFIHVSFHDKVYELPFLVALDHRKESVVVAVRGTMSLQDVLTDLSAESEVLDVECEVQDRLAHKGISQAARYVYQRLINDGILSQAFSIAPEYRLVIVGHSLGGGAAALLATMLRAAYPQVRCYAFSPPRGLWR

SEQ ID NO: 35642 - protein, 98 aa, Artificial Sequence
  Synthetic polypeptide
SQHFGKPRTQIWCPATLRRASPCFISNRTISGTTKSLPRWSAMPQGAPSCRSRTTDYDLVGGDQLNCHFGSILHTTGLQYRDFIHVSFHDKVYELPFL

SEQ ID NO: 35643 - protein, 64 aa, Artificial Sequence
  Synthetic polypeptide
GGTQWLTPVIPALWEAEERFVTLDRGSLCLSCFTSAWRCFFQRWSGPLWGLPGWQMVFSATGQL

SEQ ID NO: 35644 - protein, 11 aa, Artificial Sequence
  Synthetic polypeptide
SQHFGKPRNDL

SEQ ID NO: 35645 - protein, 606 aa, Artificial Sequence
  Synthetic polypeptide
RDTVAHTCNPSTLGSRGTICNPGPRKSMSKLLYIRLALFFPEMVWASLGAAWVADGVQCDRTVVNGIIATVVVSWIIIAATVVSIIIVFDPLGGKMAPYSSAGPSHLDSHDSSQLLNGLKTAATSVWETRIKLLCCCIGKDDHTRVAFSSTAELFSTYFSDTDLVPSDIAAGLALLHQQQDNIRNNQEPAQVVCHAPGSSQEADLDAELENCHHYMQFAAAAYGWPLYIYRNPLTGLCRIGGDCCRSRTTDYDLVGGDQLNCHFGSILHTTGLQYRDFIHVSFHDKVYELPFLVALDHRKESVVVAVRGTMSLQDVLTDLSAESEVLDVECEVQDRLAHKGISQAARYVYQRLINDGILSQAFSIAPEYRLVIVGHSLGGGAAALLATMLRAAYPQVRCYAFSPPRGLWSKALQEYSQSFIVSLVLGKDVIPRLSVTNLEDLKRRILRVVAHCNKPKYKILLHGLWYELFGGNPNNLPTELDGGDQEVLTQPLLGEQSLLTRWSPAYSFSSDSPLDSSPKYPPLYPPGRIIHLQEEGASGRFGCCSAAHYSAKWSHEAEFSKILIGPKMLTDHMPDILMRALDSVVSDRAACVSCPAQGVSSVDVA

SEQ ID NO: 35646 - protein, 477 aa, Artificial Sequence
  Synthetic polypeptide
RDTVAHTCNPSTLGSRGTICNPGPRKSMSKLLYIRLALFFPEMVWASLGAAWVADGVQCDRTVVNGIIATVVVRTQIWCPATLRRASPCFISNRTISGTTKSLPRWSAMPQGAPSCRSRTTDYDLVGGDQLNCHFGSILHTTGLQYRDFIHVSFHDKVYELPFLVALDHRKESVVVAVRGTMSLQDVLTDLSAESEVLDVECEVQDRLAHKGISQAARYVYQRLINDGILSQAFSIAPEYRLVIVGHSLGGGAAALLATMLRAAYPQVRCYAFSPPRGLWSKALQEYSQSFIVSLVLGKDVIPRLSVTNLEDLKRRILRVVAHCNKPKYKILLHGLWYELFGGNPNNLPTELDGGDQEVLTQPLLGEQSLLTRWSPAYSFSSDSPLDSSPKYPPLYPPGRIIHLQEEGASGRFGCCSAAHYSAKWSHEAEFSKILIGPKMLTDHMPDILMRALDSVVSDRAACVSCPAQGVSSVDVA

SEQ ID NO: 35647 - protein, 83 aa, Artificial Sequence
  Synthetic polypeptide
RDTVAHTCNPSTLGSRGTICNPGPRKSMSKLLYIRLALFFPEMVWASLGAAWVADGVQCDRTVVNGIIATVVVSCRSRTTDYD

SEQ ID NO: 35648 - protein, 129 aa, Artificial Sequence
  Synthetic polypeptide
GWVQWLVSVIPAHWEAEMGSRIWSFGFHFWKGWCIKPAKQCLWTYILYTTVITWHDSKRCGGFDPHDVLHHVGRGVPVPGLHSVLCAEGVLHHLHRHVRAELPSSHYQLQTTSLLERGLEAAAATQAGL

SEQ ID NO: 35649 - protein, 119 aa, Artificial Sequence
  Synthetic polypeptide
SQHIGRLRWGRGFGLLGSIFGKDGVLNQPNSVFGLIFYILQLLLGMTASAVAALILMTSSIMSVVGSLYLAYILYFVLKEFCIICIVTYVLNFLLLIINYKRLVYLNEAWKRQLQPKQD

SEQ ID NO: 35650 - protein, 124 aa, Artificial Sequence
  Synthetic polypeptide
KVLFLDVGVAIRMGSRIWSFGFHFWKGWCIKPAKQCLWTYILYTTVITWHDSKRCGGFDPHDVLHHVGRGVPVPGLHSVLCAEGVLHHLHRHVRAELPSSHYQLQTTSLLERGLEAAAATQAGL

SEQ ID NO: 35651 - protein, 29 aa, Artificial Sequence
  Synthetic polypeptide
SSISRCGCGYKDGVEDLVFWVPFLERMVY

SEQ ID NO: 35652 - protein, 245 aa, Artificial Sequence
  Synthetic polypeptide
IENLKRSRSINDIFDAMFPVTHIAGETVIQQGNEGDNFYVVDQGEVDVYVNGEWVTNISEGGSFGELALIYGTPRAATVKAKTDLKLWGIDRDSYRRILMGSTLRKRKMYEEFLSKVSILESLEKWERLTVADALEPVQFEDGEKIVVQGEPGDDFYIITEGTASVLQRRSPNEEYVEVGRLGPSDYFGEIALLLNRPRAATVVARGPLKCVKLDRPRFERVLGPCSEILKRNIQRYNSFISLTV

SEQ ID NO: 35653 - protein, 45 aa, Artificial Sequence
  Synthetic polypeptide
RDLEALMTYSMPCSLSLTSLGRLLYSKGMKETTSMSLIKGKWMCT

SEQ ID NO: 35654 - protein, 161 aa, Artificial Sequence
  Synthetic polypeptide
IENLKRSRSINDIFDAMFPVTHIAGETVIQQGNEGDNFYVVDQGEVDVYVNGEWVTNISEGGSFGELALIYGTPRAATVKAKTDLKLWGIDRDSYRRILMGSTLRKRKMYEEFLSKVSILESLEKWERLTVADALEPVQFEDGEKIVVQGEPGDDFYIITE

SEQ ID NO: 35655 - protein, 88 aa, Artificial Sequence
  Synthetic polypeptide
IENLKRSRSINDIFDAMFPVTHIAGETVIQQGNEGDNFYVVDQGEVDVYVNGEWVTNISEGGSFGELALIYGTPRAATVKAKTDLKLW

SEQ ID NO: 35656 - protein, 29 aa, Artificial Sequence
  Synthetic polypeptide
IENLKRSRSINDIFDAMFPVTHIAGETVI

SEQ ID NO: 35657 - protein, 25 aa, Artificial Sequence
  Synthetic polypeptide
RDLEALMTYSMPCSLSLTSLGRLLY

SEQ ID NO: 35658 - protein, 318 aa, Artificial Sequence
  Synthetic polypeptide
AMITPLHSSLDYRIFSCIIPECLQRAVHGLLHYLFHTRNHTFIVLHLVLQGMVYTEYTWEVFGYCQELELSLHYLLLPYLLLGVNLFFFTLTCGTNPGIITKANELLFLHVYEFDEVMFPKNVRCSTCDLRKPARSKHCSVCNWCVHRFDHHCVWVNNCIGAWNIRYFLIYVLTLTASAATVAIVSTTFLVHLVVMSDLYQETYIDDLGHLHVMDTVFLIQYLFLTFPRIVFMLGFVVVLSFLLGGYLLFVLYLAATNQTTNEWYRGDWAWCQRCPLVAWPPSAEPQVHRNIHSHGLRSNLQEIFLPAFPCHERKKQE

SEQ ID NO: 35659 - protein, 15 aa, Artificial Sequence
  Synthetic polypeptide
SRHCTPAWTTEYFPV

SEQ ID NO: 35660 - protein, 84 aa, Artificial Sequence
  Synthetic polypeptide
RVQCLTPVIPLLRKLRQEDPLSQESEVAMSYDHATALQPGLQNIFLYNSRMSSESRAWIASLPFPYEKPHLHCPAPGLARDGLY

SEQ ID NO: 35661 - protein, 139 aa, Artificial Sequence
  Synthetic polypeptide
AMITPLHSSLDYRIFSCIIPECLQRAVHGLLHYLFHTRNHTFIVLHLVLQGMVYTEYTWEVFGYCQELELSLHYLLLPYLLLGVNLFFFTLTCGTNPGIITKANELLFLHVYEFDEVMFPKNVRCSTCDLRKPARSKHC

SEQ ID NO: 35662 - protein, 25 aa, Artificial Sequence
  Synthetic polypeptide
SQHFGKLRRVDHEVTRSRPSWLTCG

SEQ ID NO: 35663 - protein, 101 aa, Artificial Sequence
  Synthetic polypeptide
HVVSRKKMSLKSERRGIHVDQSDLLCKKGCGYYGNPAWQGFCSKCWREEYHKARQKQIQEDWELAERVLLCYPGWSAMVQFQLTATSASWAQVILLLQPPK

SEQ ID NO: 35664 - protein, 17 aa, Artificial Sequence
  Synthetic polypeptide
GHEIQTILANMWLAGRR

SEQ ID NO: 35665 - protein, 498 aa, Artificial Sequence
  Synthetic polypeptide
HVVSRKKMSLKSERRGIHVDQSDLLCKKGCGYYGNPAWQGFCSKCWREEYHKARQKQIQEDWELAERLQREEEEAFASSQSSQGAQSLTFSKFEEKKTNEKTRKVTTVKKFFSASSRVGSKKEIQEAKAPSPSINRQTSIETDRVSKEFIEFLKTFHKTGQEIYKQTKLFLEGMHYKRDLSIEEQSECAQDFYHNVAERMQTRGKVPPERVEKIMDQIEKYIMTRLYKYVFCPETTDDEKKDLAIQKRIRALRWVTPQMLCVPVNEDIPEVSDMVVKAITDIIEMDSKRVPRDKLACITKCSKHIFNAIKITKNEPASADDFLPTLIYIVLKGNPPRLQSNIQYITRFCNPSRLMTGEDGYYFTNLCCAVAFIEKLDAQSLNLSQEDFDRYMSGQTSPRKQEAESWSPDACLGVKQMYKNLDLLSQLNERQERIMNEAKKLEKDLIDWTDGIAREVQDIVEKYPLEIKPPNQPLAAIDSENVENDKLPPPLQPQVYAG

SEQ ID NO: 35666 - protein, 24 aa, Artificial Sequence
  Synthetic polypeptide
GRVPWLRPAIPALWKAETATALCS

SEQ ID NO: 35667 - protein, 132 aa, Artificial Sequence
  Synthetic polypeptide
AGCRGSGLRSQHCGRLRQPPHCVPDTYSNATLWYKIFTTARDANTKYAQDYNPFWCYKGAIGKVYHALNPKLTVIVPDDDRSLINLHLMHTSYFLFVMVITMFCYAVIKGRPSKLRQSNPEFCPEKVALAEA

SEQ ID NO: 35668 - protein, 75 aa, Artificial Sequence
  Synthetic polypeptide
GQMQWLTPVILALSEASPCSEGEEVVTNTHSMELRAIAAWKPPRAWRVLINVSSVGGTTPTPWALSGGGRWTSLK

SEQ ID NO: 35669 - protein, 22 aa, Artificial Sequence
  Synthetic polypeptide
HFRRPVHAPRERRLLQTHILWN

SEQ ID NO: 35670 - protein, 363 aa, Artificial Sequence
  Synthetic polypeptide
PDAVAHACNPSTFGGQSMLRGRGGCYKHTFYGIESHRCMETTPSLACANKCVFCWRHHTNPVGTEWRWKMDQPEMILKEAIENHQNMIKQFKGVPGVKAERFEEGMTVKHCALSLVGEPIMYPEINRFLKLLHQCKISSFLVTNAQFPAEIRNLEPVTQLYVSVDASTKDSLKKIDRPLFKDFWQRFLDSLKALAVKQQRTVYRLTLVKAWNVDELQAYAQLVSLGNPDFIEVKGVTYCGESSASSLTMAHVPWHEEVVQFVHELVDLIPEYEIACEHEHSNCLLIAHRKFKIGGEWWTWIDYNRFQELIQEYEDSGGSKTFSAKDYMARTPHWALFGASERGFDPKDTRHQRKNKSKAISGC

SEQ ID NO: 35671 - protein, 34 aa, Artificial Sequence
  Synthetic polypeptide
GQMQWLTPVILALSEASPCSEGEEVVTNTHSMEL

SEQ ID NO: 35672 - protein, 33 aa, Artificial Sequence
  Synthetic polypeptide
PDAVAHACNPSTFGGQSMLRGRGGCYKHTFYGI

SEQ ID NO: 35673 - protein, 1140 aa, Artificial Sequence
  Synthetic polypeptide
VQATPEAEKDVALKPQERVEKRQTPLTKKKREALTNGLSFHSKKSRLSHPHHYSSDRENDRNLCQHLGKRKKMPKALRQLKPGQNSCRDSDSESASGESKGFHRSSSRERLSDSSAPSSLGTGYFCDSDSDQEEKASDASSEKLFNTVIVNKDPELGVGTLPEHDSQDAGPIVPKISGLERSQEKSQDCCKEPIFEPVVLKDPCPQVAQPIPQPQTEPQLRAPSPDPDLVQRTEAPPQPPPLSTQPPQGPPEAQLQPAPQPQVQRPPRPQSPTQLLHQNLPPVQAHPSAQSLSQPLSAYNSSSLSLNSLSSSRSSTPAKTQPAPPHISHHPSASPFPLSLPNHSPLHSFTPTLQPPAHSHHPNMFAPPTALPPPPPLTSGSLQVAGHPAGSTYSEQDILRQELNTRFLASQSADRGASLGPPPYLRTEFHQHQHQHQHTHQHTHQHTFTPFPHAIPPTAIMPTPAPPMFDKYPTKVDPFYRHSLFHSYPPAVSGIPPMIPPTGPFGSLQGAFQPKLTDPFRPMLRKPGKWCAMHVHIAWQIYHHQQKVKKQMQSDPHKLDFGLKPEFLSRPPGPSLFGAIHHPHDLARPSTLFSAAGAAHPTGTPFGPPPHHSNFLNPAAHLEPFNRPSTFTGLAAVGGNAFGGLGNPSVTPNSMFGHKDGPSVQNFSNPHEPWNRLHRTPPSFPTPPPWLKPGELERSASAAAHDRDRDVDKRDSSVSKDDKERESVEKRHSSHPSPAPVLPVNALGHTRSSTEQIRAHLNTEAREKDKPKERERDHSESRKDLAADEHKAKEGHLPEKDGHGHEGRAAGEEAKQLARVPSPYVRTPVVESARPNSTSSREAEPRKGEPAYENPKKSSEVKVKEERKEDHDLPPEAPQTHRASEPPPPNSSSSVHPGPLASMPMTVGVTGIHPMNSISSLDRTRMMTPFMGISPLPGGERFPYPSFHWDPIRDPLRDPYRELDIHRRDPLGRDFLLRNDPLHRLSTPRLYEADRSFRDREPHDYSHHHHHHHHPLSVDPRREHERGGHLDERERLHMLREDYEHTRLHSVHPASLDGHLPHPSLITPGLPSMHYPRISPTAGNQNGLLNKTPPTAALSAPPPLISTLGGRPVSPRRTTPLSAEIRERPPSHTLKDIEAR

SEQ ID NO: 35674 - protein, 10 aa, Artificial Sequence
  Synthetic polypeptide
SKLLQRLRKM

SEQ ID NO: 35675 - protein, 1164 aa, Artificial Sequence
  Synthetic polypeptide
VQATPEAEKDVALKPQERVEKRQTPLTKKKREALTNGLSFHSKKSRLSHPHHYSSDRENDRNLCQHLGKRKKMPKALRQLKPGQNSCRDSDSESASGESKGFHRSSSRERLSDSSAPSSLGTGYFCDSDSDQEEKASDASSEKLFNTVIVNKDPELGVGTLPEHDSQDAGPIVPKISGLERSQEKSQDCCKEPIFEPVVLKDPCPQVAQPIPQPQTEPQLRAPSPDPDLVQRTEAPPQPPPLSTQPPQGPPEAQLQPAPQPQVQRPPRPQSPTQLLHQNLPPVQAHPSAQSLSQPLSAYNSSSLSLNSLSSSRSSTPAKTQPAPPHISHHPSASPFPLSLPNHSPLHSFTPTLQPPAHSHHPNMFAPPTALPPPPPLTSGSLQVAGHPAGSTYSEQDILRQELNTRFLASQSADRGASLGPPPYLRTEFHQHQHQHQHTHQHTHQHTFTPFPHAIPPTAIMPTPAPPMFDKYPTKVDPFYRHSLFHSYPPAVSGIPPMIPPTGPFGSLQGAFQPKTSNPIDVAARPGTVPHTLLQKDPRLTDPFRPMLRKPGKWCAMHVHIAWQIYHHQQKVKKQMQSDPHKLDFGLKPEFLSRPPGPSLFGAIHHPHDLARPSTLFSAAGAAHPTGTPFGPPPHHSNFLNPAAHLEPFNRPSTFTGLAAVGGNAFGGLGNPSVTPNSMFGHKDGPSVQNFSNPHEPWNRLHRTPPSFPTPPPWLKPGELERSASAAAHDRDRDVDKRDSSVSKDDKERESVEKRHSSHPSPAPVLPVNALGHTRSSTEQIRAHLNTEAREKDKPKERERDHSESRKDLAADEHKAKEGHLPEKDGHGHEGRAAGEEAKQLARVPSPYVRTPVVESARPNSTSSREAEPRKGEPAYENPKKSSEVKVKEERKEDHDLPPEAPQTHRASEPPPPNSSSSVHPGPLASMPMTVGVTGIHPMNSISSLDRTRMMTPFMGISPLPGGERFPYPSFHWDPIRDPLRDPYRELDIHRRDPLGRDFLLRNDPLHRLSTPRLYEADRSFRDREPHDYSHHHHHHHHPLSVDPRREHERGGHLDERERLHMLREDYEHTRLHSVHPASLDGHLPHPSLITPGLPSMHYPRISPTAGNQNGLLNKTPPTAALSAPPPLISTLGGRPVSPRRTTPLSAEIRERPPSHTLKDIEAR

SEQ ID NO: 35676 - protein, 171 aa, Artificial Sequence
  Synthetic polypeptide
VQATPEAEKDVALKPQERVEKRQTPLTKKKREALTNGLSFHSKKSRLSHPHHYSSDRENDRNLCQHLGKRKKMPKALRQLKPGQNSCRDSDSESASGESKGFHRSSSRERLSDSSAPSSLGTGYFRSGKMCLGEEACLKSGNDMKRDVSNTSSWASNRESFFSLVKLLKGF

SEQ ID NO: 35677 - protein, 25 aa, Artificial Sequence
  Synthetic polypeptide
FLHFHLRDQGRCALERKHVLNLEMI

SEQ ID NO: 35678 - protein, 78 aa, Artificial Sequence
  Synthetic polypeptide
RRSQDGRIGTAPVYSSQRERRRRRVISAFPSERSGKMCLGEEACLKSGNDMKRDVSNTSSWASNRESFFSLVKLLKGF

SEQ ID NO: 35679 - protein, 98 aa, Artificial Sequence
  Synthetic polypeptide
PCGTFDMQRITLEELKHILYHAFRDHLTMKDIENIIINEEESLNETSGNCQTEFEGVHSQKQNRQTCVRKSLICAFAMAFIISVMLIAANQILRSGME

SEQ ID NO: 35680 - protein, 13 aa, Artificial Sequence
  Synthetic polypeptide
GLPSHVELLTCKG

SEQ ID NO: 35681 - protein, 42 aa, Artificial Sequence
  Synthetic polypeptide
WIYKDESLCTSSLSYLPPYKKSLCSSFVFCHDCEASLAMWNF

SEQ ID NO: 35682 - protein, 407 aa, Artificial Sequence
  Synthetic polypeptide
VWEFKAAVISLEKLKDFGECVIALQASVIKKFLQGFMAPKQKRRKLQSEDSAKTEEVDEEKKMVEEAKVASALEKWKTAIREAQTFSRMHVLLGMLDACIKWDMSAENARCKVCRKKGEDDKLILCDECNKAFHLFCLRPALYEVPDGEWQCPACQPATARRNSRGRNYTEESASEDSEDDESDEEEEEEEEEEEEEDYEVAGLRLRPRKTIRGKHSVIPPAARSGRRPGKKPHSTRRSQPKAPPVDDAEVDELVLQTKRSSRRQSLELQKCEEILHKIVKYRFSWPFREPVTRDEAEDYYDVITHPMDFQTVQNKCSCGSYRSVQEFLTDMKQVFTNAEVYNCRGSHVLSCMVKTEQCLVALLHKHLPGHPYVRRKRKKFPDRLAEDEGDSEPEAVGQSRGRRQKK

SEQ ID NO: 35683 - protein, 29 aa, Artificial Sequence
  Synthetic polypeptide
CHVPVVPANGEAEAGGSLESGSSRLQSFH

SEQ ID NO: 35684 - protein, 46 aa, Artificial Sequence
  Synthetic polypeptide
KEFKKLARRDAMYLWSQLMGRLRQEDHLSLGVQGCSHFIREIEGFW

SEQ ID NO: 35685 - protein, 17 aa, Artificial Sequence
  Synthetic polypeptide
DQPAQHSHFIREIEGFW

SEQ ID NO: 35686 - protein, 417 aa, Artificial Sequence
  Synthetic polypeptide
SRRIASGQEFETSLRNIVISLEKLKDFGECVIALQASVIKKFLQGFMAPKQKRRKLQSEDSAKTEEVDEEKKMVEEAKVASALEKWKTAIREAQTFSRMHVLLGMLDACIKWDMSAENARCKVCRKKGEDDKLILCDECNKAFHLFCLRPALYEVPDGEWQCPACQPATARRNSRGRNYTEESASEDSEDDESDEEEEEEEEEEEEEDYEVAGLRLRPRKTIRGKHSVIPPAARSGRRPGKKPHSTRRSQPKAPPVDDAEVDELVLQTKRSSRRQSLELQKCEEILHKIVKYRFSWPFREPVTRDEAEDYYDVITHPMDFQTVQNKCSCGSYRSVQEFLTDMKQVFTNAEVYNCRGSHVLSCMVKTEQCLVALLHKHLPGHPYVRRKRKKFPDRLAEDEGDSEPEAVGQSRGRRQKK

SEQ ID NO: 35687 - protein, 1387 aa, Artificial Sequence
  Synthetic polypeptide
LRMFVITVRRRGESCFHLCVGLLGDSEVGKEKMLKVKIVKIHPLEKVDEEATEKKSDGACDSPSSDKENSSQIAQDHQKKETVVKEDEGRRESINDRARRSPRKLPTSLKKGERKWAPPKFLPHKYDVKLQNEDKIISNVPADSLIRTERPPNKEIVRYFIRHNALRAGTGENAPWVVEDELVKKYSLPSKFSDFLLDPYKYMTLNPSTKRKNTGSPDRKPSKKSKTDNSSLSSPLNPKLWCHVHLKKSLSGSPLKVKNSKNSKSPEEHLEEMMKMMSPNKLHTNFHIPKKGPPAKKPGKHSDKPLKAKGRSKGILNGQKSTGNSKSPKKGLKTPKTKMKQMTLLDMAKGTQKMTRAPRNSGGTPRTSSKPHKHLPPAALHLIAYYKENKDREDKRSALSCVISKTARLLSSEDRARLPEELRSLVQKRYELLEHKKRWASMSEEQRKEYLKKKREELKKKLKEKAKERREKEMLERLEKQKRYEDQELTGKNLPAFRLVDTPEGLPNTLFGDVAMVVEFLSCYSGLLLPDAQYPITAVSLMEALSADKGGFLYLNRVLVILLQTLLQDEIAEDYGELGMKLSEIPLTLHSVSELVRLCLRRSDVQEESEGSDTDDNKDSAAFEDNEVQDEFLEKLETSEFFELTSEEKLQILTALCHRILMTYSVQDHMETRQQMSAELWKERLAVLKEENDKKRAEKQKRKEMEAKNKENGKVENGLGKTDRKKEIVKFEPQVDTEAEDMISAVKSRRLLAIQAKKEREIQEREMKVKLERQAEEERIRKHKAAAEKAFQEGIAKAKLVMRRTPIGTDRNHNRYWLFSDEVPGLFIEKGWVHDSIDYRFNHHCKDHTVSGDEDYCPRSKKANLGKNASMNTQHGTATEVAVETTTPKQGQNLWFLCDSQKELDELLNCLHPQGIRESQLKERLEKRYQDIIHSIHLARKPNLGLKSCDGNQELLNFLRSDLIEVATRLQKGGLGYVEETSEFEARVISLEKLKDFGECVIALQASVIKKFLQGFMAPKQKRRKLQSEDSAKTEEVDEEKKMVEEAKVASALEKWKTAIREAQTFSRMHVLLGMLDACIKWDMSAENARCKVCRKKGEDDKLILCDECNKAFHLFCLRPALYEVPDGEWQCPACQPATARRNSRGRNYTEESASEDSEDDESDEEEEEEEEEEEEEDYEVAGLRLRPRKTIRGKHSVIPPAARSGRRPGKKPHSTRRSQPKAPPVDDAEVDELVLQTKRSSRRQSLELQKCEEILHKIVKYRFSWPFREPVTRDEAEDYYDVITHPMDFQTVQNKCSCGSYRSVQEFLTDMKQVFTNAEVYNCRGSHVLSCMVKTEQCLVALLHKHLPGHPYVRRKRKKFPDRLAEDEGDSEPEAVGQSRGRRQKK

SEQ ID NO: 35688 - protein, 15 aa, Artificial Sequence
  Synthetic polypeptide
AYWEILRLGRRKCSR

SEQ ID NO: 35689 - protein, 2 aa, Artificial Sequence
  Synthetic polypeptide
AR

SEQ ID NO: 35690 - protein, 34 aa, Artificial Sequence
  Synthetic polypeptide
GQTKTATRVPCLTSISLRWTAAPTQAPAPSRVSP

SEQ ID NO: 35691 - protein, 11 aa, Artificial Sequence
  Synthetic polypeptide
ARRKQQPEFRV

SEQ ID NO: 35692 - protein, 115 aa, Artificial Sequence
  Synthetic polypeptide
PDENSNQSSVSDVYQLKVDSSTNSSPSPQQSESLSPAHTSDFRTDDSQPPTLGQEILEEPSLPSSEVADEPPTLTKEEPVPLETQVVEEEEDSGAPPLKRFCVDQPTVPQTASES

SEQ ID NO: 35693 - protein, 34 aa, Artificial Sequence
  Synthetic polypeptide
PDENSNQSSVSDVYQLKVDSSTNSSPSPQQSESL

SEQ ID NO: 35694 - protein, 116 aa, Artificial Sequence
  Synthetic polypeptide
QLFPPLCLGLWISVCFHHFLLQLENSYSTSETQLKCHLLCSRACSWSVRPAWPPTTRWPRRTWPCGPAWRWAGLPWPSNTRSFVRWPRTARTSCSDWRKACIAGVPTARWAGCRLS

SEQ ID NO: 35695 - protein, 47 aa, Artificial Sequence
  Synthetic polypeptide
SSSRPYALAYGFLFAFIIFSFNLRTPIQPLKPSSNATSSVPGPAAGA

SEQ ID NO: 35696 - protein, 214 aa, Artificial Sequence
  Synthetic polypeptide
NPAQMPPPLFQGLQLEREACLASNYALAKENLALRPRLEMGRAALAIKYQELREVAENCADKLQRLEESMHRWSPHCALGWLQAELEEAEQEAEEQMEQLLLGEQSLEAFLPAFQRGRALAHLRRTQAEKLQELLRRRERSAQPAPTSAADPPKSFPAAAVLPTGAARGPPAVPRSLPPLDSRPVPPLKGSPGCPLGPAPLLSPRPSQPEPPHR

SEQ ID NO: 35697 - protein, 52 aa, Artificial Sequence
  Synthetic polypeptide
TELKGNSVTLSNSSFCNKEKICYCELVASFTKMSGDPELSCSCTLRTQSSWS

SEQ ID NO: 35698 - protein, 18 aa, Artificial Sequence
  Synthetic polypeptide
LPPLLKCPGIPSCPAAVP

SEQ ID NO: 35699 - protein, 129 aa, Artificial Sequence
  Synthetic polypeptide
NVRGSRAVLQLYPENSEQLELITTQATKAGFSGGMVVDYPNSAKAKKFYLCLFSGPSTFIPEGLSENQDEVEPRESVFTNERFPLRMSRRGMVRKSRAWVLEKKERHRRQGREVRPDTQYTGRKRKPRF

SEQ ID NO: 35700 - protein, 21 aa, Artificial Sequence
  Synthetic polypeptide
NVRGSRAVLQLYPENSEQLEL

SEQ ID NO: 35701 - protein, 45 aa, Artificial Sequence
  Synthetic polypeptide
TELKGNSVTLSNSSFCNKEKICYCELVASFTKMSGDPELSCSCTL

SEQ ID NO: 35702 - protein, 13 aa, Artificial Sequence
  Synthetic polypeptide
NVRGSRAVLQLYP

SEQ ID NO: 35703 - protein, 146 aa, Artificial Sequence
  Synthetic polypeptide
NVRGSRAVLQLYPENSEQLELITTQATKAGFSGGMVVDYPNSAKAKKFYLCLFSGPSTFIPEGLSENQDEVEPRESVFTNEREGGAFERRGIRGHQTRRFPLRMSRRGMVRKSRAWVLEKKERHRRQGREVRPDTQYTGRKRKPRF

SEQ ID NO: 35704 - protein, 96 aa, Artificial Sequence
  Synthetic polypeptide
NVRGSRAVLQLYPENSEQLELITTQATKAGFSGGMVVDYPNSAKAKKFYLCLFSGPSTFIPEVPIKDVEAGNGEEESGMGAGEEGAAQAPGQGSQT

SEQ ID NO: 35705 - protein, 97 aa, Artificial Sequence
  Synthetic polypeptide
TELKGNSVTLSNSSFCNKEKICYCELVASFTKMSGDPELSCSCTLRTQSRFPLRMSRRGMVRKSRAWVLEKKERHRRQGREVRPDTQYTGRKRKPRF

SEQ ID NO: 35706 - protein, 52 aa, Artificial Sequence
  Synthetic polypeptide
NVRGSRAVLQLYPENSEQVPIKDVEAGNGEEESGMGAGEEGAAQAPGQGSQT

SEQ ID NO: 35707 - protein, 309 aa, Artificial Sequence
  Synthetic polypeptide
GQVQWLTPTIPVLWKAEAGGSLEARSSRPAWAKDSDDDDDVAVTVDRDRFMDEFFEQVEEIRGFIDKIAENVEEVKRKHSAILASPNPDEKTKEELEELMSDIKKTANKVRSKLKSIEQSIEQEEGLNRSSADLRIRKTQHSTLSRKFVEVMSEYNATQSDYRERCKGRIQRQLEITGRTTTSEELEDMLESGNPAIFASGIIMDSSISKQALSEIETRHSEIIKLENSIRELHDMFMDMAMLVESQGEMIDRIEYNVEHAVDYVERAVSDTKKAVKYQSKARRKKIMIIICCVILGIVIASTVGGIFA

SEQ ID NO: 35708 - protein, 74 aa, Artificial Sequence
  Synthetic polypeptide
AKCSGSHLQSQCFGRLRQEDRLRPGVQDQPGPRTAMMMMMSLSPWTETASWMSSLSRWRRFEASLTRSQRTWRR

SEQ ID NO: 35709 - protein, 13 aa, Artificial Sequence
  Synthetic polypeptide
GQEFKTSLGQGQR

SEQ ID NO: 35710 - protein, 272 aa, Artificial Sequence
  Synthetic polypeptide
GQVQWLTPTIPVLWKAEAGGSLEARSSRPAWAKDSDDDDDVAVTVDRDRFMDEFFEQVEEIRGFIDKIAENVEEVKRKHSAILASPNPDEKTKEELEELMSDIKKTANKVRSKLKSIEQSIEQEEGLNRSSADLRIRKTQHSTLSRKFVEVMSEYNATQSDYRERCKGRIQRQLEITGRTTTSEELEDMLESGNPAIFASGIIMDSSISKQALSEIETRHSEIIKLENSIRELHDMFMDMAMLVESQTMWRGPCLTPRRPSSTRARRAGRKS

SEQ ID NO: 35711 - protein, 301 aa, Artificial Sequence
  Synthetic polypeptide
GQVQWLTPTIPVLWKAEAGGSLEARSSRPAWAKDSDDDDDVAVTVDRDRFMDEFFEQVEEIRGFIDKIAENVEEVKRKHSAILASPNPDEKTKEELEELMSDIKKTANKVRSKLKSIEQSIEQEEGLNRSSADLRIRKTQHSTLSRKFVEVMSEYNATQSDYRERCKGRIQRQLEITGRTTTSEELEDMLESGNPAIFASGIIMDSSISKQALSEIETRHSEIIKLENSIRELHDMFMDMAMLVESQVSAGPPCPPLQPTPAPRAALTSPFLPDTLPCRGGTKFSASGCFPEVLPRAPTQP

SEQ ID NO: 35712 - protein, 281 aa, Artificial Sequence
  Synthetic polypeptide
GQVQWLTPTIPVLWKAEAGGSLEARSSRPAWAKDSDDDDDVAVTVDRDRFMDEFFEQVEEIRGFIDKIAENVEEVKRKHSAILASPNPDEKTKEELEELMSDIKKTANKVRSKLKSIEQSIEQEEGLNRSSADLRIRKTQHSTLSRKFVEVMSEYNATQSDYRERCKGRIQRQLEITGRTTTSEELEDMLESGNPAIFASGIIMDSSISKQALSEIETRHSEIIKLENSIRELHDMFMDMAMLVESQPQGAFLKSCPEPQPNPEEGALWSSGAPGPAGRDD

SEQ ID NO: 35713 - protein, 63 aa, Artificial Sequence
  Synthetic polypeptide
ATVASLHSGLGEGRFRFPTGFWTGRQPSRPSSFCTGSSAAKLTSTPSPRSWPSRQAVLTVDAR

SEQ ID NO: 35714 - protein, 63 aa, Artificial Sequence
  Synthetic polypeptide
SQILGRQRREDRLSPGGRGCSELRSRHCTPAWARAASAFLQASGRGGSPPGRRLFARALRQQN

SEQ ID NO: 35715 - protein, 71 aa, Artificial Sequence
  Synthetic polypeptide
AQEVEAAVSYGRVTALRPGRGPLPLSYRLLDGEAALPAVVFLHGLFGSKTNFNSIAKILAQQTGRADGGCS

SEQ ID NO: 35716 - protein, 59 aa, Artificial Sequence
  Synthetic polypeptide
ATVASLHSGLGEGRFRFPTGFWTGRQPSRPSSFCTGSSAAKLTSTPSPRSWPSRQAVGC

SEQ ID NO: 35717 - protein, 285 aa, Artificial Sequence
  Synthetic polypeptide
AQEVEAAVSYGRVTALRPGRGPLPLSYRLLDGEAALPAVVFLHGLFGSKTNFNSIAKILAQQTGRRVLTVDARNHGDSPHSPDMSYEIMSQDLQDLLPQLGLVPCVVVGHSMGGKTAMLLALQRPELVERLIAVDISPVESTGVSHFATYVAAMRAINIADELPRSRARKLADEQLSSVIQDMAVRQHLLTNLVEVDGRFVWRVNLDALTQHLDKILAFPQRQESYLGPTLFLLGGNSQFVHPSHHPEIMRLFPRAQMQTVPNAGHWIHADRPQDFIAAIRGFLV

SEQ ID NO: 35718 - protein, 129 aa, Artificial Sequence
  Synthetic polypeptide
AQEVEAAVSYGRVTALRPGRGPLPLSYRLLDGEAALPAVVFLHGLFGSKTNFNSIAKILAQQTGRRVLTVDARNHGDSPHSPDMSYEIMSQDLQDLLPQLGLVPCVVVGHSMGGKTAMLLALQRSQPPP

SEQ ID NO: 35719 - protein, 173 aa, Artificial Sequence
  Synthetic polypeptide
AQEVEAAVSYGRVTALRPGRGPLPLSYRLLDGEAALPAVVFLHGLFGSKTNFNSIAKILAQQTGRRVLTVDARNHGDSPHSPDMSYEIMSQDLQDLLPQLGLVPCVVVGHSMGGKTAMLLALQRVIHPRCPGWYCRPGPVKGRVAPPDRTRNLPQLLHPHRTWPCGSTCSLTW

SEQ ID NO: 35720 - protein, 228 aa, Artificial Sequence
  Synthetic polypeptide
AQEVEAAVSYGRVTALRPGRGPLPLSYRLLDGEAALPAVVFLHGLFGSKTNFNSIAKILAQQTGRRVLTVDARNHGDSPHSPDMSYEIMSQDLQDLLPQLGLVPCVVVGHSMGGKTAMLLALQRDMAVRQHLLTNLVEVDGRFVWRVNLDALTQHLDKILAFPQRQESYLGPTLFLLGGNSQFVHPSHHPEIMRLFPRAQMQTVPNAGHWIHADRPQDFIAAIRGFLV

SEQ ID NO: 35721 - protein, 143 aa, Artificial Sequence
  Synthetic polypeptide
AQEVEAAVSYGRVTALRPGRGPLPLSYRLLDGEAALPAVVFLHGLFGSKTNFNSIAKILAQQTGRRVLTVDARNHGDSPHSPDMSYEIMSQDLQDLLPQLGLVPCVVVGHSMGGKTAMLLALQRISAQWKAQVSPTLQPMWQP

SEQ ID NO: 35722 - protein, 59 aa, Artificial Sequence
  Synthetic polypeptide
ATVASLHSGLGEGRFRFPTGFWTGRQPSRPSSFCTGSSAAKLTSTPSPRSWPSRQAVGD

SEQ ID NO: 35723 - protein, 67 aa, Artificial Sequence
  Synthetic polypeptide
AQEVEAAVSYGRVTALRPGRGPLPLSYRLLDGEAALPAVVFLHGLFGSKTNFNSIAKILAQQTGRRG

SEQ ID NO: 35724 - protein, 14 aa, Artificial Sequence
  Synthetic polypeptide
GGRIARTWEAEVAV

SEQ ID NO: 35725 - protein, 119 aa, Artificial Sequence
  Synthetic polypeptide
SPVSTNNTKISWAWWPAPVIPATWEAEAGESPEPGRQRLRCRWSFCWNPRSWTLWGTATWSPTGVSHQGPQAAWWLWTALHHRETALWLWARRSGWCSGQGWLPNRDRGWPPGSSSSGS

SEQ ID NO: 35726 - protein, 546 aa, Artificial Sequence
  Synthetic polypeptide
SQLLGRLRRENRQNLGGRGCGVGGAFAGIPGVGPFGGPQPGVPLGYPIKAPKLPGGYGLPYTTGKLPYGYGPGGVAGAAGKAGYPTGTGVGPQAAAAAAAKAAAKFGAGAAGVLPGVGGAGVPGVPGAIPGIGGIAGVGTPAAAAAAAAAAKAAKYGAAAGLVPGGPGFGPGVVGVPGAGVPGVGVPGAGIPVVPGAGIPGAAVPGVVSPEAAAKAAAKAAKYGARPGVGVGGIPTYGVGAGGFPGFGVGVGGIPGVAGVPGVGGVPGVGGVPGVGISPEAQAAAAAKAAKYGVGTPAAAAAKAAAKAAQFGLVPGVGVAPGVGVAPGVGVAPGVGLAPGVGVAPGVGVAPGVGVAPGIGPGGVAAAAKSAAKVAAKAQLRAAAGLGAGIPGLGVGVGVPGLGVGAGVPGLGVGAGVPGFGAVPGALAAAKAAKYGAAVPGVLGGLGALGGVGIPGGVVGAGPAAAAAAAKAAAKAAQFGLVGAAGLGGLGVGGLGVPGVGGLGGIPPAAAAKAAKYGVAARPGFGLSPIFPGGACLGKACGRKRK

SEQ ID NO: 35727 - protein, 564 aa, Artificial Sequence
  Synthetic polypeptide
SQLLGRLRRENRQNLGGRGCGVGGAFAGIPGVGPFGGPQPGVPLGYPIKAPKLPGGYGLPYTTGKLPYGYGPGGVAGAAGKAGYPTGTGVGPQAAAAAAAKAAAKFGAGAAGVLPGVGGAGVPGVPGAIPGIGGIAGVGTPAAAAAAAAAAKAAKYGAAAGLVPGGPGFGPGVVGVPGAGVPGVGVPGAGIPVVPGAGIPGAAVPGVVSPEAAAKAAAKAAKYGARPGVGVGGIPTYGVGAGGFPGFGVGVGGIPGVAGVPGVGGVPGVGGVPGVGISPEAQAAAAAKAAKYGVGTPAAAAAKAAAKAAQFGLVPGVGVAPGVGVAPGVGVAPGVGLAPGVGVAPGVGVAPGVGVAPGIGPGGVAAAAKSAAKVAAKAQLRAAAGLGAGIPGLGVGVGVPGLGVGAGVPGLGVGAGVPGFGAVPGALAAAKAAKYGAAVPGVLGGLGALGGVGIPGGVVGAGPAAAAAAAKAAAKAAQFGLVGAAGLGGLGVGGLGVPGVGGLGGIPPAAAAKAAKYGAAGLGGVLGGAGQFPLGGVAARPGFGLSPIFPGGACLGKACGRKRK

SEQ ID NO: 35728 - protein, 632 aa, Artificial Sequence
  Synthetic polypeptide
SQLLGRLRRENRQNLGGRGCGVGGAFAGIPGVGPFGGPQPGVPLGYPIKAPKLPGGYGLPYTTGKLPYGYGPGGVAGAAGKAGYPTGTGVGPQAAAAAAAKAAAKFGAGAAGVLPGVGGAGVPGVPGAIPGIGGIAGVGTPAAAAAAAAAAKAAKYGAAAGLVPGGPGFGPGVVGVPGAGVPGVGVPGAGIPVVPGAGIPGAAVPGVVSPEAAAKAAAKAAKYGARPGVGVGGIPTYGVGAGGFPGFGVGVGGIPGVAGVPGVGGVPGVGGVPGVGISPEAQAAAAAKAAKYGAAGAGVLGGLVPGAPGAVPGVPGTGGVPGVGTPAAAAAKAAAKAAQFALLNLAGLVPGVGVAPGVGVAPGVGVAPGVGLAPGVGVAPGVGVAPGVGVAPGIGPGGVAAAAKSAAKVAAKAQLRAAAGLGAGIPGLGVGVGVPGLGVGAGVPGLGVGAGVPGFGAGADEGVRRSLSPELREGDPSSSQHLPSTPSSPRVPGALAAAKAAKYGAAVPGVLGGLGALGGVGIPGGVVGAGPAAAAAAAKAAAKAAQFGLVGAAGLGGLGVGGLGVPGVGGLGGIPPAAAAKAAKYGAAGLGGVLGGAGQFPLGGVAARPGFGLSPIFPGGACLGKACGRKRK

SEQ ID NO: 35729 - protein, 545 aa, Artificial Sequence
  Synthetic polypeptide
SQLLGRLRRENRQNLGGRGCGVGGAFAGIPGVGPFGGPQPGVPLGYPIKAPKLPGGYGLPYTTGKLPYGYGPGGVAGAAGKAGYPTGTGVGPQAAAAAAAKAAAKFGAGAAGVLPGVGGAGVPGVPGAIPGIGGIAGVGTPAAAAAAAAAAKAAKYGAAAGLVPGGPGFGPGVVGVPGAGVPGVGVPGAGIPVVPGAGIPGAAVPGVVSPEAAAKAAAKAAKYGARPGVGVGGIPTYGVGAGGFPGFGVGVGGIPGVAGVPGVGGVPGVGGVPGVGISPEAQAAAAAKAAKYGLVPGVGVAPGVGVAPGVGVAPGVGLAPGVGVAPGVGVAPGVGVAPGIGPGGVAAAAKSAAKVAAKAQLRAAAGLGAGIPGLGVGVGVPGLGVGAGVPGLGVGAGVPGFGAVPGALAAAKAAKYGAAVPGVLGGLGALGGVGIPGGVVGAGPAAAAAAAKAAAKAAQFGLVGAAGLGGLGVGGLGVPGVGGLGGIPPAAAAKAAKYGAAGLGGVLGGAGQFPLGGVAARPGFGLSPIFPGGACLGKACGRKRK

SEQ ID NO: 35730 - protein, 570 aa, Artificial Sequence
  Synthetic polypeptide
SQLLGRLRRENRQNLGGRGCGVGGAFAGIPGVGPFGGPQPGVPLGYPIKAPKLPGGYGLPYTTGKLPYGYGPGGVAGAAGKAGYPTGTGVGPQAAAAAAAKAAAKFGAGAAGVLPGVGGAGVPGVPGAIPGIGGIAGVGTPAAAAAAAAAAKAAKYGAAAGLVPGGPGFGPGVVGVPGAGVPGVGVPGAGIPVVPGAGIPGAAVPGVVSPEAAAKAAAKAAKYGARPGVGVGGIPTYGVGAGGFPGFGVGVGGIPGVAGVPGVGGVPGVGGVPGVGISPEAQAAAAAKAAKYGVGTPAAAAAKAAAKAAQFALLNLAGLVPGVGVAPGVGVAPGVGVAPGVGLAPGVGVAPGVGVAPGVGVAPGIGPGGVAAAAKSAAKVAAKAQLRAAAGLGAGIPGLGVGVGVPGLGVGAGVPGLGVGAGVPGFGAVPGALAAAKAAKYGAAVPGVLGGLGALGGVGIPGGVVGAGPAAAAAAAKAAAKAAQFGLVGAAGLGGLGVGGLGVPGVGGLGGIPPAAAAKAAKYGAAGLGGVLGGAGQFPLGGVAARPGFGLSPIFPGGACLGKACGRKRK

SEQ ID NO: 35731 - protein, 527 aa, Artificial Sequence
  Synthetic polypeptide
SQLLGRLRRENRQNLGGRGCGVGGAFAGIPGVGPFGGPQPGVPLGYPIKAPKLPGGYGLPYTTGKLPYGYGPGGVAGAAGKAGYPTGTGVGPQAAAAAAAKAAAKFGAGAAGVLPGVGGAGVPGVPGAIPGIGGIAGVGTPAAAAAAAAAAKAAKYGAAAGLVPGGPGFGPGVVGVPGAGVPGVGVPGAGIPVVPGAGIPGAAVPGVVSPEAAAKAAAKAAKYGARPGVGVGGIPTYGVGAGGFPGFGVGVGGIPGVAGVPGVGGVPGVGGVPGVGISPEAQAAAAAKAAKYGLVPGVGVAPGVGVAPGVGVAPGVGLAPGVGVAPGVGVAPGVGVAPGIGPGGVAAAAKSAAKVAAKAQLRAAAGLGAGIPGLGVGVGVPGLGVGAGVPGLGVGAGVPGFGAVPGALAAAKAAKYGAAVPGVLGGLGALGGVGIPGGVVGAGPAAAAAAAKAAAKAAQFGLVGAAGLGGLGVGGLGVPGVGGLGGIPPAAAAKAAKYGVAARPGFGLSPIFPGGACLGKACGRKRK

SEQ ID NO: 35732 - protein, 105 aa, Artificial Sequence
  Synthetic polypeptide
SPVSTNNTKISWAWWPAPVIPATWEAEAGESPEPGRQRLRCRWSFCWNPRSWTLWGTATWSPTGVSHQGPQAAWLWARRSGWCSGQGWLPNRDRGWPPGSSSSGS

SEQ ID NO: 35733 - protein, 498 aa, Artificial Sequence
  Synthetic polypeptide
SQLLGRLRRENRQNLGGRGCGVGGAFAGIPGVGPFGGPQPGVPLGYPIKAPKLPGYGPGGVAGAAGKAGYPTGTGVGPQAAAAAAAKAAAKFGAGAAGVLPGVGGAGVPGVPGAIPGIGGIAGVGTPAAAAAAAAAAKAAKYGAAAGLVPGGPGFGPGVVGVPGAGVPGVGVPGAGIPVVPGAGIPGAAVPGVVSPEAAAKAAAKAAKYGARPGVGVGGIPTYGVGAGGFPGFGVGVGGIPGVAGVPGVGGVPGVGGVPGVGISPEAQAAAAAKAAKYGLVPGVGVAPGVGVAPGVGVAPGVGLAPGVGVAPGVGVAPGVGVAPGIGPGGVAGAAAGLGAGIPGLGVGVGVPGLGVGAGVPGLGVGAGVPGFGAVPGALAAAKAAKYGAAVPGVLGGLGALGGVGIPGGVVGAGPAAAAAAAKAAAKAAQFGLVGAAGLGGLGVGGLGVPGVGGLGGIPPAAAAKAAKYGVAARPGFGLSPIFPGGACLGKACGRKRK

SEQ ID NO: 35734 - protein, 73 aa, Artificial Sequence
  Synthetic polypeptide
SPVSTNNTKISWAWWPAPVIPATWEAEAGESPEPGRQRLRCRWSFCWNPRSWTLWGTATWSPTGVSHQGPQAA

SEQ ID NO: 35735 - protein, 54 aa, Artificial Sequence
  Synthetic polypeptide
SQLLGRLRRENRQNLGGRGCGVGGAFAGIPGVGPFGGPQPGVPLGYPIKAPKLP

SEQ ID NO: 35736 - protein, 513 aa, Artificial Sequence
  Synthetic polypeptide
SQLLGRLRRENRQNLGGRGCGVGGAFAGIPGVGPFGGPQPGVPLGYPIKAPKLPGYGPGGVAGAAGKAGYPTGTGVGPQAAAAAAAKAAAKFGAGAAGVLPGVGGAGVPGVPGAIPGIGGIAGVGTPAAAAAAAAAAKAAKYGAAAGLVPGGPGFGPGVVGVPGAGVPGVGVPGAGIPVVPGAGIPGAAVPGVVSPEAAAKAAAKAAKYGARPGVGVGGIPTYGVGAGGFPGFGVGVGGIPGVAGVPGVGGVPGVGGVPGVGISPEAQAAAAAKAAKYGLVPGVGVAPGVGVAPGVGVAPGVGLAPGVGVAPGVGVAPGVGVAPGIGPGGVAAAAKSAAKVAAKAQLRAAAGLGAGIPGLGVGVGVPGLGVGAGVPGLGVGAGVPGFGAVPGALAAAKAAKYGAAVPGVLGGLGALGGVGIPGGVVGAGPAAAAAAAKAAAKAAQFGLVGAAGLGGLGVGGLGVPGVGGLGGIPPAAAAKAAKYGVAARPGFGLSPIFPGGACLGKACGRKRK

SEQ ID NO: 35737 - protein, 597 aa, Artificial Sequence
  Synthetic polypeptide
SQLLGRLRRENRQNLGGRGCGVGGAFAGIPGVGPFGGPQPGVPLGYPIKAPKLPGGYGLPYTTGKLPYGYGPGGVAGAAGKAGYPTGTGVGPQAAAAAAAKAAAKFGAGAAGVLPGVGGAGVPGVPGAIPGIGGIAGVGTPAAAAAAAAAAKAAKYGAAAGLVPGGPGFGPGVVGVPGAGVPGVGVPGAGIPVVPGAGIPGAAVPGVVSPEAAAKAAAKAAKYGARPGVGVGGIPTYGVGAGGFPGFGVGVGGIPGVAGVPGVGGVPGVGGVPGVGISPEAQAAAAAKAAKYGVGTPAAAAAKAAAKAAQFGLVPGVGVAPGVGVAPGVGVAPGVGLAPGVGVAPGVGVAPGVGVAPGIGPGGVAAAAKSAAKVAAKAQLRAAAGLGAGIPGLGVGVGVPGLGVGAGVPGLGVGAGVPGFGAGADEGVRRSLSPELREGDPSSSQHLPSTPSSPRVPGALAAAKAAKYGAAVPGVLGGLGALGGVGIPGGVVGAGPAAAAAAAKAAAKAAQFGLVGAAGLGGLGVGGLGVPGVGGLGGIPPAAAAKAAKYGAAGLGGVLGGAGQFPLGGVAARPGFGLSPIFPGGACLGKACGRKRK

SEQ ID NO: 35738 - protein, 20 aa, Artificial Sequence
  Synthetic polypeptide
GQRALLLPDCGDPRHRADPA

SEQ ID NO: 35739 - protein, 515 aa, Artificial Sequence
  Synthetic polypeptide
ASGHCYYQTVVTPVIEQILPDSPGSHLPHTVTLVSIPASSHGKRGLSVSIDPPHGPPGCGTEHSHTVRVQGVDPGCMSPDVKNSIHVGDRILEINGTPIRNVPLDEIDLLIQETSRLLQLTLEHDPHDTLGHGLGPETSPLSSPAYTPSGEAGSSARQKPVLRSCSIDRSPGAGSLGSPASQRKDLGRSESLRVVCRPHRIFRPSDLIHGEVLGKGCFGQAIKVTHRETGEVMVMKELIRFDEETQRTFLKEVKVMRCLEHPNVLKFIGVLYKDKRLNFITEYIKGGTLRGIIKSMDSQYPWSQRVSFAKDIASGMAYLHSMNIIHRDLNSHNCLVRENKNVVVADFGLARLMVDEKTQPEGLRSLKKPDRKKRYTVVGNPYWMAPEMINGRSYDEKVDVFSFGIVLCEIIGRVNADPDYLPRTMDFGLNVRGFLDRYCPPNCPPSFFPITVRCCDLDPEKRPSFVKLEHWLETLRMHLAGHLPLGPQLEQLDRGFWETYRRGESGLPAHPEVPD

SEQ ID NO: 35740 - protein, 10 aa, Artificial Sequence
  Synthetic polypeptide
PAGTATTRLW

SEQ ID NO: 35741 - protein, 173 aa, Artificial Sequence
  Synthetic polypeptide
ASGHCYYQTVVTPVIEQILPDSPGSHLPHTVTLVSIPASSHGKRGLSVSIDPPHGPPGCGTEHSHTVRVQGVDPGCMSPDVKNSIHVGDRILEINGTPIRNVPLDEIDLLIQETSRLLQLTLEHDPHDTLGHGLGPETSPLSSPAYTPSGEAGSSARQKPVFARTWVALSPSA

SEQ ID NO: 35742 - protein, 11 aa, Artificial Sequence
  Synthetic polypeptide
ARTASTHGARE

SEQ ID NO: 35743 - protein, 50 aa, Artificial Sequence
  Synthetic polypeptide
PGQPVPMEPESELCQGHRIRDGLPPLHEHHPPRPQLPQLPGPREQECGGG

SEQ ID NO: 35744 - protein, 220 aa, Artificial Sequence
  Synthetic polypeptide
QDSQYPWSQRVSFAKDIASGMAYLHSMNIIHRDLNSHNCLVRENKNVVVADFGLARLMVDEKTQPEGLRSLKKPDRKKRYTVVGNPYWMAPEMINGRSYDEKVDVFSFGIVLCEIIGRVNADPDYLPRTMDFGLNVRGFLDRYCPPNCPPSFFPITVRCCDLDPEKRPSFVKLEHWLETLRMHLAGHLPLGPQLEQLDRGFWETYRRGESGLPAHPEVPD

SEQ ID NO: 35745 - protein, 232 aa, Artificial Sequence
  Synthetic polypeptide
SQHWEAKVGRSPEDSQYPWSQRVSFAKDIASGMAYLHSMNIIHRDLNSHNCLVRENKNVVVADFGLARLMVDEKTQPEGLRSLKKPDRKKRYTVVGNPYWMAPEMINGRSYDEKVDVFSFGIVLCEIIGRVNADPDYLPRTMDFGLNVRGFLDRYCPPNCPPSFFPITVRCCDLDPEKRPSFVKLEHWLETLRMHLAGHLPLGPQLEQLDRGFWETYRRGESGLPAHPEVPD

SEQ ID NO: 35746 - protein, 31 aa, Artificial Sequence
  Synthetic polypeptide
PGAVAHACNPNTGRPRWADHLRTASTHGARE

SEQ ID NO: 35747 - protein, 34 aa, Artificial Sequence
  Synthetic polypeptide
GWARWLTPVTPGLWEAKAGGLPEVPRQCWWPWFP

SEQ ID NO: 35748 - protein, 242 aa, Artificial Sequence
  Synthetic polypeptide
PQDFGRPRRADYLRSRGSAGGHGSRSQKELPTEPPYTAYVGNLPFNTVQGDIDAIFKDLSIRSVRLVRDKDTDKFKGFCYVEFDEVDSLKEALTYDGALLGDRSLRVDIAEGRKQDKGGFGFRKGGPDDRGMGSSRESRGGWDSRDDFNSGFRDDFLGGRGGSRPGDRRTGPPMGSRFRDGPPLRGSNMDFREPTEEERAQRPRLQLKPRTVATPLNQVANPNSAIFGGARPREEVVQKEQE

SEQ ID NO: 35749 - protein, 222 aa, Artificial Sequence
  Synthetic polypeptide
PQDFGRPRRADYLRSRGSAGGHGSRSQKELPTEPPYTAYVGNLPFNTVQGDIDAIFKDLSIRSVRLVRDKDTDKFKGFCYVEFDEVDSLKEALTYDGALLGDRSLRVDIAEGRKQDKGGFGFRKGGPDDRGFRDDFLGGRGGSRPGDRRTGPPMGSRFRDGPPLRGSNMDFREPTEEERAQRPRLQLKPRTVATPLNQVANPNSAIFGGARPREEVVQKEQE

SEQ ID NO: 35750 - protein, 982 aa, Artificial Sequence
  Synthetic polypeptide
EIRLSPGGRGCGSPLHKQSSGPSSSPAAAAAPEKPGPKAAEVGDDFLGDFVVGERVWVNGVKPGVVQYLGETQFAPGQWAGVVLDDPVGKNDGAVGGVRYFECPALQGIFTRPSKLTRQPTAEGSGSDAHSVESLTAQNLSLHSGTATPPLTSRVIPLRESVLNSSVKTGNESGSNLSDSGSVKRGEKDLRLGDRVLVGGTKTGVVRYVGETDFAKGEWCGVELDEPLGKNDGAVAGTRYFQCPPKFGLFAPIHKVIRIGFPSTSPAKAKKTKRMAMGVSALTHSPSSSSISSVSSVASSVGGRPSRSGLLTETSSRYARKISGTTALQEALKEKQQHIEQLLAERDLERAEVAKATSHICEVEKEIALLKAQHEQYVAEAEEKLQRARLLVESVRKEKVDLSNQLEEERRKVEDLQFRVEEESITKGDLELTTVAEKSRVLQLEEELTLRRGEIEELQQCLLHSGPPPPDHPDAAEILRLRERLLSASKEHQRESGVLRDKYEKALKAYQAEVDKLRAANEKYAQEVAGLKDKVQQATSENMGLMDNWKSKLDSLASDHQKSLEDLKATLNSGPGAQQKEIGELKAVMEGIKMEHQLELGNLQAKHDLETAMHVKEKEALREKLQEAQEELAGLQRHWRAQLEVQASQHRLELQEAQDQRRDAELRVHELEKLDVEYRGQAQAIEFLKEQISLAEKKMLDYERLQRAEAQGKQEVESLREKLLVAENRLQAVEALCSSQHTHMIESNDISEETIRTKETVEGLQDKLNKRDKEVTALTSQTEMLRAQVSALESKCKSGEKKVDALLKEKRRLEAELETVSRKTHDASGQLVLISQELLRKERSLNELRVLLLEANRHSPGPERDLSREVHKAEWRIKEQKLKDDIRGLREKLTGLDKEKSLSDQRRYSLIDRSSAPELLRLQHQLMSTEDALRDALDQAQQVEKLMEAMRSCPDKAQTIGNSGSANGIHQQDKAQKQEDKH

SEQ ID NO: 35751 - protein, 53 aa, Artificial Sequence
  Synthetic polypeptide
AQEVEAAAPHCTNSHLDPPPPRPQLLPPRSRAPRRRKWGMTSWGTLWWASGCG

SEQ ID NO: 35752 - protein, 60 aa, Artificial Sequence
  Synthetic polypeptide
ARWCIPVVPVTWQPEVGDPLEPRRSRLRLPTAQTVIWTLLLPGRSCCPREAGPQGGGSGG

SEQ ID NO: 35753 - protein, 1017 aa, Artificial Sequence
  Synthetic polypeptide
EIRLSPGGRGCGSPLHKQSSGPSSSPAAAAAPEKPGPKAAEVGDDFLGDFVVGERVWVNGVKPGVVQYLGETQFAPGQWAGVVLDDPVGKNDGAVGGVRYFECPALQGIFTRPSKLTRQPTAEGSGSDAHSVESLTAQNLSLHSGTATPPLTSRVIPLRESVLNSSVKTGNESGSNLSDSGSVKRGEKDLRLGDRVLVGGTKTGVVRYVGETDFAKGEWCGVELDEPLGKNDGAVAGTRYFQCPPKFGLFAPIHKVIRIGFPSTSPAKAKKTKRMAMGVSALTHSPSSSSISSVSSVASSVGGRPSRSGLLTETSSRYARKISGTTALQEALKEKQQHIEQLLAERDLERAEVAKATSHICEVEKEIALLKAQHEQYVAEAEEKLQRARLLVESVRKEKVDLSNQLEEERRKVEDLQFRVEEESITKGDLETQTQLEHARIGELEQSLLLEKAQAERLLRELADNRLTTVAEKSRVLQLEEELTLRRGEIEELQQCLLHSGPPPPDHPDAAEILRLRERLLSASKEHQRESGVLRDKYEKALKAYQAEVDKLRAANEKYAQEVAGLKDKVQQATSENMGLMDNWKSKLDSLASDHQKSLEDLKATLNSGPGAQQKEIGELKAVMEGIKMEHQLELGNLQAKHDLETAMHVKEKEALREKLQEAQEELAGLQRHWRAQLEVQASQHRLELQEAQDQRRDAELRVHELEKLDVEYRGQAQAIEFLKEQISLAEKKMLDYERLQRAEAQGKQEVESLREKLLVAENRLQAVEALCSSQHTHMIESNDISEETIRTKETVEGLQDKLNKRDKEVTALTSQTEMLRAQVSALESKCKSGEKKVDALLKEKRRLEAELETVSRKTHDASGQLVLISQELLRKERSLNELRVLLLEANRHSPGPERDLSREVHKAEWRIKEQKLKDDIRGLREKLTGLDKEKSLSDQRRYSLIDRSSAPELLRLQHQLMSTEDALRDALDQAQQVEKLMEAMRSCPDKAQTIGNSGSANGIHQQDKAQKQEDKH

SEQ ID NO: 35754 - protein, 65 aa, Artificial Sequence
  Synthetic polypeptide
GQMQWFMPVISALWEAEAGGSPEEGGGSAVPRGGGVHHQGRPGADHSGREVARAAAGGGAHPAPR

SEQ ID NO: 35755 - protein, 585 aa, Artificial Sequence
  Synthetic polypeptide
SQHFGRPRQADHLRKVEDLQFRVEEESITKGDLELTTVAEKSRVLQLEEELTLRRGEIEELQQCLLHSGPPPPDHPDAAEILRLRERLLSASKEHQRESGVLRDKYEKALKAYQAEVDKLRAANEKYAQEVAGLKDKVQQATSENMGLMDNWKSKLDSLASDHQKSLEDLKATLNSGPGAQQKEIGELKAVMEGIKMEHQLELGNLQAKHDLETAMHVKEKEALREKLQEAQEELAGLQRHWRAQLEVQASQHRLELQEAQDQRRDAELRVHELEKLDVEYRGQAQAIEFLKEQISLAEKKMLDYERLQRAEAQGKQEVESLREKLLVAENRLQAVEALCSSQHTHMIESNDISEETIRTKETVEGLQDKLNKRDKEVTALTSQTEMLRAQVSALESKCKSGEKKVDALLKEKRRLEAELETVSRKTHDASGQLVLISQELLRKERSLNELRVLLLEANRHSPGPERDLSREVHKAEWRIKEQKLKDDIRGLREKLTGLDKEKSLSDQRRYSLIDRSSAPELLRLQHQLMSTEDALRDALDQAQQVEKLMEAMRSCPDKAQTIGNSGSANGIHQQDKAQKQEDKH

SEQ ID NO: 35756 - protein, 100 aa, Artificial Sequence
  Synthetic polypeptide
GQMQWFMPVISALWEAEAGGSPEEGGGSAVPRGGGVHHQGRPGDPDAAGARAHWGAGTEPATGEGAGRAAAPRISGQQADHSGREVARAAAGGGAHPAPR

SEQ ID NO: 35757 - protein, 620 aa, Artificial Sequence
  Synthetic polypeptide
SQHFGRPRQADHLRKVEDLQFRVEEESITKGDLETQTQLEHARIGELEQSLLLEKAQAERLLRELADNRLTTVAEKSRVLQLEEELTLRRGEIEELQQCLLHSGPPPPDHPDAAEILRLRERLLSASKEHQRESGVLRDKYEKALKAYQAEVDKLRAANEKYAQEVAGLKDKVQQATSENMGLMDNWKSKLDSLASDHQKSLEDLKATLNSGPGAQQKEIGELKAVMEGIKMEHQLELGNLQAKHDLETAMHVKEKEALREKLQEAQEELAGLQRHWRAQLEVQASQHRLELQEAQDQRRDAELRVHELEKLDVEYRGQAQAIEFLKEQISLAEKKMLDYERLQRAEAQGKQEVESLREKLLVAENRLQAVEALCSSQHTHMIESNDISEETIRTKETVEGLQDKLNKRDKEVTALTSQTEMLRAQVSALESKCKSGEKKVDALLKEKRRLEAELETVSRKTHDASGQLVLISQELLRKERSLNELRVLLLEANRHSPGPERDLSREVHKAEWRIKEQKLKDDIRGLREKLTGLDKEKSLSDQRRYSLIDRSSAPELLRLQHQLMSTEDALRDALDQAQQVEKLMEAMRSCPDKAQTIGNSGSANGIHQQDKAQKQEDKH

SEQ ID NO: 35758 - protein, 579 aa, Artificial Sequence
  Synthetic polypeptide
SQHFGRLRKVEDLQFRVEEESITKGDLELTTVAEKSRVLQLEEELTLRRGEIEELQQCLLHSGPPPPDHPDAAEILRLRERLLSASKEHQRESGVLRDKYEKALKAYQAEVDKLRAANEKYAQEVAGLKDKVQQATSENMGLMDNWKSKLDSLASDHQKSLEDLKATLNSGPGAQQKEIGELKAVMEGIKMEHQLELGNLQAKHDLETAMHVKEKEALREKLQEAQEELAGLQRHWRAQLEVQASQHRLELQEAQDQRRDAELRVHELEKLDVEYRGQAQAIEFLKEQISLAEKKMLDYERLQRAEAQGKQEVESLREKLLVAENRLQAVEALCSSQHTHMIESNDISEETIRTKETVEGLQDKLNKRDKEVTALTSQTEMLRAQVSALESKCKSGEKKVDALLKEKRRLEAELETVSRKTHDASGQLVLISQELLRKERSLNELRVLLLEANRHSPGPERDLSREVHKAEWRIKEQKLKDDIRGLREKLTGLDKEKSLSDQRRYSLIDRSSAPELLRLQHQLMSTEDALRDALDQAQQVEKLMEAMRSCPDKAQTIGNSGSANGIHQQDKAQKQEDKH

SEQ ID NO: 35759 - protein, 58 aa, Artificial Sequence
  Synthetic polypeptide
WARRLTPVIPALWEAEEGGGSAVPRGGGVHHQGRPGADHSGREVARAAAGGGAHPAPR

SEQ ID NO: 35760 - protein, 614 aa, Artificial Sequence
  Synthetic polypeptide
SQHFGRLRKVEDLQFRVEEESITKGDLETQTQLEHARIGELEQSLLLEKAQAERLLRELADNRLTTVAEKSRVLQLEEELTLRRGEIEELQQCLLHSGPPPPDHPDAAEILRLRERLLSASKEHQRESGVLRDKYEKALKAYQAEVDKLRAANEKYAQEVAGLKDKVQQATSENMGLMDNWKSKLDSLASDHQKSLEDLKATLNSGPGAQQKEIGELKAVMEGIKMEHQLELGNLQAKHDLETAMHVKEKEALREKLQEAQEELAGLQRHWRAQLEVQASQHRLELQEAQDQRRDAELRVHELEKLDVEYRGQAQAIEFLKEQISLAEKKMLDYERLQRAEAQGKQEVESLREKLLVAENRLQAVEALCSSQHTHMIESNDISEETIRTKETVEGLQDKLNKRDKEVTALTSQTEMLRAQVSALESKCKSGEKKVDALLKEKRRLEAELETVSRKTHDASGQLVLISQELLRKERSLNELRVLLLEANRHSPGPERDLSREVHKAEWRIKEQKLKDDIRGLREKLTGLDKEKSLSDQRRYSLIDRSSAPELLRLQHQLMSTEDALRDALDQAQQVEKLMEAMRSCPDKAQTIGNSGSANGIHQQDKAQKQEDKH

SEQ ID NO: 35761 - protein, 93 aa, Artificial Sequence
  Synthetic polypeptide
WARRLTPVIPALWEAEEGGGSAVPRGGGVHHQGRPGDPDAAGARAHWGAGTEPATGEGAGRAAAPRISGQQADHSGREVARAAAGGGAHPAPR

SEQ ID NO: 35762 - protein, 96 aa, Artificial Sequence
  Synthetic polypeptide
PVQRQDEPIQDKEKSLSDQRRYSLIDRSSAPELLRLQHQLMSTEDALRDALDQAQQVEKLMEAMRSCPDKAQTIGNSGSANGIHQQDKAQKQEDKH

SEQ ID NO: 35763 - protein, 46 aa, Artificial Sequence
  Synthetic polypeptide
KENFLSDLSRGRMSQYRTKRNPCRIRGATPSSTGPRRPSFCGCSTS

SEQ ID NO: 35764 - protein, 61 aa, Artificial Sequence
  Synthetic polypeptide
ANTGQREIPVGSEALLPHRPVLGARASAAAAPADEHGGRPAGCAGPGSAGGEADGGHEELP

SEQ ID NO: 35765 - protein, 123 aa, Artificial Sequence
  Synthetic polypeptide
SSRFPNLHPYCPCPGSSHCHLSPRNSPRLATVSLLPDQLSTPALQPRARPWEGPVWCHCPMRGCSGSQGCWPCRGCPKAWPSEGQPSMTPRPSWPSWNTATASASSSRGHLRMAGGTRRPWWS

SEQ ID NO: 35766 - protein, 60 aa, Artificial Sequence
  Synthetic polypeptide
PAVFQTSTPTVPALAQVTATSRLEIAPGLPRSPCFQTSSLHLPCNQGRGPGKGQCGATAL

SEQ ID NO: 35767 - protein, 840 aa, Artificial Sequence
  Synthetic polypeptide
PQACHGLPASRPALYTCPATKGEALGRASVVPLPYERLLREPGLLAVQGLPEGLAFRRPAEYDPKALMAILEHSHRIRFKLKRPLEDGGRDSKALVELNGVSLIPKGSRDCGLHGQAPKVPPQDLPPTATSSSMASFLYSTALPNHAIRELKQEAPSCPLAPSDLGLSRPMPEPKATGAQDFSDCCGQKPTGPGGPLIQNVHASKRILFSIVHDKSEKWDAFIKETEDINTLRECVQILFNSRYAEALGLDHMVPVPYRKIACDPEAVEIVGIPDKIPFKRPCTYGVPKLKRILEERHSIHFIIKRMFDERIFTGNKFTKDTTKLEPASPPEDTSAEVSRATVLDLAGNARSDKGSMSEDCGPGTSGELGGLRPIKIEPEDLDIIQVTVPDPSPTSEEMTDSMPGHLPSEDSGYGMEMLTDKGLSEDARPEERPVEDSHGDVIRPLRKQVELLFNTRYAKAIGISEPVKVPYSKFLMHPEELFVVGLPEGISLRRPNCFGIAKLRKILEASNSIQFVIKRPELLTEGVKEPIMDSQGTASSLGFSPPALPPERDSGDPLVDESLKRQGFQENYDARLSRIDIANTLREQVQDLFNKKYGEALGIKYPVQVPYKRIKSNPGSVIIEGLPPGIPFRKPCTFGSQNLERILAVADKIKFTVTRPFQGLIPKPDEDDANRLGEKVILREQVKELFNEKYGEALGLNRPVLVPYKLIRDSPDAVEVTGLPDDIPFRNPNTYDIHRLEKILKAREHVRMVIINQLQPFAEICNDAKVPAKDSSIPKRKRKRVSEGNSVSSSSSSSSSSSSNPDSVASANQISLVQWPMYMVDYAGLNVQLPGPLNY

SEQ ID NO: 35768 - protein, 825 aa, Artificial Sequence
  Synthetic polypeptide
PQACHGLPASRPALYTCPATKGEALGRASVVPLPYERLLREPGLLAVQGLPEGLAFRRPAEYDPKALMAILEHSHRIRFKLKRPLEDGGRDSKALVELNGVSLIPKGSRDCGLHGQAPKVPPQDLPPTATSSSMASFLYSTALPNHAIRELKQEAPSCPLAPSDLGLSRPMPEPKATGAQDFSDCCGQKPTGPGGPLIQNVHASKRILFSIVHDKSEKWDAFIKETEDINTLRECVQILFNSRYAEALGLDHMVPVPYRKIACDPEAVEIVGIPDKIPFKRPCTYGVPKLKRILEERHSIHFIIKRMFDERIFTGNKFTKDTTKLEPASPPEDTSAEVSRATVLDLAGNARSDKGSMSEDCGPGTSGELGGLRPIKIEPEDLDIIQVTVPDPSPTSEEMTDSMPGHLPSEDSGYGMEMLTDKGLSEDARPEERPVEDSHGDVIRPLRKQVELLFNTRYAKAIGISEPVKVPYSKFLMHPEELFVVGLPEGISLRRPNCFGIAKLRKILEASNSIQFVIKRPELLTEGVKEPIMDSQERDSGDPLVDESLKRQGFQENYDARLSRIDIANTLREQVQDLFNKKYGEALGIKYPVQVPYKRIKSNPGSVIIEGLPPGIPFRKPCTFGSQNLERILAVADKIKFTVTRPFQGLIPKPDEDDANRLGEKVILREQVKELFNEKYGEALGLNRPVLVPYKLIRDSPDAVEVTGLPDDIPFRNPNTYDIHRLEKILKAREHVRMVIINQLQPFAEICNDAKVPAKDSSIPKRKRKRVSEGNSVSSSSSSSSSSSSNPDSVASANQISLVQWPMYMVDYAGLNVQLPGPLNY

SEQ ID NO: 35769 - protein, 841 aa, Artificial Sequence
  Synthetic polypeptide
PQACHGLPASRPALYTCPATKGEALGRASVVPLPYERLLREPGLLAVQGLPEGLAFRRPAEYDPKALMAILEHSHRIRFKLKRPLEDGGRDSKALVELNGVSLIPKGSRDCGLHGQAPKVPPQDLPPTATSSSMASFLYSTALPNHAIRELKQEAPSCPLAPSDLGLSRPMPEPKATGAQDFSDCCGQKPTGPGGPLIQNVHASKRILFSIVHDKSEKWDAFIKETEDINTLRECVQILFNSRYAEALGLDHMVPVPYRKIACDPEAVEIVGIPDKIPFKRPCTYGVPKLKRILEERHSIHFIIKRMFDERIFTGNKFTKDTTKLEPASPPEDTSAEVSRATVLDLAGNARSDKGSMSEDCGPGTSGELGGLRPIKIEPEDLDIIQVTVPDPSPTSEEMTDSMPGHLPSEDSGYGMEMLTDKGLSEDARPEERPVEDSHGDVIRPLRKQVELLFNTRYAKAIGISEPVKVPYSKFLMHPEELFVVGLPEGISLRRPNCFGIAKLRKILEASNSIQFVIKRPELLTEGVKEPIMDSQERDSGDPLVDESLKRQGFQENYDARLSRIDIANTLREQVQDLFNKKYGEALGIKYPVQVPYKRIKSNPGSVIIEGLPPGIPFRKPCTFGSQNLERILAVADKIKFTVTRPFQGLIPKPDEDDANRLGEKVILREQVKELFNEKYGEALGLNRPVLVPYKLIRDSPDAVEVTGLPDDIPFRNPNTYDIHRLEKILKAREHVRMVIINQLQPFAEICNDAKVPAKDSSIPKRKRKRVSEGNSVSSSSSSSSSSSSNPDSVASANQISLVVKLHRFGLRHSSLWPSPLCLAGPSTLGCGPRGRGGTGL

SEQ ID NO: 35770 - protein, 193 aa, Artificial Sequence
  Synthetic polypeptide
HFGRLRRANHLRSGVRDQPGQRDEDDANRLGEKVILREQVKELFNEKYGEALGLNRPVLVPYKLIRDSPDAVEVTGLPDDIPFRNPNTYDIHRLEKILKAREHVRMVIINQLQPFAEICNDAKVPAKDSSIPKRKRKRVSEGNSVSSSSSSSSSSSSNPDSVASANQISLVQWPMYMVDYAGLNVQLPGPLNY

SEQ ID NO: 35771 - protein, 22 aa, Artificial Sequence
  Synthetic polypeptide
DQEFETSLANVMKMTPTDSGRR

SEQ ID NO: 35772 - protein, 209 aa, Artificial Sequence
  Synthetic polypeptide
HFGRLRRANHLRSGVRDQPGQRDEDDANRLGEKVILREQVKELFNEKYGEALGLNRPVLVPYKLIRDSPDAVEVTGLPDDIPFRNPNTYDIHRLEKILKAREHVRMVIINQLQPFAEICNDAKVPAKDSSIPKRKRKRVSEGNSVSSSSSSSSSSSSNPDSVASANQISLVVKLHRFGLRHSSLWPSPLCLAGPSTLGCGPRGRGGTGL

SEQ ID NO: 35773 - protein, 146 aa, Artificial Sequence
  Synthetic polypeptide
HFGRLRRANHLRSGVRDQPGQRDEDDANRLGEKVILREQVKELFNEKYGEALGLNRPVLVPYKLIRDSPDAVEVTGLPDDIPFRNPNTYDIHRLEKILKAREHVRMVIINQLQPFAEICNDAKVPAKDSSIPKRKRKRVSEGNSVS

SEQ ID NO: 35774 - protein, 26 aa, Artificial Sequence
  Synthetic polypeptide
GQAQWLTPVIPTLWEAERPGMPKSRT

SEQ ID NO: 35775 - protein, 21 aa, Artificial Sequence
  Synthetic polypeptide
SQHFGRPRGLECQNHGPKTES

SEQ ID NO: 35776 - protein, 291 aa, Artificial Sequence
  Synthetic polypeptide
PGAVAHACNPNTLGGREAWNAKITDLKQKVENLFNEKCGEALGLKQAVKVPFALFESFPEDFYVEGLPEGVPFRRPSTFGIPRLEKILRNKAKIKFIIKKPEMFETAIKESTSSKSPPRKINSSPNVNTTASGVEDLNIIQVTIPDDDNERLSKVEKARQLREQVNDLFSRKFGEAIGMGFPVKVPYRKITINPGCVVVDGMPPGVSFKAPSYLEISSMRRILDSAEFIKFTVIRPFPGLVINNQLVDQSESEGPVIQESAEPSQLEVPATEEIKETDGSSQIKQEPDPTW

SEQ ID NO: 35777 - protein, 41 aa, Artificial Sequence
  Synthetic polypeptide
SQLLRRLRQENCLNSGGGGCSEQRSHHCPPAWRPGMPKSRT

SEQ ID NO: 35778 - protein, 32 aa, Artificial Sequence
  Synthetic polypeptide
TQEVEVAVSRDRTIALQPGGLECQNHGPKTES

SEQ ID NO: 35779 - protein, 285 aa, Artificial Sequence
  Synthetic polypeptide
AEIAPLPSSLEAWNAKITDLKQKVENLFNEKCGEALGLKQAVKVPFALFESFPEDFYVEGLPEGVPFRRPSTFGIPRLEKILRNKAKIKFIIKKPEMFETAIKESTSSKSPPRKINSSPNVNTTASGVEDLNIIQVTIPDDDNERLSKVEKARQLREQVNDLFSRKFGEAIGMGFPVKVPYRKITINPGCVVVDGMPPGVSFKAPSYLEISSMRRILDSAEFIKFTVIRPFPGLVINNQLVDQSESEGPVIQESAEPSQLEVPATEEIKETDGSSQIKQEPDPTW

SEQ ID NO: 35780 - protein, 76 aa, Artificial Sequence
  Synthetic polypeptide
SLPETQLHPYYPWLLSCHSEPFPGLVINNQLVDQSESEGPVIQESAEPSQLEVPATEEIKETDGSSQIKQEPDPTW

SEQ ID NO: 35781 - protein, 43 aa, Artificial Sequence
  Synthetic polypeptide
RVGKLGLFAKFRLPPIFRVFLKHSYTRIIHGCFPVTVNHFQDL

SEQ ID NO: 35782 - protein, 62 aa, Artificial Sequence
  Synthetic polypeptide
AKIVPLHSSLGNRKEILSQKNKHTKKNKKKSAEPSQLEVPATEEIKETDGSSQIKQEPDPTW

SEQ ID NO: 35783 - protein, 117 aa, Artificial Sequence
  Synthetic polypeptide
TGRGGSRLLSQHFGRLRRVDHLRSGVRDQPGQHGATPSLLRIQKLARRGGVCRLLRRLRQENRLSLGGGGRSEPRSCHCTPAWATERRFCLKKTNIRRKTKKNQLNQASWKFQPQKK

SEQ ID NO: 35784 - protein, 40 aa, Artificial Sequence
  Synthetic polypeptide
AWEAEVAVSQDRATALQPGQQKGDSVSKKQTYEEKQKKIS

SEQ ID NO: 35785 - protein, 926 aa, Artificial Sequence
  Synthetic polypeptide
SHIITRRRRRCKELAKSKAEVACIAVYETDVFVVGTERGCAFVNARTDFQKDFAKYCVAEGLCEVKPPCPVNGMQVHSGETEILRKAVEDYFCFCYGKALGTTVMVPVPYEKMLRDQSAVVVQGLPEGVAFQHPENYDLATLKWILENKAGISFIINRPFLGPESQLGGPGMVTDAERSIVSPSESCGPINVKTEPMEDSGISLKAEAVSVKKESEDPNYYQYNMQGSHPSSTSNEVIEMELPMEDSTPLVPSEEPNEDPEAEVKIEGNTNSSSVTNSAAGVEDLNIVQVTVPDNEKERLSSIEKIKQLREQVNDLFSRKFGEAIGVDFPVKVPYRKITFNPGCVVIDGMPPGVVFKAPGYLEISSMRRILEAAEFIKFTVIRPLPGLELSNVGKRKIDQEGRVFQEKWERAYFFVEVQNIPTCLICKQSMSVSKEYNLRRHYQTNHSKHYDQYMERMRDEKLHELKKGLRKYLLGLSDTECPEQKQVFAHPSPTQKSPVQPVEDLAGNLWEKLREKIRSFVAYSIAIDEITDINNTTQLAIFIRGVDENFDVSEELLDTVPMTGTKSGNEIFSRVEKSLKKFCIDWSKLVSVASTGTPAMVDANNGLVTKLKSRVATFCKGAELKSICCIIHPESLCAQKLKMDHVMDVVVKSVNWICSRGLNHSEFTTLLYELDSQYGSLLYYTEIKWLSRGLVLKRFFESLEEIDSFMSSRGKPLPQLSSIDWIRDLAFLVDMTMHLNALNISLQGHSQIVTQMYDLIRAFLAKLCLWETHLTRNNLAHFPTLKLASRNESDGLNYIPKIAELKTEFQKRLSDFKLYESELTLFSSPFSTKIDSVHEELQMEVIDLQCNTVLKTKYDKVGIPEFYKYLWGSYPKYKHHCAKILSMFGSTYICEQLFSIMKLSKTKYCSQLKDSQWDSVLHIAT

SEQ ID NO: 35786 - protein, 64 aa, Artificial Sequence
  Synthetic polypeptide
LTSLQEEEEGVKNWPSPRQKWPASQCTKQTCLSSEPREDALLLMPGRIFRKILQNTALQRDCVR

SEQ ID NO: 35787 - protein, 10 aa, Artificial Sequence
  Synthetic polypeptide
SHHYKKKKKV

SEQ ID NO: 35788 - protein, 414 aa, Artificial Sequence
  Synthetic polypeptide
SHIITRRRRRCKELAKSKAEVACIAVYETDVFVVGTERGCAFVNARTDFQKDFAKYCVAEGLCEVKPPCPVNGMQVHSGETEILRKAVEDYFCFCYGKALGTTVMVPVPYEKMLRDQSAVVVQGLPEGVAFQHPENYDLATLKWILENKAGISFIINRPFLGPESQLGGPGMVTDAERSIVSPSESCGPINVKTEPMEDSGISLKAEAVSVKKESEDPNYYQYNMQGSHPSSTSNEVIEMELPMEDSTPLVPSEEPNEDPEAEVKIEGNTNSSSVTNSAAGVEDLNIVQVTVPDNEKERLSSIEKIKQLREQVNDLFSRKFGEAIGVDFPVKVPYRKITFNPGCVVIDGMPPGVVFKAPGYLEISSMRRILEAAEFIKFTVIRPLPGLELSNGLLEAKARGLLEARSLRPAWAT

SEQ ID NO: 35789 - protein, 203 aa, Artificial Sequence
  Synthetic polypeptide
SHIITRRRRRCKELAKSKAEVACIAVYETDVFVVGTERGCAFVNARTDFQKDFAKYCVAEGLCEVKPPCPVNGMQVHSGETEILRKAVEDYFCFCYGKALGTTVMVPVPYEKMLRDQSAVVVQGLPEGVAFQHPENYDLATLKWILENKAGISFIINRPFLGPESQLGGPGMVTDAERSIVSPSERHFTESRSCLSQERIRRS

SEQ ID NO: 35790 - protein, 85 aa, Artificial Sequence
  Synthetic polypeptide
SHIITRRRRRCKELAKSKAEVACIAVYETDVFVVGTERGCAFVNARTDFQKDFAKYCRCFNFILCIPNLKRIAGKTSTVFSSKLS

SEQ ID NO: 35791 - protein, 85 aa, Artificial Sequence
  Synthetic polypeptide
LTSLQEEEEGVKNWPSPRQKWPASQCTKQTCLSSEPREDALLLMPGRIFRKILQNTVGVLILSFVFPISKGSQARLPQYFLLSYH

SEQ ID NO: 35792 - protein, 129 aa, Artificial Sequence
  Synthetic polypeptide
LSPLPSNSCVTWGGYRTCGTPRTNGYPWNRESRGTGNPRSYWSTWSTRARRTGLTWFQGRSRPNGTYRPSRTSGNWSTRSKGRARLNRAPRTTRSTRRRWSCREEGRSGASGSKRPRRTTWKRTAWPQG

SEQ ID NO: 35793 - protein, 693 aa, Artificial Sequence
  Synthetic polypeptide
PGGDIGPVGPQGPMGIPGIGSQGEQGIQGPIGPPGPQGPAGQGLPGSKGEVGQMGPTGPRGPVGIGVQGPKGEPGSIGLPGQPGVPGEDGAAGKKGEAGLPGARGPEGPPGKGQPGPKGDEGKKGSKGNQGQRGLPGPEGPKGEPGIMGPFGMPGTSIPGPPGPKGDRGGPGIPGFKGEPGLSIRGPKGVQGPRGPVGAPGLKGDGYPGVPGPRGLPGPPGPMGLRGVGDTGAKGEPGVRGPPGPSGPRGVGTQGPKGDTGQKGLPGPPGPPGYGSQGIKGEQGPQGFPGPKGTMGHGLPGQKGEHGERGDVGKKGDKGEIGEPGSPGKQGLQGPKGDLGLTKEEIIKLITEICGCGPKCKETPLELVFVIDSSESVGPENFQIIKNFVKTMADRVALDLATARIGIINYSHKVEKVANLKQFSSKDDFKLAVDNMQYLGEGTYTATALQAANDMFEDARPGVKKVALVITDGQTDSRDKEKLTEVVKNASDTNVEIFVIGVVKKNDPNFEIFHKEMNLIATDPEHVYQFDDFFTLQDTLKQKLFQKICEDFDSYLVQIFGSSSPQPGFGMSGEELSESTPEPQKEISESLSVTRDQDEDDKAPEPTWADDLPATTSSEATTTPRPLLSTPVDGAEDPRCLEALKPGNCGEYVVRWYYDKQVNSCARFWFSGCNGSGNRFNSEKECQETCIQG

SEQ ID NO: 35794 - protein, 8 aa, Artificial Sequence
  Synthetic polypeptide
QLRDLGGI

SEQ ID NO: 35795 - protein, 26 aa, Artificial Sequence
  Synthetic polypeptide
MLKGRDFPIHSCVLLAPGRICWSSNH

SEQ ID NO: 35796 - protein, 57 aa, Artificial Sequence
  Synthetic polypeptide
LCALSAWQNLLEQQPLRPSHLQRHPASYPRWVYHSQGRQGCSPAPPLTPNPRPLCWG

SEQ ID NO: 35797 - protein, 641 aa, Artificial Sequence
  Synthetic polypeptide
RLAESAGAATTEALSPPKTPSLLPPLGLSQSGPPGLLPSPSFDSKPPTTLLGLIPAPSMVPATDTKAPPTLQAETATKPQATSAPSPAPKQSFLFGTQNTSPSSPAAPAASSASPMFKPIFTAPPKSEKEGPTPPGPSVTATAPSSSSLPTTTSTTAPTFQPVFSSMGPPASVPLPAPFFKQTTTPATAPTTTAPLFTGLASATSAVAPITSASPSTDSASKPAFGFGINSVSSSSVSTTTSTATAASQPFLFGAPQASAASFTPAMGSIFQFGKPPALPTTTTVTTFSQSLPTAVPTATSSSAADFSGFGSTLATSAPATSSQPTLTFSNTSTPTFNIPFGSSAKSPLPSYPGANPQPAFGAAEGQPPGAAKPALTPSFGSSFTFGNSAAPAPATAPTPAPASTIKIVPAHVPTPIQPTFGGATHSAFGLKATASAFGAPASSQPAFGGSTAVFSFGAATSSGFGATTQTASSGSSSSVFGSTTPSPFTFGGSAAPAGSGSFGINVATPGSSATTGAFSFGAGQSGSTATSTPFTGGLGQNALGTTGQSTPFAFNVGSTTESKPVFGGTATPTFGQNTPAPGVGTSGSSLSFGASSAPAQGFVGVGPFGSAAPSFSIGAGSKTPGARQRLQARRQHTRKK

SEQ ID NO: 35798 - protein, 65 aa, Artificial Sequence
  Synthetic polypeptide
ECCLHQAYALVDLLCQREQLCGKDEENGEEHHRVLRLPDGDCRGVCQPPVQGRPPLRDARHVSGP

SEQ ID NO: 35799 - protein, 23 aa, Artificial Sequence
  Synthetic polypeptide
MLSSSSLRSSGPPLSERAALWKR

SEQ ID NO: 35800 - protein, 46 aa, Artificial Sequence
  Synthetic polypeptide
ECCLHQAYALVDLLCQREQLCGKDEENGEFPACLYSSQEASAPMGM

SEQ ID NO: 35801 - protein, 56 aa, Artificial Sequence
  Synthetic polypeptide
ECCLHQAYALVDLLCQREQLCGKDEENGEEHHRVLRLPDGDCRGVCQPPVQGRPPL

SEQ ID NO: 35802 - protein, 548 aa, Artificial Sequence
  Synthetic polypeptide
GCLGSLSALPLICYVALTSALQPTPLPFQELRLVGGPSRCRGRLEVMHGGSWGSVCDDDWDVVDANVVCRQLGCGLALPVPRPLAFGQGRGPILLDNVECRGQEAALSECGSRGWGVHNCFHYEDVAVLCDEFLPTQPPTRKMLTSRAPPTTLPNGKSEGSVRLVGGANLCQGRVEILHSGLWGTVCDDDWGLPDAAVVCRQLGCGAAMAATTNAFFGYGTGHILLDNVHCEGGEPRLAACQSLGWGVHNCGHHEDAGALCAGLGPPTLTALPSSATREDWAWQTDPSATGVGPQPSRETALLTTAAWAAGKKSGRLRLVGGPGPCRGRVEVLHAGGWGTVCDDDWDFADARVACREAGCGPALGATGLGHFGYGRGPVLLDNVGCAGTEARLSDCFHLGWGQHNCGHHEDAGALCAGPEELGLQVQQDGSETTRVPTPRPRDGHLRLVNGAHRCEGRVELYLGQRWGTVCDDAWDLRAAGVLCRQLGCGQALAAPGEAHFGPGRGPILLDNVKCRGEESALLLCSHIRWDAHNCDHSEDASVLCQPS

SEQ ID NO: 35803 - protein, 51 aa, Artificial Sequence
  Synthetic polypeptide
SLSSTLDLLRGPDQRPTAHSTALSRAEAGGGPQPLPGPPGSHARWLLGQRL

SEQ ID NO: 35804 - protein, 30 aa, Artificial Sequence
  Synthetic polypeptide
NPVSAKLARVEPAILRRPYSPYWWSVRRPL

SEQ ID NO: 35805 - protein, 7 aa, Artificial Sequence
  Synthetic polypeptide
PGWSQPS

SEQ ID NO: 35806 - protein, 398 aa, Artificial Sequence
  Synthetic polypeptide
ISQGGASHPETSVQPVLVECQEATLMVMVSKDLFGTGKLIRAADLTLGPEACEPLVSMDTEDVVRFEVGLHECGNSMQVTDDALVYSTFLLHDPRPVGNLSIVRTNRAEIPIECRYPRQGNVSSQAILPTWLPFRTTVFSEEKLTFSLRLMEENWNAEKRSPTFHLGDAAHLQAEIHTGSHVPLRLFVDHCVATPTPDQNASPYHTIVDFHGCLVDGLTDASSAFKVPRPGPDTLQFTVDVFHFANDSRNMIYITCHLKVTLAEQDPDELNKACSFSKPSNSWFPVEGSADICQCCNKGDCGTPSHSRRQPHVMSQWSRSASRNRRHVTEEADVTVGPLIFLDRRGDHEVEQWALPSDTSVVLLGVGLAVVVSLTLTAVILVLTRRCRTASHPVSASE

SEQ ID NO: 35807 - protein, 46 aa, Artificial Sequence
  Synthetic polypeptide
DQLGQYAVLSTVSLMPLLHSKFLDPGQIHSSSQWMSSTLLMTPETC

SEQ ID NO: 35808 - protein, 18 aa, Artificial Sequence
  Synthetic polypeptide
AQEFETNLGNMLSCRRSH

SEQ ID NO: 35809 - protein, 59 aa, Artificial Sequence
  Synthetic polypeptide
EAETRGMREPRSLRPTWAICCLVDGLTDASSAFKVPRPGPDTLQFTVDVFHFANDSRNM

SEQ ID NO: 35810 - protein, 45 aa, Artificial Sequence
  Synthetic polypeptide
DQLGQYAVLSTVSLMPLLHSKFLDPGQIHSSSQWMSSTLLMTPET

SEQ ID NO: 35811 - protein, 131 aa, Artificial Sequence
  Synthetic polypeptide
EAETRGMREPRSLRPTWAICCLVDGLTDASSAFKVPRPGPDTLQFTVDVFHFANDSRNMIYITCHLKVTLAEQDPDELNKACSFSKPSNSWFPVEGLADICQCCNKGDCGTPSHSRRQPRVVSQWSTSASL

SEQ ID NO: 35812 - protein, 143 aa, Artificial Sequence
  Synthetic polypeptide
EAETRGMREPRSLRPTWAICCLVDGLTDASSAFKVPRPGPDTLQFTVDVFHFANDSRNMIYITCHLKVTLAEQDPDELNKACSFSKPSNRQQKSKLLLFHLSWFPVEGLADICQCCNKGDCGTPSHSRRQPRVVSQWSTSASL

SEQ ID NO: 35813 - protein, 89 aa, Artificial Sequence
  Synthetic polypeptide
EAETRGMREPRSLRPTWAICCLVDGLTDASSAFKVPRPGPDTLQFTVDVFHFANDSRNMIYITCHLKVTLAEQDPDELNKACSFSKPSN

SEQ ID NO: 35814 - protein, 63 aa, Artificial Sequence
  Synthetic polypeptide
KHAAPPASLSLSLLLHHGQKRACFPFAFCRDCQLLEGSPAMLPVQPAKLYMLWENFLEPEWQR

SEQ ID NO: 35815 - protein, 81 aa, Artificial Sequence
  Synthetic polypeptide
VSAHGIWLFRSMQHLLLHSLCLSCSTMARNVPASPSPSAVIVSFLRAPQPCFLYSLQNFTCYGKTSWNQNGSVKSQVYLAA

SEQ ID NO: 35816 - protein, 131 aa, Artificial Sequence
  Synthetic polypeptide
GLPSHASCTACKTLHAMGKLPGTRMAALKAKYTLLHDAVMSTQESEVQLLQNAKRFTEQIQQQQFHLQQADNFPEAFSTEVSKMREQLLKYQNEYNAVKEREFHNQYRLNSLKEEKIIIVKEFEKITKPGV

SEQ ID NO: 35817 - protein, 916 aa, Artificial Sequence
  Synthetic polypeptide
GLPSHASCTACKTLHAMGKLPGTRMAALKAKYTLLHDAVMSTQESEVQLLQNAKRFTEQIQQQQFHLQQADNFPEAFSTEVSKMREQLLKYQNEYNAVKEREFHNQYRLNSLKEEKIIIVKEFEKITKPGEMEKKMKILRESTEELRKEIMQKKLEIKNLREDLASKQKQLLKEQKELEELLGHQVVLKDEVAHHQTIPVQIGKEIEKITRKKVEMEKKKIVLEQEVKTLNDSLKKVENKVSAIVDEKENVIKEVEGKRALLEIKEREHNQLVKLLELARENEATSLTERGILDLNLRNSLIDKQNYHDELSRKQREKERDFRNLRKMELLLKVSWDALRQTQALHQRLLLEMEAIPKDDSTLSERRRELHKEVEVAKRNLAQQKIISEMESKLVEQQLAEENKLLKEQENMKELVVNLLRMTQIKIDEKEQKSKDFLKAQQKYTNIVKEMKAKDLEIRIHKKKKCEIYRRLREFAKLYDTIRNERNKFVNLLHKAHQKVNEIKERHKMSLNELEILRNSAVSQERKLQNSMLKHANNVTIRESMQNDVRKIVSKLQEMKEKKEAQLNNIDRLANTITMIEEEMVQLRKRYEKAVQHRNESGVQLIEREEEICIFYEKINIQEKMKLNGEIEIHLLEEKIQFLKMKIAEKQRQICVTQKLLPAKRSLDADLAVLQIQFSQCTDRIKDLEKQFVKPDGENRARFLPGKDLTEKEMIQKLDKLELQLAKKEEKLLEKDFIYEQVSRLTDRLCSKTQGCKQDTLLLAKKMNGYQRRIKNATEKMMALVAELSMKQALTIELQKEVREKEDFIFTCNSRIEKGLPLNKEIEKEWLKVLRDEEMHALAIAEKSQEFLEADNRQLPNGVYTTAEQRPNAYIPEADATLPLPKPYGALAPFKPSEPGANMRHIRKPVIKPVEI

SEQ ID NO: 35818 - protein, 63 aa, Artificial Sequence; identical to SEQ ID NO: 35814
  Synthetic polypeptide

SEQ ID NO: 35819 - protein, 81 aa, Artificial Sequence; identical to SEQ ID NO: 35815
  Synthetic polypeptide

SEQ ID NO: 35820 - protein, 131 aa, Artificial Sequence; identical to SEQ ID NO: 35816
  Synthetic polypeptide

SEQ ID NO: 35821 - protein, 916 aa, Artificial Sequence; identical to SEQ ID NO: 35817
  Synthetic polypeptide

SEQ ID NO: 35822 - protein, 41 aa, Artificial Sequence
  Synthetic polypeptide
SQLLGRLRQENRLNLGGRGCSEPRSRHCTPAWATECFRKRL

SEQ ID NO: 35823 - protein, 839 aa, Artificial Sequence
  Synthetic polypeptide
TWEAEVAVSRDLATALQPGQQNVLENDYESLHVLNVERNGNIIYTYKDDKGNVVFGLYDCQTRQNELLYTFEKDLQVFSCSVNSERTLLAASLVQSTKEGKRNELQPGSKCLTLLVEIHPVNNVKVLKAVDSYIWVQFLYPHIESHPLPENHLLLISEEKYIEQFRIHVAQEDGNRVVIKNSGHLPRDRIAEDFVWAQWDMSEQRLYYIDLKKSRSILKCIQFYADESYNLMFEVPLDISLSNSGFKLVNFGCDYHQYRDKFSKHLTLCVFTNHTGSLCVCYSPKCASWGQITYSVFYIHKGHSKTFTTSLENVGSHMTKGITFLNLDYYVAVYLPGHFFHLLNVQHPDLICHNLFLTGNNEMIDMLPHCPLQSLSGSLVLDCCSGKLYRALLSQSSLLQLLQNTCLDCEKMAALHCALYCGQGAQFLEAQIIQWISENVSACHSFDLIQEFIIASSYWSVYSETSNMDKLLPHSSVLTWNTEIPGITLVTEDIALPLMKVLSFKGYWEKLNSNLEYVKYAKPHFHYNNSVVRREWHNLISEEKTGKRRSAAYVRNILDNAVKVISNLEARNLGPRLTPLLQEEDSHQRLLMGLMVSELKDHFLRHLQGVEKKKIEQMVLDYISKLLDLICHIVETNWRKHNLHSWVLHFNSRGSAAEFAVFHIMTRILEATNSLFLPLPPGFHTLHTILGVQCLPLHNLLHCIDSGVLLLTETAVIRLMKDLDNTEKNEKLKFSIIVRLPPLIGQKICRLWDHPMSSNIISRNHVTRLLQNYKKQPRNSMINKSSFSVEFLPLNYFIEILTDIESSNQALYPFEGHDNVDAEFVEEAALKHTAMLLGL

SEQ ID NO: 35824 - protein, 15 aa, Artificial Sequence
  Synthetic polypeptide
AEISPLHSSLGNRMF

SEQ ID NO: 35825 - protein, 16 aa, Artificial Sequence
  Synthetic polypeptide
PHRYPPCPAPAPAQMF

SEQ ID NO: 35826 - protein, 20 aa, Artificial Sequence
  Synthetic polypeptide
PTATRRARLRLRLRCFRKRL

SEQ ID NO: 35827 - protein, 831 aa, Artificial Sequence
  Synthetic polypeptide
PPLPAVPGSGSGSDVLENDYESLHVLNVERNGNIIYTYKDDKGNVVFGLYDCQTRQNELLYTFEKDLQVFSCSVNSERTLLAASLVQSTKEGKRNELQPGSKCLTLLVEIHPVNNVKVLKAVDSYIWVQFLYPHIESHPLPENHLLLISEEKYIEQFRIHVAQEDGNRVVIKNSGHLPRDRIAEDFVWAQWDMSEQRLYYIDLKKSRSILKCIQFYADESYNLMFEVPLDISLSNSGFKLVNFGCDYHQYRDKFSKHLTLCVFTNHTGSLCVCYSPKCASWGQITYSVFYIHKGHSKTFTTSLENVGSHMTKGITFLNLDYYVAVYLPGHFFHLLNVQHPDLICHNLFLTGNNEMIDMLPHCPLQSLSGSLVLDCCSGKLYRALLSQSSLLQLLQNTCLDCEKMAALHCALYCGQGAQFLEAQIIQWISENVSACHSFDLIQEFIIASSYWSVYSETSNMDKLLPHSSVLTWNTEIPGITLVTEDIALPLMKVLSFKGYWEKLNSNLEYVKYAKPHFHYNNSVVRREWHNLISEEKTGKRRSAAYVRNILDNAVKVISNLEARNLGPRLTPLLQEEDSHQRLLMGLMVSELKDHFLRHLQGVEKKKIEQMVLDYISKLLDLICHIVETNWRKHNLHSWVLHFNSRGSAAEFAVFHIMTRILEATNSLFLPLPPGFHTLHTILGVQCLPLHNLLHCIDSGVLLLTETAVIRLMKDLDNTEKNEKLKFSIIVRLPPLIGQKICRLWDHPMSSNIISRNHVTRLLQNYKKQPRNSMINKSSFSVEFLPLNYFIEILTDIESSNQALYPFEGHDNVDAEFVEEAALKHTAMLLGL

SEQ ID NO: 35828 - protein, 670 aa, Artificial Sequence
  Synthetic polypeptide
GRVGWLMPVIPALWEAEIIVMACREFEMGRKKCERYWPLYGEDPITFAPFKISCEDEQARTDYFIRTLLLEFQNESRRLYQFHYVNWPDHDVPSSFDSILDMISLMRKYQEHEDVPICIHCSAGCGRTGAICAIDYTWNLLKAGKIPEEFNVFNLIQEMRTQRHSAVQTKEQYELVHRAIAQLFEKQLQLYEIHGAQKIADGVNEINTENMVSSIEPEKQDSPPPKPPRTRSCLVEGDAKEEILQPPEPHPVPPILTPSPPSAFPTVTTVWQDNDRYHPKPVLHMVSSEQHSADLNRNYSKSTELPGKNESTIEQIDKKLERNLSFEIKKVPLQEGPKSFDGNTLLNRGHAIKIKSASPCIADKISKPQELSSDLNVGDTSQNSCVDCSVTQSNKVSVTPPEESQNSDTPPRPDRLPLDEKGHVTWSFHGPENAIPIPDLSEGNSSDINYQTRKTVSLTPSPTTQVETPDLVDHDNTSPLFRTPLSFTNPLHSDDSDSDERNSDGAVTQNKTNISTASATVSAATSTESISTRKVLPMSIARHNIAGTTHSGAEKDVDVSEDSPPPLPERTPESFVLASEHNTPVRSEWSELQSQERSEQKKSEGLITSENEKCDHPAGGIHYEMCIECPPTFSDKREQISENPTEATDIGFGNRCGKPKGPRDPPSEWT

SEQ ID NO: 35829 - protein, 10 aa, Artificial Sequence
  Synthetic polypeptide
SQHFGRPRSL

SEQ ID NO: 35830 - protein, 25 aa, Artificial Sequence
  Synthetic polypeptide
PRGVAHACNPSTLGGRDHCNGLPRI

SEQ ID NO: 35831 - protein, 54 aa, Artificial Sequence
  Synthetic polypeptide
GRVGWLMPVIPALWEAEIIVMACREFEMGRKKCERYWPLYGEDPITFAPFKISC

SEQ ID NO: 35832 - protein, 95 aa, Artificial Sequence
  Synthetic polypeptide
GRVGWLMPVIPALWEAEIIVMACREFEMGRKKCERYWPLYGEDPITFAPFKISCEDEQARTDYFIRTLLLEFQNESRRLYQFHYVNWPDHDVPSS

SEQ ID NO: 35833 - protein, 141 aa, Artificial Sequence
  Synthetic polypeptide
GRVGWLMPVIPALWEAEIIVMACREFEMGREDEQARTDYFIRTLLLEFQNESRRLYQFHYVNWPDHDVPSSFDSILDMISLMRKYQEHEDVPICIHCSAGCGRTGAICAIDYTWNLLKAGKIPEEFNVFNLIQEMRTQRHS

SEQ ID NO: 35834 - protein, 26 aa, Artificial Sequence
  Synthetic polypeptide
GRVGWLMPVIPALWEAEIIVMACREF

SEQ ID NO: 35835 - protein, 122 aa, Artificial Sequence
  Synthetic polypeptide
GRVGWLMPVIPALWEAEIIVMACREFEMGRKKCERYWPLYGEDPITFAPFKISCEDEQARTDYFIRTLLLEFQNESRRLYQFHYVNWPDHDVPSSFDSILDMISLMRKYQEHEDVPICIHCS

SEQ ID NO: 35836 - protein, 31 aa, Artificial Sequence
  Synthetic polypeptide
GRVGWLMPVIPALWEAEVGRSRDHCNGLPRI

SEQ ID NO: 35837 - protein, 666 aa, Artificial Sequence
  Synthetic polypeptide
SQHFGRPRWADHEIIVMACREFEMGRKKCERYWPLYGEDPITFAPFKISCEDEQARTDYFIRTLLLEFQNESRRLYQFHYVNWPDHDVPSSFDSILDMISLMRKYQEHEDVPICIHCSAGCGRTGAICAIDYTWNLLKAGKIPEEFNVFNLIQEMRTQRHSAVQTKEQYELVHRAIAQLFEKQLQLYEIHGAQKIADGVNEINTENMVSSIEPEKQDSPPPKPPRTRSCLVEGDAKEEILQPPEPHPVPPILTPSPPSAFPTVTTVWQDNDRYHPKPVLHMVSSEQHSADLNRNYSKSTELPGKNESTIEQIDKKLERNLSFEIKKVPLQEGPKSFDGNTLLNRGHAIKIKSASPCIADKISKPQELSSDLNVGDTSQNSCVDCSVTQSNKVSVTPPEESQNSDTPPRPDRLPLDEKGHVTWSFHGPENAIPIPDLSEGNSSDINYQTRKTVSLTPSPTTQVETPDLVDHDNTSPLFRTPLSFTNPLHSDDSDSDERNSDGAVTQNKTNISTASATVSAATSTESISTRKVLPMSIARHNIAGTTHSGAEKDVDVSEDSPPPLPERTPESFVLASEHNTPVRSEWSELQSQERSEQKKSEGLITSENEKCDHPAGGIHYEMCIECPPTFSDKREQISENPTEATDIGFGNRCGKPKGPRDPPSEWT

SEQ ID NO: 35838 - protein, 24 aa, Artificial Sequence
  Synthetic polypeptide
PRGVAHACNPSTLGGRGGQITRSL

SEQ ID NO: 35839 - protein, 50 aa, Artificial Sequence
  Synthetic polypeptide
SQHFGRPRWADHEIIVMACREFEMGRKKCERYWPLYGEDPITFAPFKISC

SEQ ID NO: 35840 - protein, 91 aa, Artificial Sequence
  Synthetic polypeptide
SQHFGRPRWADHEIIVMACREFEMGRKKCERYWPLYGEDPITFAPFKISCEDEQARTDYFIRTLLLEFQNESRRLYQFHYVNWPDHDVPSS

SEQ ID NO: 35841 - protein, 137 aa, Artificial Sequence
  Synthetic polypeptide
SQHFGRPRWADHEIIVMACREFEMGREDEQARTDYFIRTLLLEFQNESRRLYQFHYVNWPDHDVPSSFDSILDMISLMRKYQEHEDVPICIHCSAGCGRTGAICAIDYTWNLLKAGKIPEEFNVFNLIQEMRTQRHS

SEQ ID NO: 35842 - protein, 22 aa, Artificial Sequence
  Synthetic polypeptide
SQHFGRPRWADHEIIVMACREF

SEQ ID NO: 35843 - protein, 118 aa, Artificial Sequence
  Synthetic polypeptide
SQHFGRPRWADHEIIVMACREFEMGRKKCERYWPLYGEDPITFAPFKISCEDEQARTDYFIRTLLLEFQNESRRLYQFHYVNWPDHDVPSSFDSILDMISLMRKYQEHEDVPICIHCS

SEQ ID NO: 35844 - protein, 686 aa, Artificial Sequence
  Synthetic polypeptide
GRVGWLMPVIPALWEAEVGRSRGQEIETILANTIIVMACREFEMGRKKCERYWPLYGEDPITFAPFKISCEDEQARTDYFIRTLLLEFQNESRRLYQFHYVNWPDHDVPSSFDSILDMISLMRKYQEHEDVPICIHCSAGCGRTGAICAIDYTWNLLKAGKIPEEFNVFNLIQEMRTQRHSAVQTKEQYELVHRAIAQLFEKQLQLYEIHGAQKIADGVNEINTENMVSSIEPEKQDSPPPKPPRTRSCLVEGDAKEEILQPPEPHPVPPILTPSPPSAFPTVTTVWQDNDRYHPKPVLHMVSSEQHSADLNRNYSKSTELPGKNESTIEQIDKKLERNLSFEIKKVPLQEGPKSFDGNTLLNRGHAIKIKSASPCIADKISKPQELSSDLNVGDTSQNSCVDCSVTQSNKVSVTPPEESQNSDTPPRPDRLPLDEKGHVTWSFHGPENAIPIPDLSEGNSSDINYQTRKTVSLTPSPTTQVETPDLVDHDNTSPLFRTPLSFTNPLHSDDSDSDERNSDGAVTQNKTNISTASATVSAATSTESISTRKVLPMSIARHNIAGTTHSGAEKDVDVSEDSPPPLPERTPESFVLASEHNTPVRSEWSELQSQERSEQKKSEGLITSENEKCDHPAGGIHYEMCIECPPTFSDKREQISENPTEATDIGFGNRCGKPKGPRDPPSEWT

SEQ ID NO: 35845 - protein, 26 aa, Artificial Sequence
  Synthetic polypeptide
SQHFGRPRWADHEVRRSRPSWLTRSL

SEQ ID NO: 35846 - protein, 10 aa, Artificial Sequence
  Synthetic polypeptide
HDHCNGLPRI

SEQ ID NO: 35847 - protein, 70 aa, Artificial Sequence
  Synthetic polypeptide
GRVGWLMPVIPALWEAEVGRSRGQEIETILANTIIVMACREFEMGRKKCERYWPLYGEDPITFAPFKISC

SEQ ID NO: 35848 - protein, 111 aa, Artificial Sequence
  Synthetic polypeptide
GRVGWLMPVIPALWEAEVGRSRGQEIETILANTIIVMACREFEMGRKKCERYWPLYGEDPITFAPFKISCEDEQARTDYFIRTLLLEFQNESRRLYQFHYVNWPDHDVPSS

SEQ ID NO: 35849 - protein, 157 aa, Artificial Sequence
  Synthetic polypeptide
GRVGWLMPVIPALWEAEVGRSRGQEIETILANTIIVMACREFEMGREDEQARTDYFIRTLLLEFQNESRRLYQFHYVNWPDHDVPSSFDSILDMISLMRKYQEHEDVPICIHCSAGCGRTGAICAIDYTWNLLKAGKIPEEFNVFNLIQEMRTQRHS

SEQ ID NO: 35850 - protein, 42 aa, Artificial Sequence
  Synthetic polypeptide
GRVGWLMPVIPALWEAEVGRSRGQEIETILANTIIVMACREF

SEQ ID NO: 35851 - protein, 138 aa, Artificial Sequence
  Synthetic polypeptide
GRVGWLMPVIPALWEAEVGRSRGQEIETILANTIIVMACREFEMGRKKCERYWPLYGEDPITFAPFKISCEDEQARTDYFIRTLLLEFQNESRRLYQFHYVNWPDHDVPSSFDSILDMISLMRKYQEHEDVPICIHCS

SEQ ID NO: 35852 - protein, 329 aa, Artificial Sequence
  Synthetic polypeptide
KERGRDRKKEREAKGAGESGKSTIVKQMKIIHEAGYSEEECKQYKAVVYSNTIQSIIAIIRAMGRLKIDFGDSARADDARQLFVLAGAAEEGFMTAELAGVIKRLWKDSGVQACFNRSREYQLNDSAAYYLNDLDRIAQPNYIPTQQDVLRTRVKTTGIVETHFTFKDLHFKMFDVGGQRSERKKWIHCFEGVTAIIFCVALSDYDLVLAEDEEMNRMHESMKLFDSICNNKWFTDTSIILFLNKKDLFEEKIKKSPLTICYPEYAGSNTYEEAAAYIQCQFEDLNKRKDTKEIYTHFTCATDTKNVQFVFDAVTDVIIKNNLKDCGLF

SEQ ID NO: 35853 - protein, 24 aa, Artificial Sequence
  Synthetic polypeptide
RKEGGIGRRKEKQKVLVNLVKVQL

SEQ ID NO: 35854 - protein, 10 aa, Artificial Sequence
  Synthetic polypeptide
EEGKRSKRCW

SEQ ID NO: 35855 - protein, 15 aa, Artificial Sequence
  Synthetic polypeptide
DLMILYFPLDINLHI

SEQ ID NO: 35856 - protein, 765 aa, Artificial Sequence
  Synthetic polypeptide
FCIFPWILTCISEEMAFRTICVLVGVFICSICVKGSSQPQARVYLTFDELRETKTSEYFSLSHHPLDYRILLMDEDQDRIYVGSKDHILSLNINNISQEALSVFWPASTIKVEECKMAGKDPTHGCGNFVRVIQTFNRTHLYVCGSGAFSPVCTYLNRGRRSEDQVFMIDSKCESGKGRCSFNPNVNTVSVMINEELFSGMYIDFMGTDAAIFRSLTKRNAVRTDQHNSKWLSEPMFVDAHVIPDGTDPNDAKVYFFFKEKLTDNNRSTKQIHSMIARICPNDTGGLRSLVNKWTTFLKARLVCSVTDEDGPETHFDELEDVFLLETDNPRTTLVYGIFTTSSSVFKGSAVCVYHLSDIQTVFNGPFAHKEGPNHQLISYQGRIPYPRPGTCPGGAFTPNMRTTKEFPDDVVTFIRNHPLMYNSIYPIHKRPLIVRIGTDYKYTKIAVDRVNAADGRYHVLFLGTDRGTVQKVVVLPTNNSVSGELILEELEVFKNHAPITTMKISSKKQQLYVSSNEGVSQVSLHRCHIYGTACADCCLARDPYCAWDGHSCSRFYPTGKRRSRRQDVRHGNPLTQCRGFNLKAYRNAAEIVQYGVKNNTTFLECAPKSPQASIKWLLQKDKDRRKEVKLNERIIATSQGLLIRSVQGSDQGLYHCIATENSFKQTIAKINFKVLDSEMVAVVTDKWSPWTWASSVRALPFHPKDIMGAFSHSEMQMINQYCKDTRQQHQQGDESQKMRGDYGKLKALINSRKSRNRRNQLPES

SEQ ID NO: 35857 - protein, 14 aa, Artificial Sequence
  Synthetic polypeptide
TIVRPYDSVFSLGY

SEQ ID NO: 35858 - protein, 12 aa, Artificial Sequence
  Synthetic polypeptide
KRKLITSACQTK

SEQ ID NO: 35859 - protein, 221 aa, Artificial Sequence
  Synthetic polypeptide
SHLLARLNKHICGGSLIKESWVLTARQCFPSRDLKDYEAWLGIHDVHGRGDEKCKQVLNVSQLVYGPEGSDLVLMKLARPAVLDDFVSTIDLPNYGCTIPEKTSCSVYGWGYTGLINYDGLLRVAHLYIMGNEKCSQHHRGKVTLNESEICAGAEKIGSGPCEGDYGGPLVCEQHKMRMVLGVIVPGRGCAIPNRPGIFVRVAYYAKWIHKIILTYKVPQS

SEQ ID NO: 35860 - protein, 53 aa, Artificial Sequence
  Synthetic polypeptide
GRVRWLTPVIPALWEAEAGRSRGQEIETILANKRDKGKEEIQFMNSKNQQRLP

SEQ ID NO: 35861 - protein, 13 aa, Artificial Sequence
  Synthetic polypeptide
LTRGTKEKKKYNS

SEQ ID NO: 35862 - protein, 700 aa, Artificial Sequence
  Synthetic polypeptide
QEGQRKRRNTIHEFKKSAKTTLIKIDPALKIKTKKVNTADQCANRCTRNKGLPFTCKAFVFDKARKQCLWFPFNSMSSGVKKEFGHEFDLYENKDYIRNCIIGKGRSYKGTVSITKSGIKCQPWSSMIPHEHSFLPSSYRGKDLQENYCRNPRGEEGGPWCFTSNPEVRYEVCDIPQCSEVECMTCNGESYRGLMDHTESGKICQRWDHQTPHRHKFLPERYPDKGFDDNYCRNPDGQPRPWCYTLDPHTRWEYCAIKTCADNTMNDTDVPLETTECIQGQGEGYRGTVNTIWNGIPCQRWDSQYPHEHDMTPENFKCKDLRENYCRNPDGSESPWCFTTDPNIRVGYCSQIPNCDMSHGQDCYRGNGKNYMGNLSQTRSGLTCSMWDKNMEDLHRHIFWEPDASKLNENYCRNPDDDAHGPWCYTGNPLIPWDYCPISRCEGDTTPTIVNLDHPVISCAKTKQLRVVNGIPTRTNIGWMVSLRYRNKHICGGSLIKESWVLTARQCFPSRDLKDYEAWLGIHDVHGRGDEKCKQVLNVSQLVYGPEGSDLVLMKLARPAVLDDFVSTIDLPNYGCTIPEKTSCSVYGWGYTGLINYDGLLRVAHLYIMGNEKCSQHHRGKVTLNESEICAGAEKIGSGPCEGDYGGPLVCEQHKMRMVLGVIVPGRGCAIPNRPGIFVRVAYYAKWIHKIILTYKVPQS

SEQ ID NO: 35863 - protein, 695 aa, Artificial Sequence
  Synthetic polypeptide
QEGQRKRRNTIHEFKKSAKTTLIKIDPALKIKTKKVNTADQCANRCTRNKGLPFTCKAFVFDKARKQCLWFPFNSMSSGVKKEFGHEFDLYENKDYIRNCIIGKGRSYKGTVSITKSGIKCQPWSSMIPHEHSYRGKDLQENYCRNPRGEEGGPWCFTSNPEVRYEVCDIPQCSEVECMTCNGESYRGLMDHTESGKICQRWDHQTPHRHKFLPERYPDKGFDDNYCRNPDGQPRPWCYTLDPHTRWEYCAIKTCADNTMNDTDVPLETTECIQGQGEGYRGTVNTIWNGIPCQRWDSQYPHEHDMTPENFKCKDLRENYCRNPDGSESPWCFTTDPNIRVGYCSQIPNCDMSHGQDCYRGNGKNYMGNLSQTRSGLTCSMWDKNMEDLHRHIFWEPDASKLNENYCRNPDDDAHGPWCYTGNPLIPWDYCPISRCEGDTTPTIVNLDHPVISCAKTKQLRVVNGIPTRTNIGWMVSLRYRNKHICGGSLIKESWVLTARQCFPSRDLKDYEAWLGIHDVHGRGDEKCKQVLNVSQLVYGPEGSDLVLMKLARPAVLDDFVSTIDLPNYGCTIPEKTSCSVYGWGYTGLINYDGLLRVAHLYIMGNEKCSQHHRGKVTLNESEICAGAEKIGSGPCEGDYGGPLVCEQHKMRMVLGVIVPGRGCAIPNRPGIFVRVAYYAKWIHKIILTYKVPQS

SEQ ID NO: 35864 - protein, 262 aa, Artificial Sequence
  Synthetic polypeptide
QEGQRKRRNTIHEFKKSAKTTLIKIDPALKIKTKKVNTADQCANRCTRNKGLPFTCKAFVFDKARKQCLWFPFNSMSSGVKKEFGHEFDLYENKDYIRNCIIGKGRSYKGTVSITKSGIKCQPWSSMIPHEHSFLPSSYRGKDLQENYCRNPRGEEGGPWCFTSNPEVRYEVCDIPQCSEVECMTCNGESYRGLMDHTESGKICQRWDHQTPHRHKFLPERYPDKGFDDNYCRNPDGQPRPWCYTLDPHTRWEYCAIKTCET

SEQ ID NO: 35865 - protein, 257 aa, Artificial Sequence
  Synthetic polypeptide
QEGQRKRRNTIHEFKKSAKTTLIKIDPALKIKTKKVNTADQCANRCTRNKGLPFTCKAFVFDKARKQCLWFPFNSMSSGVKKEFGHEFDLYENKDYIRNCIIGKGRSYKGTVSITKSGIKCQPWSSMIPHEHSYRGKDLQENYCRNPRGEEGGPWCFTSNPEVRYEVCDIPQCSEVECMTCNGESYRGLMDHTESGKICQRWDHQTPHRHKFLPERYPDKGFDDNYCRNPDGQPRPWCYTLDPHTRWEYCAIKTCET

SEQ ID NO: 35866 - protein, 182 aa, Artificial Sequence
  Synthetic polypeptide
QEGQRKRRNTIHEFKKSAKTTLIKIDPALKIKTKKVNTADQCANRCTRNKGLPFTCKAFVFDKARKQCLWFPFNSMSSGVKKEFGHEFDLYENKDYIRNCIIGKGRSYKGTVSITKSGIKCQPWSSMIPHEHSFLPSSYRGKDLQENYCRNPRGEEGGPWCFTSNPEVRYEVCDIPQCSEGK

SEQ ID NO: 35867 - protein, 156 aa, Artificial Sequence
  Synthetic polypeptide
QEGQRKRRNTIHEFKKSAKTTLIKIDPALKIKTKKVNTADQCANRCTRNKGLPFTCKAFVFDKARKQCLWFPFNSMSSGVKKEFGHEFDLYENKDYIRNCIIGKGRSYKGTVSITKSGIKCQPWSSMIPHEHSGGDDCLVESTFYSIPFWGHNSAR

SEQ ID NO: 35868 - protein, 113 aa, Artificial Sequence
  Synthetic polypeptide
QEGQRKRRNTIHEFKKSAKTTLIKIDPALKIKTKKVNTADQCANRCTRNKGLPFTCKAFVFDKARKQCLWFPFNSMSSGVKKEFGHEFDLYENKDYIRNCIIGKGRSYKGTVS

SEQ ID NO: 35869 - protein, 90 aa, Artificial Sequence
  Synthetic polypeptide
QEGQRKRRNTIHEFKKSAKTTLIKIDPALKIKTKKVNTADQCANRCTRNKGLPFTCKAFVFDKARKQCLWFPFNSMSSGVKKEFGHEFDL

SEQ ID NO: 35870 - protein, 34 aa, Artificial Sequence
  Synthetic polypeptide
SQHFGRLRAMKLSTTMQRMISILRKMTVSQAARG

SEQ ID NO: 35871 - protein, 986 aa, Artificial Sequence
  Synthetic polypeptide
WLTPVIPTFWEAESNEVVYYNAKDDLDPEKNDSEPGSQRIKPVFIEDANFGRQISYQHAAVHIPTDIYEGSTIVLNELNWTSALDEVFKKNREEDPSLLWQVFGSATGLARYYPASPWVDNSRTPNKIDLYDVRRRPWYIQGAASPKDMLILVDVSGSVSGLTLKLIRTSVSEMLETLSDDDFVNVASFNSNAQDVSCFQHLVQANVRNKKVLKDAVNNITAKGITDYKKGFSFAFEQLLNYNVSRANCNKIIMLFTDGGEERAQEIFNKYNKDKKVRVFTFSVGQHNYDRGPIQWMACENKGYYYEIPSIGAIRINTQEYLDVLGRPMVLAGDKAKQVQWTNVYLDALELGLVITGTLPVFNITGQFENKTNLKNQLILGVMGVDVSLEDIKRLTPRFTLCPNGYYFAIDPNGYVLLHPNLQPKNPKSQEPVTLDFLDAELENDIKVEIRNKMIDGESGEKTFRTLVKSQDERYIDKGNRTYTWTPVNGTDYSLALVLPTYSFYYIKAKLEETITQARSKKGKMKDSETLKPDNFEESGYTFIAPRDYCNDLKISDNNTEFLLNFNEFIDRKTPNNPSCNADLINRVLLDAGFTNELVQNYWSKQKNIKGVKARFVVTDGGITRVYPKEAGENWQENPETYEDSFYKRSLDNDNYVFTAPYFNKSGPGAYESGIMVSKAVEIYIQGKLLKPAVVGIKIDVNSWIENFTKTSIRDPCAGPVCDCKRNSDVMDCVILDDGGFLLMANHDDYTNQIGRFFGEIDPSLMRHLVNISVYAFNKSYDYQSVCEPGAAPKQGAGHRSAYVPSVADILQIGWWATAAAWSILQQFLLSLTFPRLLEAVEMEDDDFTASLSKQSCITEQTQYFFDNDSKSFSGVLDCGNCSRIFHGEKLMNTNLIFIMVESKGTCPCDTRLLIQAEQTSDGPNPCDMVKQPRYRKGPDVCFDNNVLEDYTDCGGVSGLNPSLWYIIGIQFLLLWLVSGSTHRLL

SEQ ID NO: 35872 - protein, 998 aa, Artificial Sequence
  Synthetic polypeptide
WLTPVIPTFWEAESNEVVYYNAKDDLDPEKNDSEPGSQRIKPVFIEDANFGRQISYQHAAVHIPTDIYEGSTIVLNELNWTSALDEVFKKNREEDPSLLWQVFGSATGLARYYPASPWVDNSRTPNKIDLYDVRRRPWYIQGAASPKDMLILVDVSGSVSGLTLKLIRTSVSEMLETLSDDDFVNVASFNSNAQDVSCFQHLVQANVRNKKVLKDAVNNITAKGITDYKKGFSFAFEQLLNYNVSRANCNKIIMLFTDGGEERAQEIFNKYNKDKKVRVFTFSVGQHNYDRGPIQWMACENKGYYYEIPSIGAIRINTQEYLDVLGRPMVLAGDKAKQVQWTNVYLDALELGLVITGTLPVFNITGQFENKTNLKNQLILGVMGVDVSLEDIKRLTPRFTLCPNGYYFAIDPNGYVLLHPNLQPKPIGVGIPTINLRKRRPNIQNPKSQEPVTLDFLDAELENDIKVEIRNKMIDGESGEKTFRTLVKSQDERYIDKGNRTYTWTPVNGTDYSLALVLPTYSFYYIKAKLEETITQARYSETLKPDNFEESGYTFIAPRDYCNDLKISDNNTEFLLNFNEFIDRKTPNNPSCNADLINRVLLDAGFTNELVQNYWSKQKNIKGVKARFVVTDGGITRVYPKEAGENWQENPETYEDSFYKRSLDNDNYVFTAPYFNKSGPGAYESGIMVSKAVEIYIQGKLLKPAVVGIKIDVNSWIENFTKTSIRDPCAGPVCDCKRNSDVMDCVILDDGGFLLMANHDDYTNQIGRFFGEIDPSLMRHLVNISVYAFNKSYDYQSVCEPGAAPKQGAGHRSAYVPSVADILQIGWWATAAAWSILQQFLLSLTFPRLLEAVEMEDDDFTASLSKQSCITEQTQYFFDNDSKSFSGVLDCGNCSRIFHGEKLMNTNLIFIMVESKGTCPCDTRLLIQAEQTSDGPNPCDMVKQPRYRKGPDVCFDNNVLEDYTDCGGVSGLNPSLWYIIGIQFLLLWLVSGSTHRLL

SEQ ID NO: 35873 - protein, 204 aa, Artificial Sequence
  Synthetic polypeptide
WLTPVIPTFWEAESNEVVYYNAKDDLDPEKNDSEPGSQRIKPVFIEDANFGRQISYQHAAVHIPTDIYEGSTIVLNELNWTSALDEVFKKNREEDPSLLWQVFGSATGLARYYPASPWVDNSRTPNKIDLYDVRRRPWYIQGAASPKDMLILVDVSGSVSGLTLKLIRTSVSEMLETLSDDDFVNVASDSKEISPSPEEIFNAE

SEQ ID NO: 35874 - protein, 40 aa, Artificial Sequence
  Synthetic polypeptide
HFGRPRQADHLRSGVRDQPGQHDHSASFLGENFSHYGSHP

SEQ ID NO: 35875 - protein, 259 aa, Artificial Sequence
  Synthetic polypeptide
GQEFETSLANMTTLLHFWEKTSHTMAAIHESFKGYQPYEFTTLKSLQDPMKKLVEKEEKKKINQQESTDAAVQEPSQLISLEEENQRKESSSFKTEDGKSILSALDKGSTHTACSGPIDELLDMKSEEGACLGPVAGTPEPEGADKDDLLLLSEIFNASSLEEGEFSKEWAAVFGDGQVKEPVPTMALGEPDPKAQTGSGFLPSQLLDQNMKDLQASLQEPAKAASDLTAWFSLFADLDPLSNPDAVGKTDKEHELLNA

SEQ ID NO: 35876 - protein, 288 aa, Artificial Sequence
  Synthetic polypeptide
GQEFETSLANMTTLLHFWEKTSHTMAAIHESFKGYQPYEFTTLKSLQDPMKKLVEKEEKKKINQQESTDAAVQEPSQYLQNICLEMKANSDIKMLQKGKEGQQIGILISLEEENQRKESSSFKTEDGKSILSALDKGSTHTACSGPIDELLDMKSEEGACLGPVAGTPEPEGADKDDLLLLSEIFNASSLEEGEFSKEWAAVFGDGQVKEPVPTMALGEPDPKAQTGSGFLPSQLLDQNMKDLQASLQEPAKAASDLTAWFSLFADLDPLSNPDAVGKTDKEHELLNA

SEQ ID NO: 35877 - protein, 126 aa, Artificial Sequence
  Synthetic polypeptide
GQEFETSLANMTTLLHFWEKTSHTMAAIHESFKGYQPYEFTTLKVWKLEGPLENLEKSKVLFISQAKSIAESIIIPGLRMLKRELCPQQSLFLSFFLSFFFFFFFFTASGFNTMRIYCNPKARIEP

SEQ ID NO: 35878 - protein, 44 aa, Artificial Sequence
  Synthetic polypeptide
GQEFETSLANMTTLLHFWEKTSHTMAAIHESFKGYQPYEFTTLK

SEQ ID NO: 35879 - protein, 19 aa, Artificial Sequence
  Synthetic polypeptide
DVTLPSAMIVRLSQPRGTC

SEQ ID NO: 35880 - protein, 400 aa, Artificial Sequence
  Synthetic polypeptide
GFPSHVELAEYKRRTKHVQKSLNPEWNQTVIYKSISMEQLKKKTLEVTVWDYDRFSSNDFLGEVLIDLSSTSHLDNTPRWYPLKEQTESIDHGKSHSSQSSQQSPKPSVIKSRSHGIFPDPSKDMQVPTIEKSHSSPGSSKSSSEGHLRSHGPSRSQSKTSVTQTHLEDAGAAIAAAEAAVQQLRIQPTKPPNHRPAESSVSTGSSGSSFGSGYSVDSEGSSSTAGETNLFPIPRIGKMGQNGQEPVKQPGVGVGLADTEAKTQVMGEIKIALKKEMKTDGEQLIVEILQCRNITYKFKSPDHLPDLYVKIYVMNISTQKKVIKKKTRVCRHDREPSFNETFRFSLSPAGHSLQILLFSNGGKFMKKTLIGEACIWLDKVDLRKRIVNWHKLLVSPTQTH

SEQ ID NO: 35881 - protein, 60 aa, Artificial Sequence
  Synthetic polypeptide
WFYKEEFPCISSLFAFRHPLRCDFAFCHDCEAFPATWNLLSTREGLNMSRKVLILSGIKQ

SEQ ID NO: 35882 - protein, 193 aa, Artificial Sequence
  Synthetic polypeptide
GFPSHVELAEYKRRTKHVQKSLNPEWNQTVIYKSISMEQLKKKTLEVTVWDYDRFSSNDFLGEVLIDLSSTSHLDNTPRWYPLKEQTESIDHGKSHSSQSSQQSPKPSVIKSRSHGIFPDPSKDMQVPTIEKSHSSPGSSKSSSEGHLRSHGPSRSQSKTSVTQTHLEDAGAAIAAAEAAVQQLRIQPSKRRK

SEQ ID NO: 35883 - protein, 29 aa, Artificial Sequence
  Synthetic polypeptide
DVTLPSAMIVRLSQPRGTGCKYWNGMEFP

SEQ ID NO: 35884 - protein, 21 aa, Artificial Sequence
  Synthetic polypeptide
GFPSHVELDASIGMEWNSLDF

SEQ ID NO: 35885 - protein, 629 aa, Artificial Sequence
  Synthetic polypeptide
WFYKEEFPCISSLFAFRHPLRCDFAFCHDCEAFPATWNWMQVLEWNGIPLTSKTYEEVQSIISQQSGEAEICVRLDLNMLSDSENSQHLELHEPPKAVDKAKSPGVDPKQLAAELQKVSLQQSPLVLSSVVEKGSHVHSGPTSAGSSSVPSPGQPGSPSVSKKKHGSSKPTDGTKVVSHPITGEIQLQINYDLGNLIIHILQARNLVPRDNNGYSDPFVKVYLLPGRGQVMVVQNASAEYKRRTKHVQKSLNPEWNQTVIYKSISMEQLKKKTLEVTVWDYDRFSSNDFLGEVLIDLSSTSHLDNTPRWYPLKEQTESIDHGKSHSSQSSQQSPKPSVIKSRSHGIFPDPSKDMQVPTIEKSHSSPGSSKSSSEGHLRSHGPSRSQSKTSVTQTHLEDAGAAIAAAEAAVQQLRIQPTKPPNHRPAESSVSTGSSGSSFGSGYSVDSEGSSSTAGETNLFPIPRIGKMGQNGQEPVKQPGVGVGLADTEAKTQVMGEIKIALKKEMKTDGEQLIVEILQCRNITYKFKSPDHLPDLYVKIYVMNISTQKKVIKKKTRVCRHDREPSFNETFRFSLSPAGHSLQILLFSNGGKFMKKTLIGEACIWLDKVDLRKRIVNWHKLLVSPTQTH

SEQ ID NO: 35886 - protein, 422 aa, Artificial Sequence
  Synthetic polypeptide
WFYKEEFPCISSLFAFRHPLRCDFAFCHDCEAFPATWNWMQVLEWNGIPLTSKTYEEVQSIISQQSGEAEICVRLDLNMLSDSENSQHLELHEPPKAVDKAKSPGVDPKQLAAELQKVSLQQSPLVLSSVVEKGSHVHSGPTSAGSSSVPSPGQPGSPSVSKKKHGSSKPTDGTKVVSHPITGEIQLQINYDLGNLIIHILQARNLVPRDNNGYSDPFVKVYLLPGRGQVMVVQNASAEYKRRTKHVQKSLNPEWNQTVIYKSISMEQLKKKTLEVTVWDYDRFSSNDFLGEVLIDLSSTSHLDNTPRWYPLKEQTESIDHGKSHSSQSSQQSPKPSVIKSRSHGIFPDPSKDMQVPTIEKSHSSPGSSKSSSEGHLRSHGPSRSQSKTSVTQTHLEDAGAAIAAAEAAVQQLRIQPSKRRK

SEQ ID NO: 35887 - protein, 22 aa, Artificial Sequence
  Synthetic polypeptide
DVTLPSAMIVRLSQPRGTMAWQ

SEQ ID NO: 35888 - protein, 24 aa, Artificial Sequence
  Synthetic polypeptide
GFPSHVELWHGSDQGWRSRNTAHR

SEQ ID NO: 35889 - protein, 56 aa, Artificial Sequence
  Synthetic polypeptide
WFYKEEFPCISSLFAFRHPLRCDFAFCHDCEAFPATWNYGMAVIKVGDQETQHTDE

SEQ ID NO: 35890 - protein, 3 aa, Artificial Sequence
  Synthetic polypeptide
ESS

SEQ ID NO: 35891 - protein, 27 aa, Artificial Sequence
  Synthetic polypeptide
GDETDGLPDASHSIERALESEQNINIS

SEQ ID NO: 35892 - protein, 767 aa, Artificial Sequence
  Synthetic polypeptide
STVLPSRGSRRDFFKVMKLMDYLMHPTALRELLNLNRTSIFHSPFGFLDLHTMLLDEYQERLFVGGRDLVYSLSLERISDGYKEIHWPSTALKMEECIMKGKDAGECANYVRVLHHYNRTHLLTCGTGAFDPVCAFIRVGYHLEDPLFHLESPRSERGRGRCPFDPSSSFISTLIGSELFAGLYSDYWSRDAAIFRSMGRLAHIRTEHDDERLLKEPKFVGSYMIPDNEDRDDNKVYFFFTEKALEAENNAHAIYTRVGRLCVNDVGGQRILVNKWSTFLKARLVCSVPGMNGIDTYFDELEDVFLLPTRDHKNPVIFGLFNTTSNIFRGHAICVYHMSSIRAAFNGPYAHKEGPEYHWSVYEGKVPYPRPGSCASKVNGGRYGTTKDYPDDAIRFARSHPLMYQAIKPAHKKPILVKTDGKYNLKQIAVDRVEAEDGQYDVLFIGTDNGIVLKVITIYNQEMESMEEVILEELQIFKDPVPIISMEISSKRQQLYIGSASAVAQVRFHHCDMYGSACADCCLARDPYCAWDGISCSRYYPTGTHAKRRFRRQDVRHGNAAQQCFGQQFVGDALDKTEEHLAYGIENNSTLLECTPRSLQAKVIWFVQKGRETRKEEVKTDDRVVKMDLGLLFLRLHKSDAGTYFCQTVEHSFVHTVRKITLEVVEEEKVEDMFNKDDEEDRHHRMPCPAQSSISQGAKPWYKEFLQLIGYSNFQRVEEYCEKVWCTDRKRKKLKMSPSKWKYANPQEKKLRSKPEHYRLPRHTLDS

SEQ ID NO: 35893 - protein, 35 aa, Artificial Sequence
  Synthetic polypeptide
ELHQQRVASPLCCQAEAPGEISLRALESEQNINIS

SEQ ID NO: 35894 - protein, 17 aa, Artificial Sequence
  Synthetic polypeptide
STVLPSRGSRRDFFKSS

SEQ ID NO: 35895 - protein, 300 aa, Artificial Sequence
  Synthetic polypeptide
ATQKTVISAFPSEEPTAISAMELSTKQQQLYIGSTAGVAQLPLHRCDIYGKACAECCLARDPYCAWDGSACSRYFPTAKRRTRRQDIRNGDPLTHCSDLHHDNHHGHSPEERIIYGVENSSTFLECSPKSQRALVYWQFQRRNEERKEEIRVDDHIIRTDQGLLLRSLQQKDSGNYLCHAVEHGFIQTLLKVTLEVIDTEHLEELLHKDDDGDGSKTKEMSNSMTPSQKVWYRDFMQLINHPNLNTMDEFCEQVWKRDRKQRRQRPGHTPGNSNKWKHLQENKKGRNRRTHEFERAPRSV

SEQ ID NO: 35896 - protein, 80 aa, Artificial Sequence
  Synthetic polypeptide
FLHFHLRNRLLFQQWSFPLSSNNYILVQRLGLPSSLYTGVIFTGKRVLSVASPETLTVLGMVLHVLAIFPLQRDAQDDKI

SEQ ID NO: 35897 - protein, 84 aa, Artificial Sequence
  Synthetic polypeptide
GTGFISLGSARQWAQMENYTLELQLILWGETLLSSELLGTTTQSGQSSMIPGGSMIQSSLVPTSSQRVTILKMTKYTFSSVKMQ

SEQ ID NO: 35898 - protein, 17 aa, Artificial Sequence
  Synthetic polypeptide
GVPDSGRRWRIILWNCS

SEQ ID NO: 35899 - protein, 610 aa, Artificial Sequence
  Synthetic polypeptide
FLHFHLRYRVHLTRECQTVGADGELYSGTAADFMGRDFAIFRTLGHHHPIRTEQHDSRWLNDPKFISAHLISESDNPEDDKVYFFFRENAIDGEHSGKATHARIGQICKNDFGGHRSLVNKWTTFLKARLICSVPGPNGIDTHFDELQDVFLMNFKDPKNPVVYGVFTTSSNIFKGSAVCMYSMSDVRRVFLGPYAHRDGPNYQWVPYQGRVPYPRPGTCPSKTFGGFDSTKDLPDDVITFARSHPAMYNPVFPMNNRPIVIKTDVNYQFTQIVVDRVDAEDGQYDVMFIGTDVGTVLKVVSIPKETWYDLEEVLLEEMTVFREPTAISAMELSTKQQQLYIGSTAGVAQLPLHRCDIYGKACAECCLARDPYCAWDGSACSRYFPTAKRRTRRQDIRNGDPLTHCSDLHHDNHHGHSPEERIIYGVENSSTFLECSPKSQRALVYWQFQRRNEERKEEIRVDDHIIRTDQGLLLRSLQQKDSGNYLCHAVEHGFIQTLLKVTLEVIDTEHLEELLHKDDDGDGSKTKEMSNSMTPSQKVWYRDFMQLINHPNLNTMDEFCEQVWKRDRKQRRQRPGHTPGNSNKWKHLQENKKGRNRRTHEFERAPRSV

SEQ ID NO: 35900 - protein, 94 aa, Artificial Sequence
  Synthetic polypeptide
IGTAPIYSSEREQRRRRVISAFPSEMENYTLELQLILWGETLLSSELLGTTTQSGQSSMIPGGSMIQSSLVPTSSQRVTILKMTKYTFSSVKMQ

SEQ ID NO: 35901 - protein, 16 aa, Artificial Sequence
  Synthetic polypeptide
FLHFHLRWRIILWNCS

SEQ ID NO: 35902 - protein, 719 aa, Artificial Sequence
  Synthetic polypeptide
VVMRSDGFISIWHFPCLHSFFILLPCEEVASTMIVSFLRPPQPYGTIYWPAAKERVELCKLAGKDANTECANFIRVLQPYNKTHIYVCGTGAFHPICGYIDLGVYKEDIIFKLDTHNLESGRLKCPFDPQQPFASVMTDEYLYSGTASDFLGKDTAFTRSLGPTHDHHYIRTDISEHYWLNGAKFIGTFFIPDTYNPDDDKIYFFFRESSQEGSTSDKTILSRVGRVCKNDVGGQRSLINKWTTFLKARLICSIPGSDGADTYFDELQDIYLLPTRDERNPVVYGVFTTTSSIFKGSAVCVYSMADIRAVFNGPYAHKESADHRWVQYDGRIPYPRPGTCPSKTYDPLIKSTRDFPDDVISFIKRHSVMYKSVYPVAGGPTFKRINVDYRLTQIVVDHVIAEDGQYDVMFLGTDIGTVLKVVSISKEKWNMEEVVLEELQIFKHSSIILNMELSLKQQQLYIGSRDGLVQLSLHRCDTYGKACADCCLARDPYCAWDGNACSRYAPTSKRRARRQDVKYGDPITQCWDIEDSISHETADEKVIFGIEFNSTFLECIPKSQQATIKWYIQRSGDEHREELKPDERIIKTEYGLLIRSLQKKDSGMYYCKAQEHTFIHTIVKLTLNVIENEQMENTQRAEHEEGKVKDLLAESRLRYKDYIQILSSPNFSLDQYCEQMWHREKRRQRNKGGPKWKHMQEMKKKRNRRHHRDLDELPRAVAT

SEQ ID NO: 35903 - protein, 22 aa, Artificial Sequence
  Synthetic polypeptide
GLPSHTELFIGLLQRNGWNYVN

SEQ ID NO: 35904 - protein, 32 aa, Artificial Sequence
  Synthetic polypeptide
RGGFHHDCKFPEASPAIRNYLLACCKGTGGIM

SEQ ID NO: 35905 - protein, 236 aa, Artificial Sequence
  Synthetic polypeptide
VVMRSDGFISIWHFPCLHSFFILLPCEEVASTMIVSFLRPPQPYGTIYWPAAKERVELCKLAGKDANTECANFIRVLQPYNKTHIYVCGTGAFHPICGYIDLGVYKEDIIFKLDTHNLESGRLKCPFDPQQPFASVMTDEYLYSGTASDFLGKDTAFTRSLGPTHDHHYIRTDISEHYWLNGAKFIGTFFIPDTYNPDDDKIYFFFRESSQEGSTSDKTILSRVGRVCKENLCFED

SEQ ID NO: 35906 - protein, 70 aa, Artificial Sequence
  Synthetic polypeptide
VVMRSDGFISIWHFPCLHSFFILLPCEEVASTMIVSFLRPPQPYGTTCCFQIAVFPFWVHQKDWIFKLFS

SEQ ID NO: 35907 - protein, 13 aa, Artificial Sequence
  Synthetic polypeptide
GLPSHTELLAAFK

SEQ ID NO: 35908 - protein, 746 aa, Artificial Sequence
  Synthetic polypeptide
RGGFHHDCKFPEASPAIRNYLLLSNSCIPFLGSSEGLDFQTLLLDEERGRLLLGAKDHIFLLSLVDLNKNFKKIYWPAAKERVELCKLAGKDANTECANFIRVLQPYNKTHIYVCGTGAFHPICGYIDLGVYKEDIIFKLDTHNLESGRLKCPFDPQQPFASVMTDEYLYSGTASDFLGKDTAFTRSLGPTHDHHYIRTDISEHYWLNGAKFIGTFFIPDTYNPDDDKIYFFFRESSQEGSTSDKTILSRVGRVCKNDVGGQRSLINKWTTFLKARLICSIPGSDGADTYFDELQDIYLLPTRDERNPVVYGVFTTTSSIFKGSAVCVYSMADIRAVFNGPYAHKESADHRWVQYDGRIPYPRPGTCPSKTYDPLIKSTRDFPDDVISFIKRHSVMYKSVYPVAGGPTFKRINVDYRLTQIVVDHVIAEDGQYDVMFLGTDIGTVLKVVSISKEKWNMEEVVLEELQIFKHSSIILNMELSLKQQQLYIGSRDGLVQLSLHRCDTYGKACADCCLARDPYCAWDGNACSRYAPTSKRRARRQDVKYGDPITQCWDIEDSISHETADEKVIFGIEFNSTFLECIPKSQQATIKWYIQRSGDEHREELKPDERIIKTEYGLLIRSLQKKDSGMYYCKAQEHTFIHTIVKLTLNVIENEQMENTQRAEHEEGKVKDLLAESRLRYKDYIQILSSPNFSLDQYCEQMWHREKRRQRNKGGPKWKHMQEMKKKRNRRHHRDLDELPRAVAT

SEQ ID NO: 35909 - protein, 263 aa, Artificial Sequence
  Synthetic polypeptide
RGGFHHDCKFPEASPAIRNYLLLSNSCIPFLGSSEGLDFQTLLLDEERGRLLLGAKDHIFLLSLVDLNKNFKKIYWPAAKERVELCKLAGKDANTECANFIRVLQPYNKTHIYVCGTGAFHPICGYIDLGVYKEDIIFKLDTHNLESGRLKCPFDPQQPFASVMTDEYLYSGTASDFLGKDTAFTRSLGPTHDHHYIRTDISEHYWLNGAKFIGTFFIPDTYNPDDDKIYFFFRESSQEGSTSDKTILSRVGRVCKENLCFED

SEQ ID NO: 35910 - protein, 707 aa, Artificial Sequence
  Synthetic polypeptide
VVMRSDGFISIWHFPCLHSFFILLPCEEVASTMIIYWPAAKERVELCKLAGKDANTECANFIRVLQPYNKTHIYVCGTGAFHPICGYIDLGVYKEDIIFKLDTHNLESGRLKCPFDPQQPFASVMTDEYLYSGTASDFLGKDTAFTRSLGPTHDHHYIRTDISEHYWLNGAKFIGTFFIPDTYNPDDDKIYFFFRESSQEGSTSDKTILSRVGRVCKNDVGGQRSLINKWTTFLKARLICSIPGSDGADTYFDELQDIYLLPTRDERNPVVYGVFTTTSSIFKGSAVCVYSMADIRAVFNGPYAHKESADHRWVQYDGRIPYPRPGTCPSKTYDPLIKSTRDFPDDVISFIKRHSVMYKSVYPVAGGPTFKRINVDYRLTQIVVDHVIAEDGQYDVMFLGTDIGTVLKVVSISKEKWNMEEVVLEELQIFKHSSIILNMELSLKQQQLYIGSRDGLVQLSLHRCDTYGKACADCCLARDPYCAWDGNACSRYAPTSKRRARRQDVKYGDPITQCWDIEDSISHETADEKVIFGIEFNSTFLECIPKSQQATIKWYIQRSGDEHREELKPDERIIKTEYGLLIRSLQKKDSGMYYCKAQEHTFIHTIVKLTLNVIENEQMENTQRAEHEEGKVKDLLAESRLRYKDYIQILSSPNFSLDQYCEQMWHREKRRQRNKGGPKWKHMQEMKKKRNRRHHRDLDELPRAVAT

SEQ ID NO: 35911 - protein, 20 aa, Artificial Sequence
  Synthetic polypeptide
RGGFHHDYLLACCKGTGGIM

SEQ ID NO: 35912 - protein, 224 aa, Artificial Sequence
  Synthetic polypeptide
VVMRSDGFISIWHFPCLHSFFILLPCEEVASTMIIYWPAAKERVELCKLAGKDANTECANFIRVLQPYNKTHIYVCGTGAFHPICGYIDLGVYKEDIIFKLDTHNLESGRLKCPFDPQQPFASVMTDEYLYSGTASDFLGKDTAFTRSLGPTHDHHYIRTDISEHYWLNGAKFIGTFFIPDTYNPDDDKIYFFFRESSQEGSTSDKTILSRVGRVCKENLCFED

SEQ ID NO: 35913 - protein, 58 aa, Artificial Sequence
  Synthetic polypeptide
VVMRSDGFISIWHFPCLHSFFILLPCEEVASTMITCCFQIAVFPFWVHQKDWIFKLFS

SEQ ID NO: 35914 - protein, 734 aa, Artificial Sequence
  Synthetic polypeptide
RGGFHHDYLLLSNSCIPFLGSSEGLDFQTLLLDEERGRLLLGAKDHIFLLSLVDLNKNFKKIYWPAAKERVELCKLAGKDANTECANFIRVLQPYNKTHIYVCGTGAFHPICGYIDLGVYKEDIIFKLDTHNLESGRLKCPFDPQQPFASVMTDEYLYSGTASDFLGKDTAFTRSLGPTHDHHYIRTDISEHYWLNGAKFIGTFFIPDTYNPDDDKIYFFFRESSQEGSTSDKTILSRVGRVCKNDVGGQRSLINKWTTFLKARLICSIPGSDGADTYFDELQDIYLLPTRDERNPVVYGVFTTTSSIFKGSAVCVYSMADIRAVFNGPYAHKESADHRWVQYDGRIPYPRPGTCPSKTYDPLIKSTRDFPDDVISFIKRHSVMYKSVYPVAGGPTFKRINVDYRLTQIVVDHVIAEDGQYDVMFLGTDIGTVLKVVSISKEKWNMEEVVLEELQIFKHSSIILNMELSLKQQQLYIGSRDGLVQLSLHRCDTYGKACADCCLARDPYCAWDGNACSRYAPTSKRRARRQDVKYGDPITQCWDIEDSISHETADEKVIFGIEFNSTFLECIPKSQQATIKWYIQRSGDEHREELKPDERIIKTEYGLLIRSLQKKDSGMYYCKAQEHTFIHTIVKLTLNVIENEQMENTQRAEHEEGKVKDLLAESRLRYKDYIQILSSPNFSLDQYCEQMWHREKRRQRNKGGPKWKHMQEMKKKRNRRHHRDLDELPRAVAT

SEQ ID NO: 35915 - protein, 251 aa, Artificial Sequence
  Synthetic polypeptide
RGGFHHDYLLLSNSCIPFLGSSEGLDFQTLLLDEERGRLLLGAKDHIFLLSLVDLNKNFKKIYWPAAKERVELCKLAGKDANTECANFIRVLQPYNKTHIYVCGTGAFHPICGYIDLGVYKEDIIFKLDTHNLESGRLKCPFDPQQPFASVMTDEYLYSGTASDFLGKDTAFTRSLGPTHDHHYIRTDISEHYWLNGAKFIGTFFIPDTYNPDDDKIYFFFRESSQEGSTSDKTILSRVGRVCKENLCFED

SEQ ID NO: 35916 - protein, 261 aa, Artificial Sequence
  Synthetic polypeptide
TSFCSQFQVTCANLTNGGKSELLKSGSSKSTLKHIWTESSKDLSISRLLSQTFRGKENDTDLDLRYDTPEPYSEQDLWDWLRNSTDLQEPRPRAKRRPIVKTGKFKKMFGWGDFHSNIKTVKLNLLITGKIVDHGNGTFSVYFRHNSTGQGNVSVSLVPPTKIVEFDLAQQTVIDAKDSKSFNCRIEYEKVDKATKNTLCNYDPSKTCYQEQTQSHVSWLCSKPFKVICIYISFYSTDYKLVQKVCPDYNYHSDTPYFPSG

SEQ ID NO: 35917 - protein, 22 aa, Artificial Sequence
  Synthetic polypeptide
SCETVRPIKRLFVLSFRSHVPI

SEQ ID NO: 35918 - protein, 61 aa, Artificial Sequence
  Synthetic polypeptide
DQLNVFLFSVSGHMCQFNERWKVRTSEIRKQQIHTKAHMDRKQQRLVYQPTPVTDFSWQRE

SEQ ID NO: 35919 - protein, 129 aa, Artificial Sequence
  Synthetic polypeptide
TSFCSQFQVTCANLTNGGKSELLKSGSSKSTLKHIWTESSKDLSISRLLSQTFRGKENDTDLDLRYDTPEPYSEQDLWDWLRNSTDLQEPRPRAKRRPIVKTGKFKKMFGWGDFHSNIKTVKLNLLITG

SEQ ID NO: 35920 - protein, 133 aa, Artificial Sequence
  Synthetic polypeptide
TSFCSQFQVTCANLTNGGKSELLKSGSSKSTLKHIWTESSKDLSISRLLSQTFRGKENDTDLDLRYDTPEPYSEQDLWDWLRNSTDLQEPRPRAKRRPIVKTGKFKKMFGWGDFHSNIKTVKLNLLITGKIVD

SEQ ID NO: 35921 - protein, 93 aa, Artificial Sequence
  Synthetic polypeptide
FDRIINLVVGSLTSLLILVTLISAFVFPQLPPKPLNIFFAVCISLSSITACILIYWYRQGDLEPKFRKLIYYIIFSIIMLCICANLYFHDVGR

SEQ ID NO: 35922 - protein, 13 aa, Artificial Sequence
  Synthetic polypeptide
MENFRNNLIESSI

SEQ ID NO: 35923 - protein, 94 aa, Artificial Sequence
  Synthetic polypeptide
FDRIINLVVGSLTSLLILVTLISAFVFPQLPPKPLNIFFAVCISLSSITACILVSTVENLNSVLEGLSCNAQDKNFQPWVYTKGYLLIISSSSP

SEQ ID NO: 35924 - protein, 9 aa, Artificial Sequence
  Synthetic polypeptide
CWNEIESSI

SEQ ID NO: 35925 - protein, 50 aa, Artificial Sequence
  Synthetic polypeptide
VNAGMRSNHQFSCWQLNILIDSSNADKCFCFPSTTSKTVEYILCCLHLFE

SEQ ID NO: 35926 - protein, 58 aa, Artificial Sequence
  Synthetic polypeptide
INPQRWGETSAKRLKIPKTRTPLLLQRITTPRQQGKNWMENKLDELTEVGFRRIESSI

SEQ ID NO: 35927 - protein, 48 aa, Artificial Sequence
  Synthetic polypeptide
ASEGSNHQFSCWQLNILIDSSNADKCFCFPSTTSKTVEYILCCLHLFE

SEQ ID NO: 35928 - protein, 103 aa, Artificial Sequence
  Synthetic polypeptide
IGRIDRSRLQKDRIINLVVGSLTSLLILVTLISAFVFPQLPPKPLNIFFAVCISLSSITACILIYWYRQGDLEPKFRKLIYYIIFSIIMLCICANLYFHDVGR

SEQ ID NO: 35929 - protein, 104 aa, Artificial Sequence
  Synthetic polypeptide
IGRIDRSRLQKDRIINLVVGSLTSLLILVTLISAFVFPQLPPKPLNIFFAVCISLSSITACILVSTVENLNSVLEGLSCNAQDKNFQPWVYTKGYLLIISSSSP

SEQ ID NO: 35930 - protein, 65 aa, Artificial Sequence
  Synthetic polypeptide
VLARSDCLKVCSTSCFPLSLSCHHGKMFLLPLHPSAMIISFLRPPHPRLLYSLWNSNKKGKKRRQ

SEQ ID NO: 35931 - protein, 39 aa, Artificial Sequence
  Synthetic polypeptide
GLPTHACCTACGIQTKKEKNEDSENDWSINIVSILRLAG

SEQ ID NO: 35932 - protein, 1296 aa, Artificial Sequence
  Synthetic polypeptide
HFLLPSLSLLPPWEDVLASPSPFCHDYKLPEASPPTPAVQPVEFKQKRKKTKTVKMIGVLTLFRYSDWQDKLFMSLGTIMAIAHGSGLPLMMIVFGEMTDKFVDTAGNFSFPVNFSLSLLNPGKILEEEMTRYAYYYSGLGAGVLVAAYIQVSFWTLAAGRQIRKIRQKFFHAILRQEIGWFDINDTTELNTRLTDDISKISEGIGDKVGMFFQAVATFFAGFIVGFIRGWKLTLVIMAISPILGLSAAVWAKILSAFSDKELAAYAKAGAVAEEALGAIRTVIAFGGQNKELERYQKHLENAKEIGIKKAISANISMGIAFLLIYASYALAFWYGSTLVISKEYTIGNAMTVFFSILIGAFSVGQAAPCIDAFANARGAAYVIFDIIDNNPKIDSFSERGHKPDSIKGNLEFNDVHFSYPSRANVKILKGLNLKVQSGQTVALVGSSGCGKSTTVQLIQRLYDPDEGTINIDGQDIRNFNVNYLREIIGVVSQEPVLFSTTIAENICYGRGNVTMDEIKKAVKEANAYEFIMKLPQKFDTLVGERGAQLSGGQKQRIAIARALVRNPKILLLDEATSALDTESEAEVQAALDKAREGRTTIVIAHRLSTVRNADVIAGFEDGVIVEQGSHSELMKKEGVYFKLVNMQTSGSQIQSEEFELNDEKAATRMAPNGWKSRLFRHSTQKNLKNSQMCQKSLDVETDGLEANVPPVSFLKVLKLNKTEWPYFVVGTVCAIANGGLQPAFSVIFSEIIAIFGPGDDAVKQQKCNIFSLIFLFLGIISFFTFFLQGFTFGKAGEILTRRLRSMAFKAMLRQDMSWFDDHKNSTGALSTRLATDAAQVQGATGTRLALIAQNIANLGTGIIISFIYGWQLTLLLLAVVPIIAVSGIVEMKLLAGNAKRDKKELEAAGKIATEAIENIRTVVSLTQERKFESMYVEKLYGPYRNSVQKAHIYGITFSISQAFMYFSYAGCFRFGAYLIVNGHMRFRDVILVFSAIVFGAVALGHASSFAPDYAKAKLSAAHLFMLFERQPLIDSYSEEGLKPDKFEGNITFNEVVFNYPTRANVPVLQGLSLEVKKGQTLALVGSSGCGKSTVVQLLERFYDPLAGTVLLDGQEAKKLNVQWLRAQLGIVSQEPILFDCSIAENIAYGDNSRVVSQDEIVSAAKAANIHPFIETLPHKYETRVGDKGTQLSGGQKQRIAIARALIRQPQILLLDEATSALDTESEKVVQEALDKAREGRTCIVIAHRLSTIQNADLIVVFQNGRVKEHGTHQQLLAQKGIYFSMVSVQAGTQNL

SEQ ID NO: 35933 - protein, 1249 aa, Artificial Sequence
  Synthetic polypeptide
HFLLPSLSLLPPWEDVLASPSPFCHDYKLPEASPPTPAVQPVEFKQKRKKTKTVKMIGVLTLFRYSDWQDKLFMSLGTIMAIAHGSGLPLMMIVFGEMTDKFVDTAGNFSFPVNFSLSLLNPGKILEEEMTRYAYYYSGLGAGVLVAAYIQVSFWTLAAGRQIRKIRQKFFHAILRQEIGWFDINDTTELNTRLTDDISKISEGIGDKVGMFFQAVATFFAGFIVGFIRGWKLTLVIMAISPILGLSAAVWAKILSAFSDKELAAYAKAGAVAEEALGAIRTVIAFGGQNKELERYQKHLENAKEIGIKKAISANISMGIAFLLIYASYALAFWYGSTLVISKEYTIGNAMTVFFSILIGAFSVGQAAPCIDAFANARGAAYVIFDIIDNNPKIDSFSERGHKPDSIKGNLEFNDVHFSYPSRANVKILKGLNLKVQSGQTVALVGSSGCGKSTTVQLIQRLYDPDEGTINIDGQDIRNFNVNYLREIIGVVSQEPVLFSTTIAENICYGRGNVTMDEIKKAVKEANAYEFIMKLPQKFDTLVGERGAQLSGGQKQRIAIARALVRNPKILLLDEATSALDTESEAEVQAALDKAREGRTTIVIAHRLSTVRNADVIAGFEDGVIVEQGSHSELMKKEGVYFKLVNMQTSGSQIQSEEFELNDEKAATRMAPNGWKSRLFRHSTQKNLKNSQMCQKSLDVETDGLEANVPPVSFLKVLKLNKTEWPYFVVGTVCAIANGGLQPAFSVIFSEIIAIFGPGDDAVKQQKCNIFSLIFLFLGIISFFTFFLQGFTFGKAGEILTRRLRSMAFKAMLRQDMSWFDDHKNSTGALSTRLATDAAQVQGATGTRLALIAQNIANLGTGIIISFIYGWQLTLLLLAVVPIIAVSGIVEMKLLAGNAKRDKKELEAAGKIATEAIENIRTVVSLTQERKFESMYVEKLYGPYRVFSAIVFGAVALGHASSFAPDYAKAKLSAAHLFMLFERQPLIDSYSEEGLKPDKFEGNITFNEVVFNYPTRANVPVLQGLSLEVKKGQTLALVGSSGCGKSTVVQLLERFYDPLAGTVLLDGQEAKKLNVQWLRAQLGIVSQEPILFDCSIAENIAYGDNSRVVSQDEIVSAAKAANIHPFIETLPHKYETRVGDKGTQLSGGQKQRIAIARALIRQPQILLLDEATSALDTESEKVVQEALDKAREGRTCIVIAHRLSTIQNADLIVVFQNGRVKEHGTHQQLLAQKGIYFSMVSVQAGTQNL

SEQ ID NO: 35934 - protein, 1303 aa, Artificial Sequence
  Synthetic polypeptide
HFLLPSLSLLPPWEDVLASPSPFCHDYKLPEASPPTPAVQPVEFKQKRKKTKTVKMIGVLTLFRYSDWQDKLFMSLGTIMAIAHGSGLPLMMIVFGEMTDKFVDTAGNFSFPVNFSLSLLNPGKILEEEMTRYAYYYSGLGAGVLVAAYIQVSFWTLAAGRQIRKIRQKFFHAILRQEIGWFDINDTTELNTRLTDDISKISEGIGDKVGMFFQAVATFFAGFIVGFIRGWKLTLVIMAISPILGLSAAVWAKILSAFSDKELAAYAKAGAVAEEALGAIRTVIAFGGQNKELERYQKHLENAKEIGIKKAISANISMGIAFLLIYASYALAFWYGSTLVISKEYTIGNAMTVFFSILIGAFSVGQAAPCIDAFANARGAAYVIFDIIDNNPKIDSFSERGHKPDSIKGNLEFNDVHFSYPSRANVKILKGLNLKVQSGQTVALVGSSGCGKSTTVQLIQRLYDPDEGTINIDGQDIRNFNVNYLREIIGVVSQEPVLFSTTIAENICYGRGNVTMDEIKKAVKEANAYEFIMKLPQKFDTLVGERGAQLSGGQKQRIAIARALVRNPKILLLDEATSALDTESEAEVQAALDKAREGRTTIVIAHRLSTVRNADVIAGFEDGVIVEQGSHSELMKKEGVYFKLVNMQTSGSQIQSEEFELNDEKAATRMAPNGWKSRLFRHSTQKNLKNSQMCQKSLDVETDGLEANVPPVSFLKVLKLNKTEWPYFVVGTVCAIANGGLQPAFSVIFSEIIAIFGPGDDAVKQQKCNIFSLIFLFLGIISFFTFFLQGFTFGKAGEILTRRLRSMAFKAMLRQDMSWFDDHKNSTGALSTRLATDAAQVQGATGTRLALIAQNIANLGTGIIISFIYGWQLTLLLLAVVPIIAVSGIVEMKLLAGNAKRDKKELEAAGKIATEAIENIRTVVSLTQERKFESMYVEKLYGPYRNSVQKAHIYGITFSISQAFMYFSYAGCFRFGAYLIVNGHMRFRDVILVFSAIVFGAVALGHASSFAPDYAKAKLSAAHLFMLFERQPLIDSYSEEGLKPDKFEGNITFNEVVFNYPTRANVPVLQGLSLEVKKGQTLALVGSSGCGKSTVVQLLERFYDPLAGTVFVDFGFQLLDGQEAKKLNVQWLRAQLGIVSQEPILFDCSIAENIAYGDNSRVVSQDEIVSAAKAANIHPFIETLPHKYETRVGDKGTQLSGGQKQRIAIARALIRQPQILLLDEATSALDTESEKVVQEALDKAREGRTCIVIAHRLSTIQNADLIVVFQNGRVKEHGTHQQLLAQKGIYFSMVSVQAGTQNL

SEQ ID NO: 35935 - protein, 78 aa, Artificial Sequence
  Synthetic polypeptide
HFLLPSLSLLPPWEDVLASPSPFCHDYKLPEASPPTPAVQPVEFKQKRKKTKTVKMIGVLTLFRYSDWQDKLFMSLGT

SEQ ID NO: 35936 - protein, 42 aa, Artificial Sequence
  Synthetic polypeptide
PGCETGSQRRSFWNLKICLPCWILDFLGVRKILPHYLASVDL

SEQ ID NO: 35937 - protein, 62 aa, Artificial Sequence
  Synthetic polypeptide
HQPVKAAGSEAVLCKTTGVELPKTMGIHPLHQHDLDVRQGVKGDHFGTLRFVCPAGFWTFLG

SEQ ID NO: 35938 - protein, 60 aa, Artificial Sequence
  Synthetic polypeptide
DLSALLDSGLSWGKEDTPSLLGLCGSLTSVASYKSLTSLKSNDYLASPTTEMTSPGLTPS

SEQ ID NO: 35939 - protein, 12 aa, Artificial Sequence
  Synthetic polypeptide
PQEICCCCNFTI

SEQ ID NO: 35940 - protein, 97 aa, Artificial Sequence
  Synthetic polypeptide
LCDLRKFAAVATLPFDVVKTQKQTQLWTYESHKISMPLHMSTWIIMKNIVAKNGFSGLFSGLIPRLIKIAPACAIMISTYEFGKAFFQKQNVRRQQY

SEQ ID NO: 35941 - protein, 35 aa, Artificial Sequence
  Synthetic polypeptide
MLVVESERLGWNCGSATSSCVTSGNLLLLQLYHLM

SEQ ID NO: 35942 - protein, 118 aa, Artificial Sequence
  Synthetic polypeptide
GWVRWLTPVIPALWEAEVCLSRGKLLVEKAIKDHDFIPSNSILSNALSWGVKILHIDDIRYYIEQKKKELYLLKKSSTSVRDGGKRVGSGAQKTRTGRLKKPFVKVEDMSQSPAVHLM

SEQ ID NO: 35943 - protein, 10 aa, Artificial Sequence
  Synthetic polypeptide
SQHFGRLRCV

SEQ ID NO: 35944 - protein, 558 aa, Artificial Sequence
  Synthetic polypeptide
GWVRWLTPVIPALWEAEVCLSRGKLLVEKAIKDHDFIPSNSILSNALSWGVKILHIDDIRYYIEQKKKELYLLKKSSTSVRDGGKRVGSGAQKTRTGRLKKPFVKVEDMSQLYRPFYLQLTNMPFINYSIQKPCSPFDVDKPSSMQKQTQVKLRIQTDGDKYGGTSIQLQLKEKKKKGYCECCLQKYEDLETHLLSEQHRNFAQSNQYQVVDDIVSKLVFDFVEYEKDTPKKKRIKYSVGSLSPVSASVLKKTEQKEKVELQHISQKDCQEDDTTVKEQNFLYKETQETEKKLLFISEPIPHPSNELRGLNEKMSNKCSMLSTAEDDIRQNFTQLPLHKNKQECILDISEHTLSENDLEELRVDHYKCNIQASVHVSDFSTDNSGSQPKQKSDTVLFPAKDLKEKDLHSIFTHDSGLITINSSQEHLTVQAKAPFHTPPEEPNECDFKNMDSLPSGKIHRKVKIILGRNRKENLEPNAEFDKRTEFITQEENRICSSPVQSLLDLFQTSEEKSEFLGFTSYTEKSGICNVLDIWEEENSDNLLTAFFSSPSTSTFTGF

SEQ ID NO: 35945 - protein, 101 aa, Artificial Sequence
  Synthetic polypeptide
GWVRWLTPVIPALWEAEVCLSRGKLLVEKAIKDHDFIPSNSILSNALSWGVKILHIDDIRYYIEQKKKELYLLKKSSTSVRDGGKRVGSGAQKTRKALQSI

SEQ ID NO: 35946 - protein, 25 aa, Artificial Sequence
  Synthetic polypeptide
GRAPRLTPVIPALWRPRWTCKSEKW

SEQ ID NO: 35947 - protein, 108 aa, Artificial Sequence
  Synthetic polypeptide
FQHSGGRGGRASQRNGETPVFRRSARRFSGTAAAEVLITVCEQRRLADDAARPAAADPAERHPPRFRDQAAPNLRSRGVCCERGGGVWNNRGASTCHREQRLEAVFPR

SEQ ID NO: 35948 - protein, 293 aa, Artificial Sequence
  Synthetic polypeptide
PGAAAHACDSSTLEAEVDVQVREMVKLLFSEDQQGGSLEQLLQRFSSQFVSKGDLQTMLRDLQLQILRNVTHHVSVTKQLPTSEAVVSAVSEAGASGITEAQARAIVNSALKLYSQDKTGMVDFALESGGGSILSTRCSETYETKTALMSLFGIPLWYFSQSPRVVIQPDIYPGNCWAFKGSQGYLVVRLSMMIHPAAFTLEHIPKTLSPTGNISSAPKDFAVYGLENEYQEEGQLLGQFTYDQDGESLQMFQALKRPDDTAFQIVELRIFSNWGHPEYTCLYRFRVHGEPVK

SEQ ID NO: 35949 - protein, 217 aa, Artificial Sequence
  Synthetic polypeptide
PGAAAHACDSSTLEAEVDVQVREMVKLLFSEDQQGGSLEQLLQRFSSQFVSKGDLQTMLRDLQLQILRNVTHHVSVTKQLPTSEAVVSAVSEAGASGITEAQARAIVNSALKLYSQDKTGMVDFALESGGGSILSTRCSETYETKTALMSLFGIPLWYFSQSPRVVIQVHVPEQAHGGPGAHVLGSPALLQPWPAKQCSRLVHAGPGVPGEGGSGGG

SEQ ID NO: 35950 - protein, 12 aa, Artificial Sequence
  Synthetic polypeptide
DTISCQLERLQT

SEQ ID NO: 35951 - protein, 12 aa, Artificial Sequence
  Synthetic polypeptide
KDYKLRRAIRTV

SEQ ID NO: 35952 - protein, 1771 aa, Artificial Sequence
  Synthetic polypeptide
YPESTKNLNKFTRKNNPIKKWAKDTNRHFSKEDIYMAKKHTKKSSSSLVIREVQTKTTMRYHLMPVRKITNLEEQLEQFREELENKNEEVQQLHMQLEIQKKESTTRLQELEQENKLFKDDMEKLGLAIKESDAMSTQDQHVLFGKFAQIIQEKEVEIDQLNEQVTKLQQQLKITTDNKVIEEKNELIRDLETQIECLMSDQECVKRNREEEIEQLNEVIEKLQQELANIGQKTSMNAHSLSEEADSLKHQLDVVIAEKLALEQQVETANEEMTFMKNVLKETNFKMNQLTQELFSLKRERESVEKIQSIPENSVNVAIDHLSKDKPELEVVLTEDALKSLENQTYFKSFEENGKGSIINLETRLLQLESTVSAKDLELTQCYKQIKDMQEQGQFETEMLQKKIVNLQKIVEEKVAAALVSQIQLEAVQEYAKFCQDNQTISSEPERTNIQNLNQLREDELGSDISALTLRISELESQVVEMHTSLILEKEQVEIAEKNVLEKEKKLLELQKLLEGNEKKQREKEKKRSPQDVEVLKTTTELFHSNEESGFFNELEALRAESVATKAELASYKEKAEKLQEELLVKETNMTSLQKDLSQVRDHLAEAKEKLSILEKEDETEVQESKKACMFEPLPIKLSKSIASQTDGTLKISSSNQTPQILVKNAGIQINLQSECSSEEVTEIISQFTEKIEKMQELHAAEILDMESRHISETETLKREHYVAVQLLKEECGTLKAVIQCLRSKEGSSIPELAHSDAYQTREICSSDSGSDWGQGIYLTHSQGFDIASEGRGEESESATDSFPKKIKGLLRAVHNEGMQVLSLTESPYSDGEDHSIQQVSEPWLEERKAYINTISSLKDLITKMQLQREAEVYDSSQSHESFSDWRGELLLALQQVFLEERSVLLAAFRTELTALGTTDAVGLLNCLEQRIQEQGVEYQAAMECLQKADRRSLLSEIQALHAQMNGRKITLKREQESEKPSQELLEYNIQQKQSQMLEMQVELSSMKDRATELQEQLSSEKMVVAELKSELAQTKLELETTLKAQHKHLKELEAFRLEVKDKTDEVHLLNDTLASEQKKSRELQWALEKEKAKLGRSEERDKEELEDLKFSLESQKQRNLQLNLLLEQQKQLLNESQQKIESQRMLYDAQLSEEQGRNLELQVLLESEKVRIREMSSTLDRERELHAQLQSSDGTGQSRPPLPSEDLLKELQKQLEEKHSRIVELLNETEKYKLDSLQTRQQMEKDRQVHRKTLQTEQEANTEGQKKMHELQSKVEDLQRQLEEKRQQVYKLDLEGQRLQGIMQEFQKQELEREEKRESRRILYQNLNEPTTWSLTSDRTRNWVLQQKIEGETKESNYAKLIEMNGGGTGCNHELEMIRQKLQCVASKLQVLPQKASERLQFETADDEDFIWVQENIDEIILQLQKLTGQQGEEPSLVSPSTSCGSLTERLLRQNAELTGHISQLTEEKNDLRNMVMKLEEQIRWYRQTGAGRDNSSRFSLNGGANIEAIIASEKEVWNREKLTLQKSLKRAEAEVYKLKAELRNDSLLQTLSPDSEHVTLKRIYGKYLRAESFRKALIYQKKYLLLLLGGFQECEDATLALLARMGGQPAFTDLEVITNRPKGFTRFRSAVRVSIAISRMKFLVRRWHRVTGSVSININRDGFGLNQGAEKTDSFYHSSGGLELYGEPRHTTYRSRSDLDYIRSPLPFQNRYPGTPADFNPGSLACSQLQNYDPDRALTDYITRLEALQRRLGTIQSGSTTQFHAGMRR

SEQ ID NO: 35953 - protein, 1709 aa, Artificial Sequence
  Synthetic polypeptide
YPESTKNLNKFTRKNNPIKKWAKDTNRHFSKEDIYMAKKHTKKSSSSLVIREVQTKTTMRYHLMPVRKITNLEEQLEQFREELENKNEEVQQLHMQLEIQKKESTTRLQELEQENKLFKDDMEKLGLAIKESDAMSTQDQHVLFGKFAQIIQEKEVEIDQLNEQVTKLQQQLKITTDNKVIEEKNELIRDLETQIECLMSDQECVKRNREEEIEQLNEVIEKLQQELANIGQKTSMNAHSLSEEADSLKHQLDVVIAEKLALEQQVETANEEMTFMKNVLKETNFKMNQLTQELFSLKRERESVEKIQSIPENSVNVAIDHLSKDKPELEVVLTEDALKSLENQTYFKSFEENGKGSIINLETRLLQLESTVSAKDLELTQCYKQIKDMQEQGQFETEMLQKKIVNLQKIVEEKVAAALVSQIQLEAVQEYAKFCQDNQTISSEPERTNIQNLNQLREDELGSDISALTLRISELESQVVEMHTSLILEKEQVEIAEKNVLEKEKKLLELQKLLEGNEKKQREKEKKRSPQDVEVLKTTTELFHSNEESGFFNELEALRAESVATKAELASYKEKAEKLQEELLVKETNMTSLQKDLSQVRDHLAEAKEKLSILEKEDETEVQESKKACMFEPLPIKLSKSIASQTDGTLKISSSNQTPQILVKNAGIQINLQSECSSEEVTEIISQFTEKIEKMQELHAAEILDMESRHISETETLKREHYVAVQLLKEECGTLKAVIQCLRSKEGLLRAVHNEGMQVLSLTESPYSDGEDHSIQQVSEPWLEERKAYINTISSLKDLITKMQLQREAEVYDSSQSHESFSDWRGELLLALQQVFLEERSVLLAAFRTELTALGTTDAVGLLNCLEQRIQEQGVEYQAAMECLQKADRRSLLSEIQALHAQMNGRKITLKREQESEKPSQELLEYNIQQKQSQMLEMQVELSSMKDRATELQEQLSSEKMVVAELKSELAQTKLELETTLKAQHKHLKELEAFRLEVKDKTDEVHLLNDTLASEQKKSRELQWALEKEKAKLGRSEERDKEELEDLKFSLESQKQRNLQLNLLLEQQKQLLNESQQKIESQRMLYDAQLSEEQGRNLELQVLLESEKVRIREMSSTLDRERELHAQLQSSDGTGQSRPPLPSEDLLKELQKQLEEKHSRIVELLNETEKYKLDSLQTRQQMEKDRQVHRKTLQTEQEANTEGQKKMHELQSKVEDLQRQLEEKRQQVYKLDLEGQRLQGIMQEFQKQELEREEKRESRRILYQNLNEPTTWSLTSDRTRNWVLQQKIEGETKESNYAKLIEMNGGGTGCNHELEMIRQKLQCVASKLQVLPQKASERLQFETADDEDFIWVQENIDEIILQLQKLTGQQGEEPSLVSPSTSCGSLTERLLRQNAELTGHISQLTEEKNDLRNMVMKLEEQIRWYRQTGAGRDNSSRFSLNGGANIEAIIASEKEVWNREKLTLQKSLKRAEAEVYKLKAELRNDSLLQTLSPDSEHVTLKRIYGKYLRAESFRKALIYQKKYLLLLLGGFQECEDATLALLARMGGQPAFTDLEVITNRPKGFTRFRSAVRVSIAISRMKFLVRRWHRVTGSVSININRDGFGLNQGAEKTDSFYHSSGGLELYGEPRHTTYRSRSDLDYIRSPLPFQNRYPGTPADFNPGSLACSQLQNYDPDRALTDYITRLEALQRRLGTIQSGSTTQFHAGMRR

SEQ ID NO: 35954 - protein, 1763 aa, Artificial Sequence
  Synthetic polypeptide
YPESTKNLNKFTRKNNPIKKWAKDTNRHFSKEDIYMAKKHTKKSSSSLVIREVQTKTTMRYHLMPVRKITNLEEQLEQFREELENKNEEVQQLHMQLEIQKKESTTRLQELEQENKLFKDDMEKLGLAIKESDAMSTQDQHVLFGKFAQIIQEKEVEIDQLNEQVTKLQQQLKITTDNKVIEEKNELIRDLETQIECLMSDQECVKRNREEEIEQLNEVIEKLQQELANIGQKTSMNAHSLSEEADSLKHQLDVVIAEKLALEQQVETANEEMTFMKNVLKETNFKMNQLTQELFSLKRERESVEKIQSIPENSVNVAIDHLSKDKPELEVVLTEDALKSLENQTYFKSFEENGKGSIINLETRLLQLESTVSAKDLELTQCYKQIKDMQEQGQFETEMLQKKIVNLQKIVEEKVAAALVSQIQLEAVQEYAKFCQDNQTISSEPERTNIQNLNQLREDELGSDISALTLRISELESQVVEMHTSLILEKEQVEIAEKNVLEKEKKLLELQKLLEGNEKKQREKEKKRSPQDVEVLKTTTELFHSNEESGFFNELEALRAESVATKAELASYKEKAEKLQEELLVKETNMTSLQKDLSQVRDHLAEAKEKLSILEKEDETEVQESKKACMFEPLPIKLSKSIASQTDGTLKISSSNQTPQILVKNAGIQINLQSECSSEEVTEIISQFTEKIEKMQELHAAEILDMESRHISETETLKREHYVAVQLLKEECGTLKAVIQCLRSKEVFGFYNMCFSTLCDSGSDWGQGIYLTHSQGFDIASEGRGEESESATDSFPKKIKGLLRAVHNEGMQVLSLTESPYSDGEDHSIQQVSEPWLEERKAYINTISSLKDLITKMQLQREAEVYDSSQSHESFSDWRGELLLALQQVFLEERSVLLAAFRTELTALGTTDAVGLLNCLEQRIQEQGVEYQAAMECLQKADRRSLLSEIQALHAQMNGRKITLKREQESEKPSQELLEYNIQQKQSQMLEMQVELSSMKDRATELQEQLSSEKMVVAELKSELAQTKLELETTLKAQHKHLKELEAFRLEVKDKTDEVHLLNDTLASEQKKSRELQWALEKEKAKLGRSEERDKEELEDLKFSLESQKQRNLQLNLLLEQQKQLLNESQQKIESQRMLYDAQLSEEQGRNLELQVLLESEKVRIREMSSTLDRERELHAQLQSSDGTGQSRPPLPSEDLLKELQKQLEEKHSRIVELLNETEKYKLDSLQTRQQMEKDRQVHRKTLQTEQEANTEGQKKMHELQSKVEDLQRQLEEKRQQVYKLDLEGQRLQGIMQEFQKQELEREEKRESRRILYQNLNEPTTWSLTSDRTRNWVLQQKIEGETKESNYAKLIEMNGGGTGCNHELEMIRQKLQCVASKLQVLPQKASERLQFETADDEDFIWVQENIDEIILQLQKLTGQQGEEPSLVSPSTSCGSLTERLLRQNAELTGHISQLTEEKNDLRNMVMKLEEQIRWYRQTGAGRDNSSRFSLNGGANIEAIIASEKEVWNREKLTLQKSLKRAEAEVYKLKAELRNDSLLQTLSPDSEHVTLKRIYGKYLRAESFRKALIYQKKYLLLLLGGFQECEDATLALLARMGGQPAFTDLEVITNRPKGFTRFRSAVRVSIAISRMKFLVRRWHRVTGSVSININRDGFGLNQGAEKTDSFYHSSGGLELYGEPRHTTYRSRSDLDYIRSPLPFQNRYPGTPADFNPGSLACSQLQNYDPDRALTDYITRLEALQRRLGTIQSGSTTQFHAGMRR

SEQ ID NO: 35955 - protein, 1787 aa, Artificial Sequence
  Synthetic polypeptide
YPESTKNLNKFTRKNNPIKKWAKDTNRHFSKEDIYMAKKHTKKSSSSLVIREVQTKTTMRYHLMPVRKITNLEEQLEQFREELENKNEEVQQLHMQLEIQKKESTTRLQELEQENKLFKDDMEKLGLAIKESDAMSTQDQHVLFGKFAQIIQEKEVEIDQLNEQVTKLQQQLKITTDNKVIEEKNELIRDLETQIECLMSDQECVKRNREEEIEQLNEVIEKLQQELANIGQKTSMNAHSLSEEADSLKHQLDVVIAEKLALEQQVETANEEMTFMKNVLKETNFKMNQLTQELFSLKRERESVEKIQSIPENSVNVAIDHLSKDKPELEVVLTEDALKSLENQTYFKSFEENGKGSIINLETRLLQLESTVSAKDLELTQCYKQIKDMQEQGQFETEMLQKKIVNLQKIVEEKVAAALVSQIQLEAVQEYAKFCQDNQTISSEPERTNIQNLNQLREDELGSDISALTLRISELESQVVEMHTSLILEKEQVEIAEKNVLEKEKKLLELQKLLEGNEKKQREKEKKRSPQDVEVLKTTTELFHSNEESGFFNELEALRAESVATKAELASYKEKAEKLQEELLVKETNMTSLQKDLSQVRDHLAEAKEKLSILEKEDETEVQESKKACMFEPLPIKLSKSIASQTDGTLKISSSNQTPQILVKNAGIQINLQSECSSEEVTEIISQFTEKIEKMQELHAAEILDMESRHISETETLKREHYVAVQLLKEECGTLKAVIQCLRSKEGSSIPELAHSDAYQTREICSSDSGSDWGQGIYLTHSQGFDIASEGRGEESESATDSFPKKIKGLLRAVHNEGMQVLSLTESPYSDGEDHSIQQVSEPWLEERKAYINTISSLKDLITKMQLQREAEVYDSSQSHESFSDWRGELLLALQQVFLEERSVLLAAFRTELTALGTTDAVGLLNCLEQRIQEQGVEYQAAMECLQKADRRSLLSEIQALHAQMNGRKITLKREQESEKPSQELLEYNIQQKQSQMLEMQVELSSMKDRATELQEQLSSEKMVVAELKSELAQTKLELETTLKAQHKHLKELEAFRLEVKDKTDEVHLLNDTLASEQKKSRELQWALEKEKAKLGRSEERDKEELEDLKFSLESQKQRNLQLNLLLEQQKQLLNESQQKIESQRMLYDAQLSEEQGRNLELQVLLESEKVRIREMSSTLDRERELHAQLQSSDGTGQSRPPLPSEDLLKELQKQLEEKHSRIVELLNETEKYKLDSLQTRQQMEKDRQVHRKTLQTEQEANTEGQKKMHELQSKVEDLQRQLEEKRQQVYKLDLEGQRLQGIMQEFQKQELEREEKRESRRILYQNLNEPTTWSLTSDRTRNWVLQQKIEGETKESNYAKLIEMNGGGTGCNHELEMIRQKLQCVASKLQVLPQKASERLQFETADDEDFIWVQENIDEIILQLQKLTGQQGEEPSLVSPSTSCGSLTERLLRQNAELTGHISQLTEEKNDLRNMVMKLEEQIRWYRQTGAGRDNSSRFSLNGGANIEAIIASEKEVWNREKLTLQKSLKRAEAEVYKLKAELRNDSLLQTLSPDSEHVTLKRIYGKYLRAESFRKALIYQKKYLLLLLGGFQECEDATLALLARMGGQPAFTDLEVITNRPKGFTRFRSAVRVSIAISRMKFLVRRWHRVTGSVSININRDGFGLNQGAEKTDSFYHSSGGLELYGEPRHTTYRSRSDLDYIRSPLPFQNRYPGTPADFNPGSLACSQLQNYDPDRALTDYITRLEALQRRLGTIQSGALSLTTSWQHHSARPTAPLSLKFFHTH

SEQ ID NO: 35956 - protein, 414 aa, Artificial Sequence
  Synthetic polypeptide
SQHFGRPRYGKVEATRILLEKGKCNPNLLNGQLSSPLHFAAGGGHAEIVQILLNHPETDRHITDQQGRSPLNICEENKQNNWEEAAKLLKEAINKPYEKVRIYRMDGSYRSVELKHGNNTTVQQIMEGMRLSQETQQYFTIWICSENLSLQLKPYHKPLQHVRDWPEILAELTNLDPQRETPQLFLRRDVRLPLEVEKQIEDPLAILILFDEARYNLLKGFYTAPDAKLITLASLLLQIVYGNYESKKHKQGFLNEENLKSIVPVTKLKSKAPHWTNRILHEYKNLSTSEGVSKEMHHLQRMFLQNCWEIPTYGAAFFTGQIFTKASPSNHKVIPVYVGVNIKGLHLLNMETKALLISLKYGCFMWQLGDTDTCFQIHSMENKMSFIVHTKQAGLVVKLLMKLNGQLMPTERNS

SEQ ID NO: 35957 - protein, 27 aa, Artificial Sequence
  Synthetic polypeptide
PGAVAHTCNPSTLGGQGMEKLRPLAYC

SEQ ID NO: 35958 - protein, 20 aa, Artificial Sequence
  Synthetic polypeptide
RVQWLTPVIPALWEAKVWKS

SEQ ID NO: 35959 - protein, 80 aa, Artificial Sequence
  Synthetic polypeptide
SQHFGRPRYGKVEATRILLEKGKCNPNLLNGQLSSPLHFAAGGGHAEIVQILLNHPETDRHITDQQGRSPLNICEENKQN

SEQ ID NO: 35960 - protein, 13 aa, Artificial Sequence
  Synthetic polypeptide
WMGHKRLGQGEIT

SEQ ID NO: 35961 - protein, 834 aa, Artificial Sequence
  Synthetic polypeptide
HSGWDIKDWDREKLLEAWMSNPENCCQRSGVQMPTPPPSGYNAWDTLPSPRTPRTTRSSVTSPDEISLSPGDLDTSLCDICMCSISVFEDPVDMPCGHDFCRGCWESFLNLKIQEGEAHNIFCPAYDCFQLVPVDIIESVVSKEMDKRYLQFDIKAFVENNPAIKWCPTPGCDRAVRLTKQGSNTSGSDTLSFPLLRAPAVDCGKGHLFCWECLGEAHEPCDCQTWKNWLQKITEMKPEELVGVSEAYEDAANCLWLLTNSKPCANCKSPIQKNEGCNHMQCAKCKYDFCWICLEEWKKHSSSTGGYYRCTRYEVIQHVEEQSKEMTVEAEKKHKRFQELDRFMHYYTRFKNHEHSYQLEQRLLKTAKEKMEQLSRALKETEGGCPDTTFIEDAVHVLLKTRRILKCSYPYGFFLEPKSTKKEIFELMQTDLEMVTEDLAQKVNRPYLRTPRHKIIKAACLVQQKRQEFLASVARGVAPADSPEAPRRSFAGGTWDWEYLGFASPEEYAEFQYRRRHRQRRRGDVHSLLSNPPDPDEPSESTLDIPEGGSSSRRPGTSVVSSASMSVLHSSSLRDYTPASRSENQDSLQALSSLDEDDPNILLAIQLSLQESGLALDEETRDFLSNEASLGAIGTSLPSRLDSVPRNTDSPRAALSSSELLELGDSLMRLGAENDPFSTDTLSSHPLSEARSDFCPSSSDPDSAGQDPNINDNLLGNIMAWFHDMNPQSIALIPPATTEISADSQLPCIKDGSEGVKDVELVLPEDSMFEDASVSEGRGTQIEENPLEENILAGEAASQAGDSGNEAANRGDGSDVSSQTPQTSSDWLEQVHLV

SEQ ID NO: 35962 - protein, 66 aa, Artificial Sequence
  Synthetic polypeptide
KTGTGRNYLKLGCPTRRTAANDQVFKCQLHHQVGIMPGTRSHLQELQGLHALLSPPQMKSAYLLGI

SEQ ID NO: 35963 - protein, 43 aa, Artificial Sequence
  Synthetic polypeptide
ALVLVIGSSVFTVLLGTGIYNQFGISVLINTRSSCCGSHEGIS

SEQ ID NO: 35964 - protein, 343 aa, Artificial Sequence
  Synthetic polypeptide
SLDLLCLQYYLAQVYTINLESQYLLIQGVPAVGVMKELVERFALYGAIEQYNALDEYPAEDFTEVYLIKFMNLQSARTAKRKMDEQSFFGGLLHVCYAPEFETVEETRKKLQMRKAYVVKTTENKDHYVTKKKLVTEHKDTEDFRQDFHSEMSGFCKAALNTSAGNSNPYLPYSCELPLCYFSSKCMCSSGGPVDRAPDSSKDGRNHHKTMGHYNHNDSLRKTQINSLKNSVACPGAQKAITSSEAVDRFMPRTTQLQERKRRREDDRKLGTFLQTNPTGNEIMIGPLLPDISKVDMHDDSLNTTANLIRHKLKEVISSVPKPPEDKPEDVHTSHPLKQRRRI

SEQ ID NO: 35965 - protein, 36 aa, Artificial Sequence
  Synthetic polypeptide
NINSTRIGLGFSHWIFCVYSTTWHRYIQSIWNLSTY

SEQ ID NO: 35966 - protein, 352 aa, Artificial Sequence
  Synthetic polypeptide
SLDLLCLQYYLAQVYTINLESQYLLIQGVPAVGVMKELVERFALYGAIEQYNALDEYPAEDFTEVYLIKFMNLQSARTAKRKMDEQSFFGGLLHVCYAPEFETVEETRKKLQMRKAYVVKTTENKDHYVTKKKLVTEHKDTEDFRQDFHSEMSGFCKAALNTSAGNSNPYLPYSCELPLCYFSSKCMCSSGGPVDRAPDSSKDGRNHHKTMGHYNHNDSLRKTQINSLKNSVACPGAQKAITSSEAVDRFMPRTTQLQERKRRREDDRKLGTFLQTNPTGNEIMIGPLLPDISKVDMHDDSLNTTANLIRHKLKEVRLFLKNYSKTRFGYRIKWRIICGNNSTVIFFHFLVF

SEQ ID NO: 35967 - protein, 147 aa, Artificial Sequence
  Synthetic polypeptide
YVCLLIILELLGEEDYPGAIQLCLECQKAASTFKHYSCISELNSKLQDTLEQIEEQLDVALSKICKNFDINHYTKVQQAYRLLGKTQTAMDQLHMHFTQAIHNTVFQVVLGYVELCAGNTDTKFQKLQYKDLCTVCSDLITIHISLL

SEQ ID NO: 35968 - protein, 32 aa, Artificial Sequence
  Synthetic polypeptide
YLSSLGRKIIQELFSCALNVKKLPALLNITVV

SEQ ID NO: 35969 - protein, 15 aa, Artificial Sequence
  Synthetic polypeptide
APWGGRLSRSYSVVP

SEQ ID NO: 35970 - protein, 784 aa, Artificial Sequence
  Synthetic polypeptide
YVCLLIILELLGEEDYPGAIQLCLECQKAASTFKHYSCISELNSKLQDTLEQIEEQLDVALSKICKNFDINHYTKVQQAYRLLGKTQTAMDQLHMHFTQAIHNTVFQVVLGYVELCAGNTDTKFQKLQYKDLCTHVTPDSYIPCLADLCKALWEVMLSYYRTMEWHEKHDNEDTASASEGSNMIGTEETNFDRGYIKKKLEHGLTRIWQDVQLKVKTYLLGTDLSIFKYDDFIFVLDIISRLMQVGEEFCGSKSEVLQESIRKQSVNYFKNYHRTRLDELRMFLENETWELCPVKSNFSILQLHEFKFMEQSRSPSVSPSKQPVSTSSKTVTLFEQYCSGGNPFEIQANHKDEETEDVLASNGYESDEQEKSAYQEYDSDSDVPEELKRDYVDEQTGDGPVKSVSRETLKSRKKSDYSLNKVNAPILTNTTLNVIRLVGKYMQMMNILKPIAFDVIHFMSQLFDYYLYAIYTFFGRNDSLESTGLGLSSSRLRTTLNRIQESLIDLEVSADPTATLTAAEERKEKVPSPHLSHLVVLTSGDTLYGLAERVVATESLVFLAEQFEFLQPHLDAVMPAVKKPFLQQFYSQTVSTASELRKPIYWIVAGKALDYEQMLLLMANVKWDVKEIMSQHNIYVDALLKEFEQFNRRLNEVSKRVRIPLPVSNILWEHCIRLANRTIVEGYANVKKCSNEGRALMQLDFQQFLMKLEKLTDIRPIPDKEFVETYIKAYYLTENDMERWIKEHREYSTKQLTNLVNVCLGSHINKKARQKLLAAIDDIDRPKR

SEQ ID NO: 35971 - protein, 602 aa, Artificial Sequence
  Synthetic polypeptide
YVCLLIILELLGEEDYPGAIQLCLECQKAASTFKHYSCISELNSKLQDTLEQIEEQLDVALSKICKNFDINHYTKVQQAYRLLGKTQTAMDQLHMHFTQAIHNTVFQVVLGYVELCAGNTDTKFQKLQYKDLCTHVTPDSYIPCLADLCKALWEVMLSYYRTMEWHEKHDNEDTASASEGSNMIGTEETNFDRGYIKKKLEHGLTRIWQDVQLKVKTYLLGTDLSIFKYDDFIFVLDIISRLMQVGEEFCGSKSEVLQESIRKQSVNYFKNYHRTRLDELRMFLENETWELCPVKSNFSILQLHEFKFMEQSRSPSVSPSKQPVSTSSKTVTLFEQYCSGGNPFEIQANHKDEETEDVLASNGYESDEQEKSAYQEYDSDSDVPEELKRDYVDEQTGDGPVKSVSRETLKSRKKSDYSLNKVNAPILTNTTLNVIRLVGKYMQMMNILKPIAFDVIHFMSQLFDYYLYAIYTFFGRNDSLESTGLGLSSSRLRTTLNRIQESLIDLEVSADPTATLTAAEERKEKVPSPHLSHLVVLTSGDTLYGLAERVVATESLVFLAEQFEFLQPHLDAVMPAVKKPFLQQFYSQSQPPVNYGNQFTGL

SEQ ID NO: 35972 - protein, 66 aa, Artificial Sequence
  Synthetic polypeptide
QFFKIKTAMDQLHMHFTQAIHNTVFQVVLGYVELCAGNTDTKFQKLQYKDLCTVCSDLITIHISLL

SEQ ID NO: 35973 - protein, 120 aa, Artificial Sequence
  Synthetic polypeptide
KEESTNAGNFTVVFSEIAIATSAFSNQHPDQSAAINIETRPSTRKKIDSLKAQMIISIFLNFSNFLKLRQQWINFICTSPKPFTTPCFKLFLVMWNYVQETQTQNSKSCNIRISVQYVVT

SEQ ID NO: 35974 - protein, 703 aa, Artificial Sequence
  Synthetic polypeptide
QFFKIKTAMDQLHMHFTQAIHNTVFQVVLGYVELCAGNTDTKFQKLQYKDLCTHVTPDSYIPCLADLCKALWEVMLSYYRTMEWHEKHDNEDTASASEGSNMIGTEETNFDRGYIKKKLEHGLTRIWQDVQLKVKTYLLGTDLSIFKYDDFIFVLDIISRLMQVGEEFCGSKSEVLQESIRKQSVNYFKNYHRTRLDELRMFLENETWELCPVKSNFSILQLHEFKFMEQSRSPSVSPSKQPVSTSSKTVTLFEQYCSGGNPFEIQANHKDEETEDVLASNGYESDEQEKSAYQEYDSDSDVPEELKRDYVDEQTGDGPVKSVSRETLKSRKKSDYSLNKVNAPILTNTTLNVIRLVGKYMQMMNILKPIAFDVIHFMSQLFDYYLYAIYTFFGRNDSLESTGLGLSSSRLRTTLNRIQESLIDLEVSADPTATLTAAEERKEKVPSPHLSHLVVLTSGDTLYGLAERVVATESLVFLAEQFEFLQPHLDAVMPAVKKPFLQQFYSQTVSTASELRKPIYWIVAGKALDYEQMLLLMANVKWDVKEIMSQHNIYVDALLKEFEQFNRRLNEVSKRVRIPLPVSNILWEHCIRLANRTIVEGYANVKKCSNEGRALMQLDFQQFLMKLEKLTDIRPIPDKEFVETYIKAYYLTENDMERWIKEHREYSTKQLTNLVNVCLGSHINKKARQKLLAAIDDIDRPKR

SEQ ID NO: 35975 - protein, 164 aa, Artificial Sequence
  Synthetic polypeptide
KEESTNAGNFTVVFSEIAIATSAFSNQHPDQSAAINIETRPSTRKKIDSLKAQMIISIFLNFSNFLKLRQQWINFICTSPKPFTTPCFKLFLVMWNYVQETQTQNSKSCNIRISVHMLHQTAIFHALQTCAKHYGKLCSAIIGLWNGMKSMTMRILLQLLKGVI

SEQ ID NO: 35976 - protein, 521 aa, Artificial Sequence
  Synthetic polypeptide
QFFKIKTAMDQLHMHFTQAIHNTVFQVVLGYVELCAGNTDTKFQKLQYKDLCTHVTPDSYIPCLADLCKALWEVMLSYYRTMEWHEKHDNEDTASASEGSNMIGTEETNFDRGYIKKKLEHGLTRIWQDVQLKVKTYLLGTDLSIFKYDDFIFVLDIISRLMQVGEEFCGSKSEVLQESIRKQSVNYFKNYHRTRLDELRMFLENETWELCPVKSNFSILQLHEFKFMEQSRSPSVSPSKQPVSTSSKTVTLFEQYCSGGNPFEIQANHKDEETEDVLASNGYESDEQEKSAYQEYDSDSDVPEELKRDYVDEQTGDGPVKSVSRETLKSRKKSDYSLNKVNAPILTNTTLNVIRLVGKYMQMMNILKPIAFDVIHFMSQLFDYYLYAIYTFFGRNDSLESTGLGLSSSRLRTTLNRIQESLIDLEVSADPTATLTAAEERKEKVPSPHLSHLVVLTSGDTLYGLAERVVATESLVFLAEQFEFLQPHLDAVMPAVKKPFLQQFYSQSQPPVNYGNQFTGL

SEQ ID NO: 35977 - protein, 421 aa, Artificial Sequence
  Synthetic polypeptide
QFFKIKTAMDQLHMHFTQAIHNTVFQVVLGYVELCAGNTDTKFQKLQYKDLCTHVTPDSYIPCLADLCKALWEVMLSYYRTMEWHEKHDNEDTASASEGSNMIGTEETNFDRGYIKKKLEHGLTRIWQDVQLKVKTYLLGTDLSIFKYDDFIFVLDIISRLMQVGEEFCGSKSEVLQESIRKQSVNYFKNYHRTRLDELRMFLENETWELCPVKSNFSILQLHEFKFMEQSRSPSVSPSKQPVSTSSKTVTLFEQYCSGGNPFEIQANHKDEETEDVLASNGYESDEQEKSAYQEYDSDSDVPEELKRDYVDEQTGDGPVKSVSRETLKSRKKSDYSLNKVNAPILTNTTLNVIRLVDGVSLCCLGWSTVAHLHSLQAPPPGFKPFSCLSLPRSWDYRRPPPRPANFLYFLFFSRDGVSPC

SEQ ID NO: 35978 - protein, 34 aa, Artificial Sequence
  Synthetic polypeptide
YMVKEYLLATMGTMAMLIVGIVPVKKKMRGSLKV

SEQ ID NO: 35979 - protein, 11 aa, Artificial Sequence
  Synthetic polypeptide
APRKNSGSDTW

SEQ ID NO: 35980 - protein, 131 aa, Artificial Sequence
  Synthetic polypeptide
HLERTVDLIHGEGVPPGNYGNYGYANSGYSACEEENERLTESLRSKVTAIKSLSIEIGHEVKTQNKLLAEMDSQFDSTTGFLVDPSGSRDFTSSSESLLLLILTVPQHLSRSLKRRRLTFSAIYHSCRIIS

SEQ ID NO: 35981 - protein, 122 aa, Artificial Sequence
  Synthetic polypeptide
HLERTVDLIHGEGVPPGNYGNYGYANSGYSACEEENERLTESLRSKVTAIKSLSIEIGHEVKTQNKLLAEMDSQFDSTTGFLGKTMGKLKILSRGSQTKLLCYMMLFSLFVFFIIYWIIKLR

SEQ ID NO: 35982 - protein, 87 aa, Artificial Sequence
  Synthetic polypeptide
HLERTVDLIHGEGVPPGNYGNYGYANSGYSACEEENERLTESLRSKVTAIKSLSIEIGHEVKTQNKLLAEMDSQFDSTTGFLGLCPM

SEQ ID NO: 35983 - protein, 102 aa, Artificial Sequence
  Synthetic polypeptide
HLERTVDLIHGEGVPPGNYGNYGYANSGYSACEEENERLTESLRSKVTAIKSLSIEIGHEVKTQNKLLAEMVSGYDFNFKKFDLIFANNRISTFIHFEIQRS

SEQ ID NO: 35984 - protein, 31 aa, Artificial Sequence
  Synthetic polypeptide
PTCFCLYTCTFEFWLLHIYFRQGMGISHTFG

SEQ ID NO: 35985 - protein, 58 aa, Artificial Sequence
  Synthetic polypeptide
HFRRPRWVDHLRSGVQDQPSQHVFACIHAHSSSGCCIFISDRVWAFLILLDKRRFWNL

SEQ ID NO: 35986 - protein, 356 aa, Artificial Sequence
  Synthetic polypeptide
GQEFKTSLANMFLPVYMHIRVLVAAYLFQTGYGHFSYFWIKGDFGIYRVCQVLFRLNFLVVVLCIVMDRPYQFYYFVPLVTVWFMVIYVTLALWPQIIQKKANGNCFWHFGLLLKLGFLLLFICFLAYSQGAFEKIFSLWPLSKCFELKGNVYEWWFRWRLDRYVVFHGMLFAFIYLALQKRQILSEGKGEPLFSNKISNFLLFISVVSFLTYSIWASSCKNKAECNELHPSVSVVQILAFILIRNIPGYARSVYSSFFAWFGKISLELFICQYHIWLAADTRGILVLIPGNPMLNIIVSTFIFVCVAHEISQITNDLAQIIIPKDNSSLLKRLACIAAFFCGLLILSSIQDKSKH

SEQ ID NO: 35987 - protein, 36 aa, Artificial Sequence
  Synthetic polypeptide
VGAGASVQYFLQGTLRSECIPISRCPLCSCFGKRIF

SEQ ID NO: 35988 - protein, 414 aa, Artificial Sequence
  Synthetic polypeptide
DSGLQAFELVLEQVYSIFSKVHSDRNVYPSAGVLFVHVLEREYFKGEFPPYPKPGEISNDPITFNTNLMGYPDRPGWLRYIQRTPYSDGVLYGSPTAENVGKPTIIEITAYNRRTFETARHNLIINIMSAEDFPLPYQAEFFIKNMNVEEMLASEVLGDFLGAVKNVWQPERLNAINITSALDRGGRVPLPINDLKEGVYVMVGADVPFSSCLREVENPQNQLRCSQEMEPVITCDKKFRTQFYIDWCKISLVDKTKQVSTYQEVIRGEGILPDGGEYKPPSDSLKSRDYYTDFLITLAVPSAVALVLFLILAYIMCCRREGVEKRNMQTPDIQLVHHSAIQKSTKELRDMSKNREIAWPLSTLPVFHPVTGEIIPPLHTDNYDSTNMPLMQTQQNLPHQTQIPQQQTTGKWYP

SEQ ID NO: 35989 - protein, 65 aa, Artificial Sequence
  Synthetic polypeptide
HLDETLDFRLLSWCWSKCTVFSPRYTPIGMYTHQQVSSLFMFWKENILRGNFHLTQNLARLVMIP

SEQ ID NO: 35990 - protein, 439 aa, Artificial Sequence
  Synthetic polypeptide
DSGLQAFELVLEQVYSIFSKVHSDRNVYPSAGVLFVHVLEREYFKGEFPPYPKPGEISNDPITFNTNLMGYPDRPGWLRYIQRTPYSDGVLYGSPTAENVGKPTIIEITAYNRRTFETARHNLIINIMSAEDFPLPYQAEFFIKNMNVEEMLASEVLGDFLGAVKNVWQPERLNAINITSALDRGGRVPLPINDLKEGVYVMVGADVPFSSCLREVENPQNQLRCSQEMEPVITCDKKFRTQFYIDWCKISLVDKTKQVSTYQEVIRGEGILPDGGEYKPPSDSLKSRDYYTDFLITLAVPSAVALVLFLILAYIMCCRREGVEKRNMQTPDIQLVHHSAIQKSTKELRDMSKNREIAWPLSTLPVFHPVTGEIIPPLHTDNYDSTNMPLMQTQQWSFAPVAQAGVQWSDLGSLQPPPPRNLPHQTQIPQQQTTGKWYP

SEQ ID NO: 35991 - protein, 405 aa, Artificial Sequence
  Synthetic polypeptide
DSGLQAFELVLEQVYSIFSKVHSDRNVYPSAGVLFVHVLEREYFKGEFPPYPKPGEISNDPITFNTNLMGYPDRPGWLRYIQRTPYSDGVLYGSPTAENVGKPTIIEITAYNRRTFETARHNLIINIMSAEDFPLPYQAEFFIKNMNVEEMLASEVLGDFLGAVKNVWQPERLNAINITSALDRGGRVPLPINDLKEGVYVMVGADVPFSSCLREVENPQNQLRCSQEMEPVITCDKKFRTQFYIDWCKISLVDKTKQVSTYQEVIRGEGILPDGGEYKPPSDSLKSRDYYTDFLITLAVPSAVALVLFLILAYIMCCRREGVIQLVHHSAIQKSTKELRDMSKNREIAWPLSTLPVFHPVTGEIIPPLHTDNYDSTNMPLMQTQQNLPHQTQIPQQQTTGKWYP

SEQ ID NO: 35992 - protein, 428 aa, Artificial Sequence
  Synthetic polypeptide
DSGLQAFELVLEQVYSIFSKVHSDRNVYPSAGVLFVHVLEREYFKGEFPPYPKPGEISNDPITFNTNLMGYPDRPGWLRYIQRTPYSDGVLYGSPTAENVGKPTIIEITAYNRRTFETARHNLIINIMSAEDFPLPYQAEFFIKNMNVEEMLASEVLGDFLGAVKNVWQPERLNAINITSALDRGGRVPLPINDLKEGVYVMVGADVPFSSCLREVENPQNQLRCSQEMEPVITCDKKFRTQFYIDWCKISLVDKTKQVSTYQEVIRGEGILPDGGEYKPPSDSLKSRDYYTDFLITLAVPSAVALVLFLILAYIMCCRREGVIQLVHHSAIQKSTKELRDMSKNREIAWPLSTLPVFHPVTGEIIPPLHTDNYDSTNMPLMQTQQNLPHQTQIPQQQTTGDFRLTTFQRFEVNGIPEERKLTEAMNL

SEQ ID NO: 35993 - protein, 412 aa, Artificial Sequence
  Synthetic polypeptide
DSGLQAFELVLEQVYSIFSKVHSDRNVYPSAGVLFVHVLEREYFKGEFPPYPKPGEISNDPITFNTNLMGYPDRPGWLRYIQRTPYSDGVLYGSPTAENVGKPTIIEITAYNRRTFETARHNLIINIMSAEDFPLPYQAEFFIKNMNVEEMLASEVLGDFLGAVKNVWQPERLNAINITSALDRGGRVPLPINDLKEGVYVMVGADVPFSSCLREVENPQNQLRCSQEMEPVITCDKKFRTQFYIDWCKISLVDKTKQVSTYQEVIRGEGILPDGGEYKPPSDSLKSRDYYTDFLITLAVPSAVALVLFLILAYIMCCRREGVEKRNMQTPDIQLVHHSAIQKSTKELRDMSKNREIAWPLSTLPVFHPVTGEIIPPLHTDNYDSTNMPLMQTQQNLPHQTQIPQQQTTGEC

SEQ ID NO: 35994 - protein, 63 aa, Artificial Sequence
  Synthetic polypeptide
IMGMGLSCAVVVTVNESHEIMMVLKRGVSLQKLFSCLLPCEMCLSPSAMIVGPSQPCGTNTSQ

SEQ ID NO: 35995 - protein, 834 aa, Artificial Sequence
  Synthetic polypeptide
LWGLPSHVELIQVNDQIVEVDGISLVGVTQNFAATVLRNTKGNVRFVIGREKPGQVSEVAQLISQTLEQERRQRELLEQHYAQYDADDDENTVAELQGMSGNCNNNNNYFLKTGEYATDEEEDEVGPVLPGSDMAIEVFELPENEDMFSPSELDTSKLSHKFKELQIKHAVTEAEIQKLKTKLQAAENEKVRWELEKTQLQQNIEENKERMLKLESYWIEAQTLCHTVNEHLKETQSQYQALEKKYNKAKKLIKDFQQKELDFIKRQEAERKKIEDLEKAHLVEVQGLQVRIRDLEAEVFRLLKQNGTQVNNNNNIFERRTSLGEVSKGDTMENLDGKQTSCQDGLSQDLNEAVPETERLDSKALKTRAQLSVKNRRQRPSRTRLYDSVSSTDGEDSLERKPSNSFYNHMHITKLLPPKGLRTSSPESDSGVPPLTPVDSNVPFSSDHIAEFQEEPLDPEMGPLSSMWGDTSLFSTSKSDHDVEESPCHHQTTNKKILREKDDAKDPKSLRASSSLAVQGGKIKRKFVDLGAPLRRNSSKGKKWKEKEKEASRFSAGSRIFRGRLENWTPKPCSTAQTSTRSPCMPFSWFNDSRKGSYSFRNLPAPTSSLQPSPETLISDKKGSKVENTWITKANKRNPNPSSSSIFGRHSQLMSVVWIQETNNFTFNDDFSPSSTSSADLSGLGAEPKTPGLSQSLALSSDEILDDGQSPKHSQCQNRAVQEWSVQQVSHWLMSLNLEQYVSEFSAQNITGEQLLQLDGNKLKALGMTASQDRAVVKKKLKEMKMSLEKARKAQEKMEKQREKLRRKEQEQMQRKSKKTEKMTSTTAEGAGEQ

SEQ ID NO: 35996 - protein, 558 aa, Artificial Sequence
  Synthetic polypeptide
LWGLPSHVELIQVNDQIVEVDGISLVGVTQNFAATVLRNTKGNVRFVIGREKPGQVSEVAQLISQTLEQERRQRELLEQHYAQYDADDDETGEYATDEEEDEVGPVLPGSDMAIEVFELPENEDMFSPSELDTSKLSHKFKELQIKHAVTEAEIQKLKTKLQAAENEKVRWELEKTQLQQNIEENKERMLKLESYWIEAQTLCHTVNEHLKETQSQYQALEKKYNKAKKLIKDFQQKELDFIKRQEAERKKIEDLEKAHLVEVQGLQVRIRDLEAEVFRLLKQNGTQVNNNNNIFERRTSLGEVSKGDTMENLDGKQTSCQDGLSQDLNEAVPETERLDSKALKTRAQLSVKNRRQRPSRTRLYDSVSSTDGEDSLERKNFTFNDDFSPSSTSSADLSGLGAEPKTPGLSQSLALSSDESLDMIDDEILDDGQSPKHSQCQNRAVQEWSVQQVSHWLMSLNLEQYVSEFSAQNITGEQLLQLDGNKLKALGMTASQDRAVVKKKLKEMKMSLEKARKAQEKMEKQREKLRRKEQEQMQRKSKKTEKMTSTTAEGAGEQ

SEQ ID NO: 35997 - protein, 713 aa, Artificial Sequence
  Synthetic polypeptide
LWGLPSHVELIQVNDQIVEVDGISLVGVTQNFAATVLRNTKGNVRFVIGREKPGQVSEVAQLISQTLEQERRQRELLEQHYAQYDADDDETGEYATDEEEDEVGPVLPGSDMAIEVFELPENEDMFSPSELDTSKLSHKFKELQIKHAVTEAEIQKLKTKLQAAENEKVRWELEKTQLQQNIEENKERMLKLESYWIEAQTLCHTVNEHLKETQSQYQALEKKYNKAKKLIKDFQQKELDFIKRQEAERKKIEDLEKAHLVEVQGLQVRIRDLEAEVFRLLKQNGTQVNNNNNIFERRTSLGEVSKGDTMENLDGKQTSCQDGLSQDLNEAVPETERLDSKALKTRAQLSVKNRRQRPSRTRLYDSVSSTDGEDSLERKPSNSFYNHMHITKLLPPKGLRTSSPESDSGVPPLTPVDSNVPFSSDHIAEFQEEPLDPEMGPLSSMWGDTSLFSTSKSDHDVEESPCHHQTTNKKILREKDDAKDPKSLRASSSLAVQGGKIKRKFVDLGAPLRRNSSKGKKWKEKEKEASRFSAGSRIFRGRLENWTPKPCSTAQTSTRSPCMPFSWFNDSRKGSYSFRNLPAPTSSLQPSPETLISDKKGSKNFTFNDDFSPSSTSSADLSGLGAEPKTPGLSQSLALSSDEALGMTASQDRAVVKKKLKEMKMSLEKARKAQEKMEKQREKLRRKEQEQMQRKSKKTEKMTSTTAEGAGEQ

SEQ ID NO: 35998 - protein, 756 aa, Artificial Sequence
  Synthetic polypeptide
LWGLPSHVELIQVNDQIVEVDGISLVGVTQNFAATVLRNTKGNVRFVIGREKPGQVSEVAQLISQTLEQERRQRELLEQHYAQYDADDDETGEYATDEEEDEVGPVLPGSDMAIEVFELPENEDMFSPSELDTSKLSHKFKELQIKHAVTEAEIQKLKTKLQAAENEKVRWELEKTQLQQNIEENKERMLKLESYWIEAQTLCHTVNEHLKETQSQYQALEKKYNKAKKLIKDFQQKELDFIKRQEAERKKIEDLEKAHLVEVQGLQVRIRDLEAEVFRLLKQNGTQVNNNNNIFERRTSLGEVSKGDTMENLDGKQTSCQDGLSQDLNEAVPETERLDSKALKTRAQLSVKNRRQRPSRTRLYDSVSSTDGEDSLERKGLRTSSPESDSGVPPLTPVDSNVPFSSDHIAEFQEEPLDPEMGPLSSMWGDTSLFSTSKSDHDVEESPCHHQTTNKKILREKDDAKDPKSLRASSSLAVQGGKIKRKFVDLGAPLRRNSSKGKKWKEKEKEASRFSAGSRIFRGRLENWTPKPCSTAQTSTRSPCMPFSWFNDSRKGSYSFRNLPAPTSSLQPSPETLISDKKGSKNFTFNDDFSPSSTSSADLSGLGAEPKTPGLSQSLALSSDEILDDGQSPKHSQCQNRAVQEWSVQQVSHWLMSLNLEQYVSEFSAQNITGEQLLQLDGNKLKALGMTASQDRAVVKKKLKEMKMSLEKARKAQEKMEKQREKLRRKEQEQMQRKSKKTEKMTSTTAEGAGEQ

SEQ ID NO: 35999 - protein, 20 aa, Artificial Sequence
  Synthetic polypeptide
EVIHRLTTARRVHDTKKKST

SEQ ID NO: 36000 - protein, 359 aa, Artificial Sequence
  Synthetic polypeptide
MHFIVSIYKHYSKKLSTGSPLPEGSTTQKRNRLKASREVESVDLPHCHLIKGIEAGSEDIDILPNGLAFFSVGLKFPGLHSFAPDKPGGILMMDLKEEKPRARELRISRGFDLASFNPHGISTFIDNDDTVYLFVVNHPEFKNTVEIFKFEEAENSLLHLKTVKHELLPSVNDITAVGPAHFYATNDHYFSDPFLKYLETYLNLHWANVVYYSPNEVKVVAEGFDSANGINISPDDKYIYVADILAHEIHVLEKHTNMNLTQLKVLELDTLVDNLSIDPSSGDIWVGCHPNGQKLFVYDPNNPPSSEVLRIQNILSEKPTVTTVYANNGSVLQGSSVASVYDGKLLIGTLYHRALYCEL

SEQ ID NO: 36001 - protein, 33 aa, Artificial Sequence
  Synthetic polypeptide
AFINIILRSYPQAHHCQKGPRHKKEIDLKPPEK

SEQ ID NO: 36002 - protein, 224 aa, Artificial Sequence
  Synthetic polypeptide
MHFIVSIYKHYSKKLSTGSPLPEGSTTQKRNRLKASREVESVDLPHCHLIKGIEAGSEDIDILPNGLAFFSVGLKFPGLHSFAPDKPGGILMMDLKEEKPRARELRISRGFDLASFNPHGISTFIDNDDTVYLFVVNHPEFKNTVEIFKFEEAENSLLHLKTVKHELLPSVNDITAVGPAHFYATNDHYFSDPFLKYLETYLNLHWANVVYYSPNEVKVVYLCC

SEQ ID NO: 36003 - protein, 347 aa, Artificial Sequence
  Synthetic polypeptide
MHFIVSIYKHYSKKLSTGSPLPEGSTTQKRNRLKASREVESVDLPHCHLIKGIEAGSEDIDILPNGLAFFSVGLKFPGLHSFAPDKPGGILMMDLKEEKPRARELRISRGFDLASFNPHGISTFIDNEFKNTVEIFKFEEAENSLLHLKTVKHELLPSVNDITAVGPAHFYATNDHYFSDPFLKYLETYLNLHWANVVYYSPNEVKVVAEGFDSANGINISPDDKYIYVADILAHEIHVLEKHTNMNLTQLKVLELDTLVDNLSIDPSSGDIWVGCHPNGQKLFVYDPNNPPSSEVLRIQNILSEKPTVTTVYANNGSVLQGSSVASVYDGKLLIGTLYHRALYCEL

SEQ ID NO: 36004 - protein, 55 aa, Artificial Sequence
  Synthetic polypeptide
MHFIVSIYKHYSKKLSTGSPLPEGSTTQKRNRLKASREVESVDLPHCHLIKGIVW

SEQ ID NO: 36005 - protein, 22 aa, Artificial Sequence
  Synthetic polypeptide
AEETCLVSDETLDCRLLRLLVA

SEQ ID NO: 36006 - protein, 16 aa, Artificial Sequence
  Synthetic polypeptide
DFGLQTFEVTGCLAIN

SEQ ID NO: 36007 - protein, 36 aa, Artificial Sequence
  Synthetic polypeptide
NYKPLLNEIKEDTNKWKNIPCSWVGRINVVKMAIQD

SEQ ID NO: 36008 - protein, 15 aa, Artificial Sequence
  Synthetic polypeptide
KWPYKINIFSRICCL

SEQ ID NO: 36009 - protein, 632 aa, Artificial Sequence
  Synthetic polypeptide
NKRGYKQMEEHSMLMGRKNQCRENGHTRLISFQEFVAFESVLCAPDALFMVAFQLFDKAGKGEVTFEDVKQVFGQTTIHQHIPFNWDSEFVQLHFGKERKRHLTYAEFTQFLLEIQLEHAKQAFVQRDNARTGRVTAIDFRDIMVTIRPHVLTPFVEECLVAAAGGTTSHQVSFSYFNGFNSLLNNMELIRKIYSTLAGTRKDVEVTKEEFVLAAQKFGQVTPMEVDILFQLADLYEPRGRMTLADIERIAPLEEGTLPFNLAEAQRQKASGDSARPVLLQVAESAYRFGLGSVAGAVGATAVYPIDLVKTRMQNQRSTGSFVGELMYKNSFDCFKKVLRYEGFFGLYRGLLPQLLGVAPEKAIKLTVNDFVRDKFMHKDGSVPLAAEILAGGCAGGSQVIFTNPLEIVKIRLQVAGEITTGPRVSALSVVRDLGFFGIYKGAKACFLRDIPFSAIYFPCYAHVKASFANEDGQVSPGSLLLAGAIAGMPAASLVTPADVIKTRLQVAARAGQTTYSGVIDCFRKILREEGPKALWKGAGARVFRSSPQFGVTLLTYELLQRWFYIDFGGVKPMGSEPVPKSRINLPAPNPDHVGGYKLAVATFAGIENKFGLYLPLFKPSVSTSKAIGGGP

SEQ ID NO: 36010 - protein, 633 aa, Artificial Sequence
  Synthetic polypeptide
NKRGYKQMEEHSMLMGRKNQCRENGHTRLISFQEFVAFESVLCAPDALFMVAFQLFDKAGKGEVTFEDVKQVFGQTTIHQHIPFNWDSEFVQLHFGKERKRHLTYAEFTQFLLEIQLEHAKQAFVQRDNARTGRVTAIDFRDIMVTIRPHVLTPFVEECLVAAAGGTTSHQVSFSYFNGFNSLLNNMELIRKIYSTLAGTRKDVEVTKEEFVLAAQKFGQVTPMEVDILFQLADLYEPRGRMTLADIERIAPLEEGTLPFNLAEAQRQQKASGDSARPVLLQVAESAYRFGLGSVAGAVGATAVYPIDLVKTRMQNQRSTGSFVGELMYKNSFDCFKKVLRYEGFFGLYRGLLPQLLGVAPEKAIKLTVNDFVRDKFMHKDGSVPLAAEILAGGCAGGSQVIFTNPLEIVKIRLQVAGEITTGPRVSALSVVRDLGFFGIYKGAKACFLRDIPFSAIYFPCYAHVKASFANEDGQVSPGSLLLAGAIAGMPAASLVTPADVIKTRLQVAARAGQTTYSGVIDCFRKILREEGPKALWKGAGARVFRSSPQFGVTLLTYELLQRWFYIDFGGVKPMGSEPVPKSRINLPAPNPDHVGGYKLAVATFAGIENKFGLYLPLFKPSVSTSKAIGGGP

SEQ ID NO: 36011 - protein, 292 aa, Artificial Sequence
  Synthetic polypeptide
DKVVRLSWSRVGPNPTGKARLLREQWIRAKYERQEFIYPEKQEPYSAGYREGFLWKRGRDNGQFLSRKFVLTEREGALKYFNRNDAKEPKAVMKIEHLNATFQPAKIGHPHGLQVTYLKDNSTRNIFIYHEDGKEIVDWFNALRAARFHYLQVAFPGAGDADLVPKLSRNYLKEGYMEKTGPKQTEGFRKRWFTMDDRRLMYFKDPLDAFARGEVFIGSKESGYTVLHGFPPSTQGHHWPHGITIVTPDRKFLFACETESDQREWVAAFQKAVDRPMLPQEYAVEAHFKHKP

SEQ ID NO: 36012 - protein, 60 aa, Artificial Sequence
  Synthetic polypeptide
GCPGVGWAQTPQGRPGSFESSGSGPSTSDRSSSTRRSRSPTRQGTVRVFSGSVAGTTGSF

SEQ ID NO: 36013 - protein, 40 aa, Artificial Sequence
  Synthetic polypeptide
GGPKPHREGQAPSRAVDPGQVRATGVHLPGEAGALLGRVP

SEQ ID NO: 36014 - protein, 191 aa, Artificial Sequence
  Synthetic polypeptide
DKVVRLSWSRVGPNPTGKARLLREQWIRAKYERQEFIYPEKQEPYSAGYREGFLWKRGRDNGQFLSRKFVLTEREGALKYFNRNDAKEPKAVMKIEHLNATFQPAKIGHPHGLQVTYLKDNSTRNIFIYHEDGKEIVDWFNALRAARFHYLQVAFPGAGDADLVPKLSRNYLKEGYMEKTGPKQTEGFRKR

SEQ ID NO: 36015 - protein, 169 aa, Artificial Sequence
  Synthetic polypeptide
DKVVRLSWSRVGPNPTGKARLLREQWIRAKYERQEFIYPEKQEPYSAGYREGFLWKRGRDNGQFLSRKFVLTEREGALKYFNRNDAKEPKAVMKIEHLNATFQPAKIGHPHGLQVTYLKDNSTRNIFIYHEDGKEIVDWFNALRAARFHYLQVAFPGAGDADLVPKLSR

SEQ ID NO: 36016 - protein, 162 aa, Artificial Sequence
  Synthetic polypeptide
DKVVRLSWSRVGPNPTGKARLLREQWIRAKYERQEFIYPEKQEPYSAGYREGFLWKRGRDNGQFLSRKFVLTEREGALKYFNRNDAKEPKAVMKIEHLNATFQPAKIGHPHGLQVTYLKDNSTRNIFIYHEDGKEIVDWFNALRAARFHYLQVAFPGAGDAD

SEQ ID NO: 36017 - protein, 93 aa, Artificial Sequence
  Synthetic polypeptide
DKVVRLSWSRVGPNPTGKARLLREQWIRAKYERQEFIYPEKQEPYSAGYREGFLWKRGRDNGQFLSRKFVLTEREGALKYFNRNDAKEPKAVM

SEQ ID NO: 36018 - protein, 61 aa, Artificial Sequence
  Synthetic polypeptide
VQVLEAALSCDRTTVPQPGRHSETLSLKERKAPSRAVDPGQVRATGVHLPGEAGALLGRVP

SEQ ID NO: 36019 - protein, 276 aa, Artificial Sequence
  Synthetic polypeptide
KKEKLLREQWIRAKYERQEFIYPEKQEPYSAGYREGFLWKRGRDNGQFLSRKFVLTEREGALKYFNRNDAKEPKAVMKIEHLNATFQPAKIGHPHGLQVTYLKDNSTRNIFIYHEDGKEIVDWFNALRAARFHYLQVAFPGAGDADLVPKLSRNYLKEGYMEKTGPKQTEGFRKRWFTMDDRRLMYFKDPLDAFARGEVFIGSKESGYTVLHGFPPSTQGHHWPHGITIVTPDRKFLFACETESDQREWVAAFQKAVDRPMLPQEYAVEAHFKHKP

SEQ ID NO: 36020 - protein, 53 aa, Artificial Sequence
  Synthetic polypeptide
DPVSKRKKSSFESSGSGPSTSDRSSSTRRSRSPTRQGTVRVFSGSVAGTTGSF

SEQ ID NO: 36021 - protein, 175 aa, Artificial Sequence
  Synthetic polypeptide
KKEKLLREQWIRAKYERQEFIYPEKQEPYSAGYREGFLWKRGRDNGQFLSRKFVLTEREGALKYFNRNDAKEPKAVMKIEHLNATFQPAKIGHPHGLQVTYLKDNSTRNIFIYHEDGKEIVDWFNALRAARFHYLQVAFPGAGDADLVPKLSRNYLKEGYMEKTGPKQTEGFRKR

SEQ ID NO: 36022 - protein, 153 aa, Artificial Sequence
  Synthetic polypeptide
KKEKLLREQWIRAKYERQEFIYPEKQEPYSAGYREGFLWKRGRDNGQFLSRKFVLTEREGALKYFNRNDAKEPKAVMKIEHLNATFQPAKIGHPHGLQVTYLKDNSTRNIFIYHEDGKEIVDWFNALRAARFHYLQVAFPGAGDADLVPKLSR

SEQ ID NO: 36023 - protein, 146 aa, Artificial Sequence
  Synthetic polypeptide
KKEKLLREQWIRAKYERQEFIYPEKQEPYSAGYREGFLWKRGRDNGQFLSRKFVLTEREGALKYFNRNDAKEPKAVMKIEHLNATFQPAKIGHPHGLQVTYLKDNSTRNIFIYHEDGKEIVDWFNALRAARFHYLQVAFPGAGDAD

SEQ ID NO: 36024 - protein, 77 aa, Artificial Sequence
  Synthetic polypeptide
KKEKLLREQWIRAKYERQEFIYPEKQEPYSAGYREGFLWKRGRDNGQFLSRKFVLTEREGALKYFNRNDAKEPKAVM

SEQ ID NO: 36025 - protein, 53 aa, Artificial Sequence
  Synthetic polypeptide
SQPCRRPRWEDWPQEFQTSLGNRAPSRAVDPGQVRATGVHLPGEAGALLGRVP

SEQ ID NO: 36026 - protein, 304 aa, Artificial Sequence
  Synthetic polypeptide
AGREAHTCNRSPVGGPGGRIGLRSSRPAWATELLREQWIRAKYERQEFIYPEKQEPYSAGYREGFLWKRGRDNGQFLSRKFVLTEREGALKYFNRNDAKEPKAVMKIEHLNATFQPAKIGHPHGLQVTYLKDNSTRNIFIYHEDGKEIVDWFNALRAARFHYLQVAFPGAGDADLVPKLSRNYLKEGYMEKTGPKQTEGFRKRWFTMDDRRLMYFKDPLDAFARGEVFIGSKESGYTVLHGFPPSTQGHHWPHGITIVTPDRKFLFACETESDQREWVAAFQKAVDRPMLPQEYAVEAHFKHKP

SEQ ID NO: 36027 - protein, 63 aa, Artificial Sequence
  Synthetic polypeptide
EAQVGGLASGVPDQPGQQSSFESSGSGPSTSDRSSSTRRSRSPTRQGTVRVFSGSVAGTTGSF

SEQ ID NO: 36028 - protein, 203 aa, Artificial Sequence
  Synthetic polypeptide
AGREAHTCNRSPVGGPGGRIGLRSSRPAWATELLREQWIRAKYERQEFIYPEKQEPYSAGYREGFLWKRGRDNGQFLSRKFVLTEREGALKYFNRNDAKEPKAVMKIEHLNATFQPAKIGHPHGLQVTYLKDNSTRNIFIYHEDGKEIVDWFNALRAARFHYLQVAFPGAGDADLVPKLSRNYLKEGYMEKTGPKQTEGFRKR

SEQ ID NO: 36029 - protein, 181 aa, Artificial Sequence
  Synthetic polypeptide
AGREAHTCNRSPVGGPGGRIGLRSSRPAWATELLREQWIRAKYERQEFIYPEKQEPYSAGYREGFLWKRGRDNGQFLSRKFVLTEREGALKYFNRNDAKEPKAVMKIEHLNATFQPAKIGHPHGLQVTYLKDNSTRNIFIYHEDGKEIVDWFNALRAARFHYLQVAFPGAGDADLVPKLSR

SEQ ID NO: 36030 - protein, 174 aa, Artificial Sequence
  Synthetic polypeptide
AGREAHTCNRSPVGGPGGRIGLRSSRPAWATELLREQWIRAKYERQEFIYPEKQEPYSAGYREGFLWKRGRDNGQFLSRKFVLTEREGALKYFNRNDAKEPKAVMKIEHLNATFQPAKIGHPHGLQVTYLKDNSTRNIFIYHEDGKEIVDWFNALRAARFHYLQVAFPGAGDAD

SEQ ID NO: 36031 - protein, 105 aa, Artificial Sequence
  Synthetic polypeptide
AGREAHTCNRSPVGGPGGRIGLRSSRPAWATELLREQWIRAKYERQEFIYPEKQEPYSAGYREGFLWKRGRDNGQFLSRKFVLTEREGALKYFNRNDAKEPKAVM

SEQ ID NO: 36032 - protein, 88 aa, Artificial Sequence
  Synthetic polypeptide
GWVRWLMPVIPALWEADGSLEVYATALLQQANENRQNSTGKACFGTFLPEEKLNDFRDEQIGQLQELMQEATKPNRQFSISESMKPKF

SEQ ID NO: 36033 - protein, 57 aa, Artificial Sequence
  Synthetic polypeptide
SQHFGRPTDHLRCMQQRYCNRLTKTDKIQLEKHVLAPSSQKKNLMTFVMNKLDSCRS

SEQ ID NO: 36034 - protein, 25 aa, Artificial Sequence
  Synthetic polypeptide
LHHCTPAWLTELLLLKKPRRRVRGF

SEQ ID NO: 36035 - protein, 5 aa, Artificial Sequence
  Synthetic polypeptide
QSSFS

SEQ ID NO: 36036 - protein, 195 aa, Artificial Sequence
  Synthetic polypeptide
AVIAPLHSCLVDRAPSPEKAEEESERLLRELYLFDVLRADRTTAAHGLELRVPFLDHRFSSYYLSLPPEMRIPKNGIEKHLLRETFEDSNLIPKEILWRPKEAFSDGITSVKNSWFKILQEYVEHQVDDAMMANAAQKFPFNTPKTKEGYYYRQVFERHYPGRADWLSHYWMPKWINATDPSARTLTHYKSAVKA

SEQ ID NO: 36037 - protein, 6 aa, Artificial Sequence
  Synthetic polypeptide
LHWEVI

SEQ ID NO: 36038 - protein, 1256 aa, Artificial Sequence
  Synthetic polypeptide
PRRDGKTVISRVATLGSDLALRNCFLTSDLNVKVGDYGIGFSRYKEDYIETDDKKVFPLRWTAPELVTSFQDRLLTADQTKYSNIWSLGVTLWELFDNAAQPYSNLSNLDVLNQVIRERDTKLPKPQLEQPYSDRWYEVLQFCWLSPEKRPAAEDVHRLLTYLRLQSQRDSEVDFEQQWNALKPNTNSRDSSNNAAFPILDHFARDRLGREMEEVLTVTETSQGLSFEYVWEAAKHDHFDERSRGHLDEGLSYTSIFYPVEVFESSLSDPGPGKQDDSGQDVPLRVPGVVPVFDAHNLSVGSDYYIQLEEKSGSNLELDYPPALLTTDMDNPERTGPELSQLTALRSVELEESSTDEDFFQSSTDPKDSSLPGDLHVTSGPESPFNNIFNDVDKSEDLPSHQKIFDLMELNGVQADFKPATLSSSLDNPKESVITGHFEKEKPRKIFDSEPLCLSDNLMHQDNFDPLNVQELSENFLFLQEKNLLKGSLSSKEHINDLQTELKNAGFTEAMLETSCRNSLDTELQFAENKPGLSLLQENVSTKGDDTDVMLTGDTLSTSLQSSPEVQVPPTSFETEETPRRVPPDSLPTQGETQPTCLDVIVPEDCLHQDISPDAVTVPVEILSTDARTHSLDNRSQDSPGESEETLRLTESDSVLADDILASRVSVGSSLPELGQELHNKPFSEDHHSHRRLEKNLEAVETLNQLNSKDAAKEAGLVSALSSDSTSQDSLLEDSLSAPFPASEPSLETPDSLESVDVHEALLDSLGSHTPQKLVPPDKPADSGYETENLESPEWTLHPAPEGTADSEPATTGDGGHSGLPPNPVIVISDAGDGHRGTEVTPETFTAGSQGSYRDSAYFSDNDSEPEKRSEEVPGTSPSALVLVQEQPLPEPVLPEQSPAAQDSCLEARKSQPDESCLSALHNSSDLELRATPEPAQTGVPQQVHPTEDEASSPWSVLNAELSSGDDFETQDDRPCTLASTGTNTNELLAYTNSALDKSLSSHSEGPKLKEPDIEGKYLGKLGVSGMLDLSEDGMDADEEDENSDDSDEDLRAFNLHSLSSESEDETEHPVPIILSNEDGRHLRSLLKPTAANAPDPLPEDWKKEKKAVTFFDDVTVYLFDQETPTKELGPCGGEACGPDLSGPAPASGSPYLSRCINSESSTDEEGGGFEWDDDFSPDPFMSKTTSNLLSSKPSLQTSKYFSPPPPARSTEQSWPHSAPYSRFSISPANIASFSLTHLTDSDIEQGGSSEDGEKD

SEQ ID NO: 36039 - protein, 122 aa, Artificial Sequence
  Synthetic polypeptide
DNWRNLNTERCMKTPGLGGRSAASWRNQPLTQIAPVLLLEEGIAGSWSPQVKIKDFRHSGFETLMCEVHYRRPRTDHTATSPRNCPKATNKEQQSRAKFTFCIHRLELARGTTPGYQETLTV

SEQ ID NO: 36040 - protein, 5 aa, Artificial Sequence
  Synthetic polypeptide
TPNGV

SEQ ID NO: 36041 - protein, 582 aa, Artificial Sequence
  Synthetic polypeptide
FMRQLEKSEHRTVYEDSGPGRPLSCFMEEPAPYTDSTGAAAGGGNCRFVESPSQDQRLQAQRLRNPDVRGSLQTPQNRPHGHQSPELPEGYEQRTTVQGQVYFLHTQTGVSTWHDPRIPRDLNSVNCDELGPLPPGWEVRSTVSGRIYFVDHNNRTTQFTDPRLHHIMNHQCQLKEPSQPLPLPSEGSLEDEELPAQRYERDLVQKLKVLRHELSLQQPQAGHCRIEVSREEIFEESYRQIMKMRPKDLKKRLMVKFRGEEGLDYGGVAREWLYLLCHEMLNPYYGLFQYSTDNIYMLQINPDSSINPDHLSYFHFVGRIMGLAVFHGHYINGGFTVPFYKQLLGKPIQLSDLESVDPELHKSLVWILENDITPVLDHTFCVEHNAFGRILQHELKPNGRNVPVTEENKKEYVRLYVNWRFMRGIEAQFLALQKGFNELIPQHLLKPFDQKELELIIGGLDKIDLNDWKSNTRLKHCVADSNIVRWFWQAVETFDEERRARLLQFVTGSTRVPLQGFKALQGSTGAAGPRLFTIHLIDANTDNLPKAHTCFNRIDIPPYESYEKLYEKLLTAVEETCGFAVE

SEQ ID NO: 36042 - protein, 148 aa, Artificial Sequence
  Synthetic polypeptide
DNWRNLNTERCMKTPGLGGRSAASWRNQPLTQIAPVLLLEEGIAGSWSPQVKIKDFRHSGFETLMCEVHYRRPRTDHTATSPRNCPKATNKEQQSRAKFTFCIHRLELARGTTPGYQVPRGPFLGEMQLFYTNSFYKAIHLSPETLTV

SEQ ID NO: 36043 - protein, 608 aa, Artificial Sequence
  Synthetic polypeptide
FMRQLEKSEHRTVYEDSGPGRPLSCFMEEPAPYTDSTGAAAGGGNCRFVESPSQDQRLQAQRLRNPDVRGSLQTPQNRPHGHQSPELPEGYEQRTTVQGQVYFLHTQTGVSTWHDPRIPSPSGTIPGGDAAFLYEFLLQGHTSEPRDLNSVNCDELGPLPPGWEVRSTVSGRIYFVDHNNRTTQFTDPRLHHIMNHQCQLKEPSQPLPLPSEGSLEDEELPAQRYERDLVQKLKVLRHELSLQQPQAGHCRIEVSREEIFEESYRQIMKMRPKDLKKRLMVKFRGEEGLDYGGVAREWLYLLCHEMLNPYYGLFQYSTDNIYMLQINPDSSINPDHLSYFHFVGRIMGLAVFHGHYINGGFTVPFYKQLLGKPIQLSDLESVDPELHKSLVWILENDITPVLDHTFCVEHNAFGRILQHELKPNGRNVPVTEENKKEYVRLYVNWRFMRGIEAQFLALQKGFNELIPQHLLKPFDQKELELIIGGLDKIDLNDWKSNTRLKHCVADSNIVRWFWQAVETFDEERRARLLQFVTGSTRVPLQGFKALQGSTGAAGPRLFTIHLIDANTDNLPKAHTCFNRIDIPPYESYEKLYEKLLTAVEETCGFAVE

SEQ ID NO: 36044 - protein, 371 aa, Artificial Sequence
  Synthetic polypeptide
SQHFGRLRWEDRLSPGVQGQPGQHDPDWASYTLGVFICLSCSGIHRNIPQVSKVKSVRLDAWEEAQVEFMASHGNDAARARFESKVPSFYYRPTPSDCQLLREQWIRAKYERQEFIYPEKQEPYSAGYREGFLWKRGRDNGQFLSRKFVLTEREGALKYFNRNDAKEPKAVMKIEHLNATFQPAKIGHPHGLQVTYLKDNSTRNIFIYHEDGKEIVDWFNALRAARFHYLQVAFPGAGDADLVPKLSRNYLKEGYMEKTGPKQTEGFRKRWFTMDDRRLMYFKDPLDAFARGEVFIGSKESGYTVLHGFPPSTQGHHWPHGITIVTPDRKFLFACETESDQREWVAAFQKAVDRPMLPQEYAVEAHFKHKP

SEQ ID NO: 36045 - protein, 25 aa, Artificial Sequence
  Synthetic polypeptide
AQEFKVSLANMIPTGPPTLWASSSA

SEQ ID NO: 36046 - protein, 82 aa, Artificial Sequence
  Synthetic polypeptide
SQHFGRLRWEDRLSPGVQGQPGQHDPDWASYTLGVFICLSCSGIHRNIPQVSKVKSVRLDAWEEAQVEFMASHGNDAARARF

SEQ ID NO: 36047 - protein, 172 aa, Artificial Sequence
  Synthetic polypeptide
SQHFGRLRWEDRLSPGVQGQPGQHDPDWASYTLGVFICLSCSGIHRNIPQVSKVKSVRLDAWEEAQVEFMASHGNDAARARFESKVPSFYYRPTPSDCQLLREQWIRAKYERQEFIYPEKQEPYSAGYREGFLWKRGRDNGQFLSRKFVLTEREGALKYFNRNDAKEPKAVM

SEQ ID NO: 36048 - protein, 85 aa, Artificial Sequence
  Synthetic polypeptide
GQARWLTPVIPALWEAEVGGSLEPRSSRSRLGLLHSGRLHLPELLGNPPEYPPGQQGEVRPPGRLGGGPSGVHGLPRERRRESQV

SEQ ID NO: 36049 - protein, 365 aa, Artificial Sequence
  Synthetic polypeptide
SQHFGRLRWEDRLSPGVQDPDWASYTLGVFICLSCSGIHRNIPQVSKVKSVRLDAWEEAQVEFMASHGNDAARARFESKVPSFYYRPTPSDCQLLREQWIRAKYERQEFIYPEKQEPYSAGYREGFLWKRGRDNGQFLSRKFVLTEREGALKYFNRNDAKEPKAVMKIEHLNATFQPAKIGHPHGLQVTYLKDNSTRNIFIYHEDGKEIVDWFNALRAARFHYLQVAFPGAGDADLVPKLSRNYLKEGYMEKTGPKQTEGFRKRWFTMDDRRLMYFKDPLDAFARGEVFIGSKESGYTVLHGFPPSTQGHHWPHGITIVTPDRKFLFACETESDQREWVAAFQKAVDRPMLPQEYAVEAHFKHKP

SEQ ID NO: 36050 - protein, 19 aa, Artificial Sequence
  Synthetic polypeptide
AQEFKIPTGPPTLWASSSA

SEQ ID NO: 36051 - protein, 76 aa, Artificial Sequence
  Synthetic polypeptide
SQHFGRLRWEDRLSPGVQDPDWASYTLGVFICLSCSGIHRNIPQVSKVKSVRLDAWEEAQVEFMASHGNDAARARF

SEQ ID NO: 36052 - protein, 166 aa, Artificial Sequence
  Synthetic polypeptide
SQHFGRLRWEDRLSPGVQDPDWASYTLGVFICLSCSGIHRNIPQVSKVKSVRLDAWEEAQVEFMASHGNDAARARFESKVPSFYYRPTPSDCQLLREQWIRAKYERQEFIYPEKQEPYSAGYREGFLWKRGRDNGQFLSRKFVLTEREGALKYFNRNDAKEPKAVM

SEQ ID NO: 36053 - protein, 268 aa, Artificial Sequence
  Synthetic polypeptide
KYKILARWVSKHIKKPIRSTVLSLDWHPNNVLLAAGSCDFKCRVFSAYIKEVDEKPASTPWGSKMPFGQLMSEFGGSGTGGWVHGVSFSASGSRLAWVSHDSTVSVADASKSVQVSTLKTEFLPLLSVSFVSENSVVAAGHDCCPMLFNYDDRGCLTFVSKLDIPKQSIQRNMSAMERFRNMDKRATTEDRNTALETLHQNSITQVSIYEVDKQDCRKFCTTGIDGAMTIWDFKEPSRHGLPQLPGGAHQLPRLEQGPHPDCHLPQQP

SEQ ID NO: 36054 - protein, 3 aa, Artificial Sequence
  Synthetic polypeptide
PGG

SEQ ID NO: 36055 - protein, 52 aa, Artificial Sequence
  Synthetic polypeptide
PGTVAHACNPSTLRGQGRRITKSRVRNHPGQHGETPSLLKIQNISQVGEQAH

SEQ ID NO: 36056 - protein, 246 aa, Artificial Sequence
  Synthetic polypeptide
KYKILARWVSKHIKKPIRSTVLSLDWHPNNVLLAAGSCDFKCRVFSAYIKEVDEKPASTPWGSKMPFGQLMSEFGGSGTGGWVHGVSFSASGSRLAWVSHDSTVSVADASKSVQVSTLKTEFLPLLSVSFVSENSVVAAGHDCCPMLFNYDDRGCLTFVSKLDIPKQSIQRNMSAMERFRNMDKRATTEDRNTALETLHQNSITQVSIYEVDKQDCRKFCTTGIDGAMTIWDFKTLESSIQGLRIM

SEQ ID NO: 36057 - protein, 155 aa, Artificial Sequence
  Synthetic polypeptide
KYKILARWVSKHIKKPIRSTVLSLDWHPNNVLLAAGSCDFKCRVFSAYIKEVDEKPASTPWGSKMPFGQLMSEFGGSGTGGWVHGVSFSASGSRLAWVSHDSTVSVADASKSVQVSTLKTEFLPLLSVSFVSENSSCFRAMTAAQCSLTTMTAAA

SEQ ID NO: 36058 - protein, 50 aa, Artificial Sequence
  Synthetic polypeptide
GRVQWLTPVIPALWEAEAGGSPQGLDSEDRVPAAPKCVICLREQRRGCWP

SEQ ID NO: 36059 - protein, 168 aa, Artificial Sequence
  Synthetic polypeptide
SQHFGRPRRVDHLRVSTLKTEFLPLLSVSFVSENSVVAAGHDCCPMLFNYDDRGCLTFVSKLDIPKQSIQRNMSAMERFRNMDKRATTEDRNTALETLHQNSITQVSIYEVDKQDCRKFCTTGIDGAMTIWDFKEPSRHGLPQLPGGAHQLPRLEQGPHPDCHLPQQP

SEQ ID NO: 36060 - protein, 26 aa, Artificial Sequence
  Synthetic polypeptide
PGAVAHACNPSTLGGRGGWITSGSRL

SEQ ID NO: 36061 - protein, 146 aa, Artificial Sequence
  Synthetic polypeptide
SQHFGRPRRVDHLRVSTLKTEFLPLLSVSFVSENSVVAAGHDCCPMLFNYDDRGCLTFVSKLDIPKQSIQRNMSAMERFRNMDKRATTEDRNTALETLHQNSITQVSIYEVDKQDCRKFCTTGIDGAMTIWDFKTLESSIQGLRIM

SEQ ID NO: 36062 - protein, 65 aa, Artificial Sequence
  Synthetic polypeptide
GRVQWLTPVIPALWEAEAGGSPQGLDSEDRVPAAPKCVICLREQLLFQGHDCCPMLFNYDDRGCL

SEQ ID NO: 36063 - protein, 55 aa, Artificial Sequence
  Synthetic polypeptide
SQHFGRPRRVDHLRVSTLKTEFLPLLSVSFVSENSSCFRAMTAAQCSLTTMTAAA

SEQ ID NO: 36064 - protein, 48 aa, Artificial Sequence
  Synthetic polypeptide
SQLLGRLRQENYLNPGSRGCGDLRLCHCTLARATEQDSVSKKKKKKRP

SEQ ID NO: 36065 - protein, 145 aa, Artificial Sequence
  Synthetic polypeptide
PGQQSKTRSQKKKKKRGHDCCPMLFNYDDRGCLTFVSKLDIPKQSIQRNMSAMERFRNMDKRATTEDRNTALETLHQNSITQVSIYEVDKQDCRKFCTTGIDGAMTIWDFKEPSRHGLPQLPGGAHQLPRLEQGPHPDCHLPQQP

SEQ ID NO: 36066 - protein, 41 aa, Artificial Sequence
  Synthetic polypeptide
PEIVPLHSSQGNRARLGLKKKKKKEAMTAAQCSLTTMTAAA

SEQ ID NO: 36067 - protein, 123 aa, Artificial Sequence
  Synthetic polypeptide
PGQQSKTRSQKKKKKRGHDCCPMLFNYDDRGCLTFVSKLDIPKQSIQRNMSAMERFRNMDKRATTEDRNTALETLHQNSITQVSIYEVDKQDCRKFCTTGIDGAMTIWDFKTLESSIQGLRIM

SEQ ID NO: 36068 - protein, 33 aa, Artificial Sequence
  Synthetic polypeptide
PGQQSKTRSQKKKKKRGHDCCPMLFNYDDRGCL

SEQ ID NO: 36069 - protein, 23 aa, Artificial Sequence
  Synthetic polypeptide
YCWEASTRKKGRPQRPGEAVYKP

SEQ ID NO: 36070 - protein, 191 aa, Artificial Sequence
  Synthetic polypeptide
RLYLPLSTVGRLQLGRKGGHKGRARQYTSPEEIDAQLQAEKQKAREEEEQKEGGDGAAGDPKKEKKSLDSDESEDEEDDYQQKRKGVEGLIDIENPNRVAQTTKKVTQLDLDGPKELSRREREEIEKQKAKERYMKMHLAGKTEQAKADLARLAIIRKQREEAARKKEEERKAKDDATLSGKRMQSLSLNK

SEQ ID NO: 36071 - protein, 49 aa, Artificial Sequence
  Synthetic polypeptide
RLYLPLSTVGRLQLGRKGGHKGRARQYTSPEEIDAQLQAEKQKARVVHF

SEQ ID NO: 36072 - protein, 66 aa, Artificial Sequence
  Synthetic polypeptide
PDLVSTPPFGSGSEEREATKAGRGSIQALRRSTRSCRLRSRRPGKKRSKKKVEMGLQVTPKRRRNL

SEQ ID NO: 36073 - protein, 28 aa, Artificial Sequence
  Synthetic polypeptide
QTWFRLPRSVAARKKGRPQRPGEAVYKP

SEQ ID NO: 36074 - protein, 179 aa, Artificial Sequence
  Synthetic polypeptide
RLGRKGGHKGRARQYTSPEEIDAQLQAEKQKAREEEEQKEGGDGAAGDPKKEKKSLDSDESEDEEDDYQQKRKGVEGLIDIENPNRVAQTTKKVTQLDLDGPKELSRREREEIEKQKAKERYMKMHLAGKTEQAKADLARLAIIRKQREEAARKKEEERKAKDDATLSGKRMQSLSLNK

SEQ ID NO: 36075 - protein, 48 aa, Artificial Sequence
  Synthetic polypeptide
PDLVSTPPFGSGSEEREATKAGRGSIQALRRSTRSCRLRSRRPGLSIS

SEQ ID NO: 36076 - protein, 37 aa, Artificial Sequence
  Synthetic polypeptide
RLGRKGGHKGRARQYTSPEEIDAQLQAEKQKARVVHF

SEQ ID NO: 36077 - protein, 35 aa, Artificial Sequence
  Synthetic polypeptide
EVKLVGLPGSSGDLDNFSVLQEMLQFHSSSFLRAC

SEQ ID NO: 36078 - protein, 31 aa, Artificial Sequence
  Synthetic polypeptide
LDFLGPVGTWTTFLSYKRCCNFTAVPSFAPV

SEQ ID NO: 36079 - protein, 35 aa, Artificial Sequence
  Synthetic polypeptide
RGEASWTSWVQWGLGQLFCLTRDAAISQQFLPSRL

SEQ ID NO: 36080 - protein, 69 aa, Artificial Sequence
  Synthetic polypeptide
NGPISRILKAANRREDGKKGVLIRQKRTWEGTNKRLKAPTPVSGGNRLECSAMLWKMLQFHSSSFLRAC

SEQ ID NO: 36081 - protein, 33 aa, Artificial Sequence
  Synthetic polypeptide
KLPPQSAEATGWSALPCCGRCCNFTAVPSFAPV

SEQ ID NO: 36082 - protein, 35 aa, Artificial Sequence
  Synthetic polypeptide
ETKSSHPSQRRQPAGVLCHAVEDAAISQQFLPSRL

SEQ ID NO: 36083 - protein, 29 aa, Artificial Sequence
  Synthetic polypeptide
PLTWEAEVGGSFEPRRCCNFTAVPSFAPV

SEQ ID NO: 36084 - protein, 28 aa, Artificial Sequence
  Synthetic polypeptide
HLLGRLRWEDPLSPGDAAISQQFLPSRL

SEQ ID NO: 36085 - protein, 16 aa, Artificial Sequence
  Synthetic polypeptide
AQEMLQFHSSSFLRAC

SEQ ID NO: 36086 - protein, 356 aa, Artificial Sequence
  Synthetic polypeptide
ALIICLNHSLPVLQAGPGLPAVNPRDQEMAAGFFTAGSQGLGPFKDMALAFPEEEWRHVTPAQIDCFGEYVEPQDCRVSPGGGSKEKEAKPPQEDLKGALVALTSERFGEASLQGPGLGRVCEQEPGGPAGSAPGLPPPQHGAIPLPDEVKTHSSFWKPFQCPECGKGFSRSSNLVRHQRTHEEKSYGCVECGKGFTLREYLMKHQRTHLGKRPYVCSECWKTFSQRHHLEVHQRSHTGEKPYKCGDCWKSFSRRQHLQVHRRTHTGEKPYTCECGKSFSRNANLAVHRRAHTGEKPYGCQVCGKRFSKGERLVRHQRIHTGEKPYHCPACGRSFNQRSILNRHQKTQHRQEPLVQ

SEQ ID NO: 36087 - protein, 15 aa, Artificial Sequence
  Synthetic polypeptide
ITHYLFCRRVLASPQ

SEQ ID NO: 36088 - protein, 55 aa, Artificial Sequence
  Synthetic polypeptide
FCLTLCHHPDLSPYHLLESLTTCSAGGSWPPRSESQRPRDGSWVLYCWIAGVGAI

SEQ ID NO: 36089 - protein, 37 aa, Artificial Sequence
  Synthetic polypeptide
LAPPCLHHDCEASSATWNFPGRSLAQEKQRPVGPRDA

SEQ ID NO: 36090 - protein, 42 aa, Artificial Sequence
  Synthetic polypeptide
VFFSAQALSWPAAIHVRYDLLLLAFTMIVRLPQPRGTFQEEA

SEQ ID NO: 36091 - protein, 27 aa, Artificial Sequence
  Synthetic polypeptide
GFLSHVELSRKKLSPGKTKTSWTQRCL

SEQ ID NO: 36092 - protein, 721 aa, Artificial Sequence
  Synthetic polypeptide
FQHFGRPKQEDCVSPAVQDQPGQHRSPSLHRGLHPSREEKRDSRMAEEKKLKLSNTVLPSESMKVVAESMGIAQIQEETCQLLTDEVSYRIKEIAQDALKFMHMGKRQKLTTSDIDYALKLKNVEPLYGFHAQEFIPFRFASGGGRELYFYEEKEVDLSDIINTPLPRVPLDVCLKAHWLSIEGCQPAIPENPPPAPKEQQKAEATEPLKSAKPGQEEDGPLKGKGQGATTADGKGKEKKAPPLLEGAPLRLKPRSIHELSVEQQLYYKEITEACVGSCEAKRAEALQSIATDPGLYQMLPRFSTFISEGVRVNVVQNNLALLIYLMRMVKALMDNPTLYLEKYVHELIPAVMTCIVSRQLCLRPDVDNHWALRDFAARLVAQICKHFSTTTNNIQSRITKTFTKSWVDEKTPWTTRYGSIAGLAELGHDVIKTLILPRLQQEGERIRSVLDGPVLSNIDRIGADHVQSLLLKHCAPVLAKLRPPPDNQDAYRAEFGSLGPLLCSQVVKARAQAALQAQQVNRTTLTITQPRPTLTLSQAPQPGPRTPGLLKVPGSIALPVQTLVSARAAAPPQPSPPPTKFIVMSSSSSAPSTQQVLSLSTSAPGSGSTTTSPVTTTVPSVQPIVKLVSTATTAPPSTAPSGPGSVQKYIVVSLPPTGEGKGGPTSHPSPVPPPASSPSPLSGSALCGGKQEAGDSPPPAPGTPKANGSQPNSGSPQPAP

SEQ ID NO: 36093 - protein, 37 aa, Artificial Sequence
  Synthetic polypeptide
AQQFKTSLDNIGLRLSTGGFILPGRRRGTPEWLRRRS

SEQ ID NO: 36094 - protein, 163 aa, Artificial Sequence
  Synthetic polypeptide
KHAPPPASLSLSLLLHHGQKRACFPFAFCRDCQFPEASPAMLPVQPAELCKFFSLTETPEDYTIIVDEEGFLELPSSEHLSVADATWLALNVVSGGGSFSSSQPIGMTKIAKSVIAPLADQNISVFMLSTYQTDFILVLKRDLPFVTHTLSSEFTILWSVARL

SEQ ID NO: 36095 - protein, 64 aa, Artificial Sequence
  Synthetic polypeptide
VSAHGIWLFRSMHHLPLHSLCLSCSTMARNVPASPSPSAVIVSFLRPPQPCFLYSLQNCASSSV

SEQ ID NO: 36096 - protein, 20 aa, Artificial Sequence
  Synthetic polypeptide
GLPSHASCTACRTVQVLQSD

SEQ ID NO: 36097 - protein, 783 aa, Artificial Sequence
  Synthetic polypeptide
VYTQKNINHAAIKTHAQDDHESCGSNSTNRSTAESTKSSIKPRRMQQAAPTDPDLPPGYVQSLIRRVVNNVNIVINNLILKYVEDDIVLSVNITSAECYTVGELWDRAFMDISATDLVLRKVINFSDCTVCLDKRNASGKIEFYQDPLLYKCSFRTRLHFTYENLNSKMPSVIKIHTLVESLKLSITDQQLPMFIRIMQLGIALYYGEIGNFKEGEIEDLTCHNKDMLGNITGSEDETRIDMQYPAQHKGQELYSQQDEEQPQGWVSWAWSFVPAIVSYDDGEEDFVGNDPASTMHQQKAQTLKDPIVSIGFYCTKATVTFKLTEMQVESSYYSPQKVKSKEVLCWEQEGTTVEALMMGEPFFDCQIGFVGCRAMCLKGIMGVKDFEENMNRSETEACFFICGDNLSTKGFTYLTNSLFDYRSPENNGTRAEFILDSTHHKETYTEIAGMQRFGAFYMDYLYTMENTSGKGSTNQQDFSSGKSEDLGTVQEKSTKSLVIGPLDFRLDSSAVHRILKMIVCALEHEYEPYSRLKSDIKDENETILNPEEVALLEEYIPTRHTSVTLLKCTCTISMAEFNLLDHLLPVIMGEKNSSNFMNTTNFQSLRPLPSIRILVDKINLEHSVPMYAEQLVHVVSSLTQPSDNLLHYCYVHCYLKIFGFQAGLTSLDCSGSYCLPVPVIPSFSTALYGKLLKLPTCWTKRSQIAITEGIFELPNLTIQATRAQTLLLQAIYQSWSHLGNVSSSAVIEALINEIFLSIEIGSCYVAQVDLELLASNDPPTSTS

SEQ ID NO: 36098 - protein, 50 aa, Artificial Sequence
  Synthetic polypeptide
RHMHRMTMKAVVLILPTVVLLRAQNHQSNRGECSRLLLQILTYHQVMCRV

SEQ ID NO: 36099 - protein, 134 aa, Artificial Sequence
  Synthetic polypeptide
TNLQEKNNPIKKWAKDRHFSKEDIYAANRHMTKCSSLLVIREIQMKTTVRYHLTPVRMAIIRKSGNNRCWRGCVEIGTLLQCWWECKLVQPLWKTVWLFMKDLELEIPFDPAIPLLGIYPKEYKSCCYKDTCTG

SEQ ID NO: 36100 - protein, 1347 aa, Artificial Sequence
  Synthetic polypeptide
VYTQKNINHAAIKTHAQDDHESCGSNSTNRSTAESTKSSIKPRRMQQAAPTDPDLPPGYVQSLIRRVVNNVNIVINNLILKYVEDDIVLSVNITSAECYTVGELWDRAFMDISATDLVLRKVINFSDCTVCLDKRNASGKIEFYQDPLLYKCSFRTRLHFTYENLNSKMPSVIKIHTLVESLKLSITDQQLPMFIRIMQLGIALYYGEIGNFKEGEIEDLTCHNKDMLGNITGSEDETRIDMQYPAQHKGQELYSQQDEEQPQGWVSWAWSFVPAIVSYDDGEEDFVGNDPASTMHQQKAQTLKDPIVSIGFYCTKATVTFKLTEMQVESSYYSPQKVKSKEVLCWEQEGTTVEALMMGEPFFDCQIGFVGCRAMCLKGIMGVKDFEENMNRSETEACFFICGDNLSTKGFTYLTNSLFDYRSPENNGTRAEFILDSTHHKETYTEIAGMQRFGAFYMDYLYTMENTSGKGSTNQQDFSSGKSEDLGTVQEKSTKSLVIGPLDFRLDSSAVHRILKMIVCALEHEYEPYSRLKSDIKDENETILNPEEVALLEEYIPTRHTSVTLLKCTCTISMAEFNLLDHLLPVIMGEKNSSNFMNTTNFQSLRPLPSIRILVDKINLEHSVPMYAEQLVHVVSSLTQPSDNLLHYCYVHCYLKIFGFQAGLTSLDCSGSYCLPVPVIPSFSTALYGKLLKLPTCWTKRSQIAITEGIFELPNLTIQATRAQTLLLQAIYQSWSHLGNVSSSAVIEALINEIFLSIGVKSKNPLPTLEGSIQNVELKYCSTSLVKCASGTMGSIKICAKAPVDSGKEKLIPLLQGPSDTKDLHSTKWLNESRKPESLLAPDLMAFTIQVPQYIDYCHNSGAVLLCSIQGLAVNIDPILYTWLIYQPQKRTSRHMQQQPVVAVPLVMPVCRRKEDEVSIGSAPLAKQQSYQASEYASSPVKTKTVTESRPLSVPVKAMLNISESCRSPEERMKEFIGIVWNAVKHLTLQLEVQSCCVFIPNDSLPSPSTIVSGDIPGTVRSWYHGQTSMPGTLVLCLPQIKIISAGHKYMEPLQEIPFVIPRPILEEGDAFPWTISLHNFSIYTLLGKQVTLCLVEPMGCTSTLAVTSQKLLATGPDTRHSFVVCLHVDLESLEIKCSNPQVQLFYELTDIMNKVWNKIQKRGNLNLSPTSPETMAGPVPTSPVRSSIGTAPPDTSTCSPSADIGTTTEGDSIQAGEESPFSDSVTLEQTTSNIGGTSGRVSLWMQWVLPKITIKLFAPDPENKGTEVCMVSELEDLSASIDVQDVYTKVKCKIESFNIDHYRSRPGEGWQSGHFEGVFLQCKEKSVPWGRVLVFGAMWRCLPFLY

SEQ ID NO: 36101 - protein, 3917 aa, Artificial Sequence
  Synthetic polypeptide
VYTQKNINHAAIKTHAQDDHESCGSNSTNRSTAESTKSSIKPRRMQQAAPTDPDLPPGYVQSLIRRVVNNVNIVINNLILKYVEDDIVLSVNITSAECYTVGELWDRAFMDISATDLVLRKVINFSDCTVCLDKRNASGKIEFYQDPLLYKCSFRTRLHFTYENLNSKMPSVIKIHTLVESLKLSITDQQLPMFIRIMQLGIALYYGEIGNFKEGEIEDLTCHNKDMLGNITGSEDETRIDMQYPAQHKGQELYSQQDEEQPQGWVSWAWSFVPAIVSYDDGEEDFVGNDPASTMHQQKAQTLKDPIVSIGFYCTKATVTFKLTEMQVESSYYSPQKVKSKEVLCWEQEGTTVEALMMGEPFFDCQIGFVGCRAMCLKGIMGVKDFEENMNRSETEACFFICGDNLSTKGFTYLTNSLFDYRSPENNGTRAEFILDSTHHKETYTEIAGMQRFGAFYMDYLYTMENTSGKGSTNQQDFSSGKSEDLGTVQEKSTKSLVIGPLDFRLDSSAVHRILKMIVCALEHEYEPYSRLKSDIKDENETILNPEEVALLEEYIPTRHTSVTLLKCTCTISMAEFNLLDHLLPVIMGEKNSSNFMNTTNFQSLRPLPSIRILVDKINLEHSVPMYAEQLVHVVSSLTQPSDNLLHYCYVHCYLKIFGFQAGLTSLDCSGSYCLPVPVIPSFSTALYGKLLKLPTCWTKRSQIAITEGIFELPNLTIQATRAQTLLLQAIYQSWSHLGNVSSSAVIEALINEIFLSIGVKSKNPLPTLEGSIQNVELKYCSTSLVKCASGTMGSIKICAKAPVDSGKEKLIPLLQGPSDTKDLHSTKWLNESRKPESLLAPDLMAFTIQVPQYIDYCHNSGAVLLCSIQGLAVNIDPILYTWLIYQPQKRTSRHMQQQPVVAVPLVMPVCRRKEDEVSIGSAPLAKQQSYQASEYASSPVKTKTVTESRPLSVPVKAMLNISESCRSPEERMKEFIGIVWNAVKHLTLQLEVQSCCVFIPNDSLPSPSTIVSGDIPGTVRSWYHGQTSMPGTLVLCLPQIKIISAGHKYMEPLQEIPFVIPRPILEEGDAFPWTISLHNFSIYTLLGKQVTLCLVEPMGCTSTLAVTSQKLLATGPDTRHSFVVCLHVDLESLEIKCSNPQVQLFYELTDIMNKVWNKIQKRGNLNLSPTSPETMAGPVPTSPVRSSIGTAPPDTSTCSPSADIGTTTEGDSIQAGEESPFSDSVTLEQTTSNIGGTSGRVSLWMQWVLPKITIKLFAPDPENKGTEVCMVSELEDLSASIDVQDVYTKVKCKIESFNIDHYRSRPGEGWQSGHFEGVFLQCKEKSVTTTKLLDGTHQQHGFLSLTYTKAVTKNVRHKLTSRNERRSFHKLSEGLMDGSPHFLHEILLSAQAFDIVLYFPLLNAIASIFQAKLPKTQKEKRKSPGQPMRTHTLTSRNLPLIYVNTSVIRIFIPKTEEMQPTVEANQAAKEDTVVLKIGSVAMAPQADNPLGRSVLRKDIYQRALNLGILRDPGSEIEDRQYQIDLQSINIGTAQWHQLKPEKESVSGGVVTETERNSQNPALEWNMASSIRRHQERRAILTPVLTDFSVRITGAPAVIFTKVVSPENLHTEEILVCGHSLEVNITTNLDFFLSVAQVQLLHQLIVANMTGLEPSNKAAEISKQEQKKVDIFDGGMAETSSRYSGAQDSGIGSDSVKIRIVQIEQHSGASQHRIARPSRQSSIVKNLNFIPFDIFITASRISLMTYSCMALSKSKSQEQKNNEKTDKSSLNLPEVDSDVAKPNQACISTVTAEDLLRSSISFPSGKKIGVLSLESLHASTRSSARQALGITIVRQPGRRGTGDLQLEPFLYFIVSQPSLLLSCHHRKQRVEVSIFDAVLKGVASDYKCIDPGKTLPEALDYCTVWLQTVPGEIDSKSGIPPSFITLQIKDFLNGPADVNLDISKPLKANLSFTKLDQINLFLKKIKNAHSLAHSEETSAMSNTMVNKDDLPVSKYYRGKLSKPKIHGDGVQKISAQENMWRAVSCFQKISVQTTQIVISMETVPHTSKPCLLASLSNLNGSLSVKATQKVPGIILGSSFLLSINDFLLKTSLKERSRILIGPCCATANLEAKWCKHSGNPGPEQSIPKISIDLRGGLLQVFWGQEHLNCLVLLHELLNGYLNEEGNFEVQVSEPVPQMSSPVEKNQTFKSEQSSDDLRTGLFQYVQDAESLKLPGVYEVLFYNETEDCPGMMLWRYPEPRVLTLVRITPVPFNTTEDPDISTADLGDVLQVPCSLEYWDELQKVFVAFREFNLSESKVCELQLPDINLVNDQKKLVSSDLWRIVLNSSQNGADDQSSASESGSQSTCDPLVTPTALAACTRVDSCFTPWFVPSLCVSFQFAHLEFHLCHHLDQLGTAAPQYLQPFVSDRNMPSELEYMIVSFREPHMYLRQWNNGSVCQEIQFLAQADCKLLECRNVTMQSVVKPFSIFGQMAVSSDVVEKLLDCTVIVDSVFVNLGQHVVHSLNTAIQAWQQNKCPEVEELVFSHFVICNDTQETLRFGQVDTDENILLASLHSHQYSWRSHKSPQLLHICIEGWGNWRWSEPFSVDHAGTFIRTIQYRGRTASLIIKVQQLNGVQKQIIICGRQIICSYLSQSIELKVVQHYIGQDGQAVVREHFDCLTAKQKLPSYILENNELTELCVKAKGDEDWSRDVCLESKAPEYSIVIQVPSSNSSIIYVWCTVLTLEPNSQVQQRMIVFSPLFIMRSHLPDPIIIHLEKRSLGLSETQIIPGKGQEKPLQNIEPDLVHHLTFQAREEYDPSDCAVPISTSLIKQIATKVHPGGTVNQILDEFYGPEKSLQPIWPYNKKDSDRNEQLSQWDSPMRVKLSIWKPYVRTLLIELLPWALLINESKWDLWLFEGEKIVLQVPAGKIIIPPNFQEAFQIGIYWANTNTVHKSVAIKLVHNLTSPKWKDGGNGEVVTLDEEAFVDTEIRLGAFPGHQKLCQFCISSMVQQGIQIIQIEDKTTIINNTPYQIFYKPQLSVCNPHSGKEYFRVPDSATFSICPGGEQPAMKSSSLPCWDLMPDISQSVLDASLLQKQIMLGFSPAPGADSSQCWSLPAIVRPEFPRQSVAVPLGNFRENGFCTRAIVLTYQEHLGVTYLTLSEDPSPRVIIHNRCPVKMLIKENIKDIPKFEVYCKKIPSECSIHHELYHQISSYPDCKTKDLLPSLLLRVEPLDEVTTEWSDAIDINSQGTQVVFLTGFGYVYVDVVHQCGTVFITVAPEGKAGPILTNTNRAPEKIVTFKMFITQLSLAVFDDLTHHKASAELLRLTLDNIFLCVAPGAGPLPGEEPVAALFELYCVEICCGDLQLDNQLYNKSNFHFAVLVCQGEKAEPIQCSKMQSLLISNKELEEYKEKCFIKLCITLNEGKSILCDINEFSFELKPARLYVEDTFVYYIKTLFDTYLPNSRLAGHSTHLSGGKQVLPMQVTQHARALVNPVKLRKLVIQPVNLLVSIHASLKLYIASDHTPLSFSVFERGPIFTTARQLVHALAMHYAAGALFRAGWVVGSLDILGSPASLVRSIGNGVADFFRLPYEGLTRGPGAFVSGVSRGTTSFVKHISKGTLTSITNLATSLARNMDRLSLDEEHYNRQEEWRRQLPESLGEGLRQGLSRLGISLLGAIAGIVDQPMQNFQKTSEAQASAGHKAKGVISGVGKGIMGVFTKPIGGAAELVSQTGYGILHGAGLSQLPKQRHQPSDLHADQAPNSHVKYVWKMLQSLGRPEVHMALDVVLVRGSGQEHEGCLLLTSEVLFVVSVSEDTQQQAFPVTEIDCAQDSKQNNLLTVQLKQPRVACDVEVDGVRERLSEQQYNRLVDYITKTSCHLAPSCSSMQIPCPVVAAEPPPSTVKTYHYLVDPHFAQVFLSKFTMVKNKALRKGFP

SEQ ID NO: 36102 - protein, 3942 aa, Artificial Sequence
  Synthetic polypeptide
VYTQKNINHAAIKTHAQDDHESCGSNSTNRSTAESTKSSIKPRRMQQAAPTDPDLPPGYVQSLIRRVVNNVNIVINNLILKYVEDDIVLSVNITSAECYTVGELWDRAFMDISATDLVLRKVINFSDCTVCLDKRNASGKIEFYQDPLLYKCSFRTRLHFTYENLNSKMPSVIKIHTLVESLKLSITDQQLPMFIRIMQLGIALYYGEIGNFKEGEIEDLTCHNKDMLGNITGSEDETRIDMQYPAQHKGQELYSQQDEEQPQGWVSWAWSFVPAIVSYDDGEEDFVGNDPASTMHQQKAQTLKDPIVSIGFYCTKATVTFKLTEMQVESSYYSPQKVKSKEVLCWEQEGTTVEALMMGEPFFDCQIGFVGCRAMCLKGIMGVKDFEENMNRSETEACFFICGDNLSTKGFTYLTNSLFDYRSPENNGTRAEFILDSTHHKETYTEIAGMQRFGAFYMDYLYTMENTSGKGSTNQQDFSSGKSEDLGTVQEKSTKSLVIGPLDFRLDSSAVHRILKMIVCALEHEYEPYSRLKSDIKDENETILNPEEVALLEEYIPTRHTSVTLLKCTCTISMAEFNLLDHLLPVIMGEKNSSNFMNTTNFQSLRPLPSIRILVDKINLEHSVPMYAEQLVHVVSSLTQPSDNLLHYCYVHCYLKIFGFQAGLTSLDCSGSYCLPVPVIPSFSTALYGKLLKLPTCWTKRSQIAITEGIFELPNLTIQATRAQTLLLQAIYQSWSHLGNVSSSAVIEALINEIFLSIGVKSKNPLPTLEGSIQNVELKYCSTSLVKCASGTMGSIKICAKAPVDSGKEKLIPLLQGPSDTKDLHSTKWLNESRKPESLLAPDLMAFTIQVPQYIDYCHNSGAVLLCSIQGLAVNIDPILYTWLIYQPQKRTSRHMQQQPVVAVPLVMPVCRRKEDEVSIGSAPLAKQQSYQASEYASSPVKTKTVTESRPLSVPVKAMLNISESCRSPEERMKEFIGIVWNAVKHLTLQLEVQSCCVFIPNDSLPSPSTIVSGDIPGTVRSWYHGQTSMPGTLVLCLPQIKIISAGHKYMEPLQEIPFVIPRPILEEGDAFPWTISLHNFSIYTLLGKQVTLCLVEPMGCTSTLAVTSQKLLATGPDTRHSFVVCLHVDLESLEIKCSNPQVQLFYELTDIMNKVWNKIQKRGNLNLSPTSPETMAGPVPTSPVRSSIGTAPPDTSTCSPSADIGTTTEGDSIQAGEESPFSDSVTLEQTTSNIGGTSGRVSLWMQWVLPKITIKLFAPDPENKGTEVCMVSELEDLSASIDVQDVYTKVKCKIESFNIDHYRSSLGEECWSLGQCGGVFLSCTDKLNRRTLLVRPISKQDPFSNCSGFFPSTTTKLLDGTHQQHGFLSLTYTKAVTKNVRHKLTSRNERRSFHKLSEGLMDGSPHFLHEILLSAQAFDIVLYFPLLNAIASIFQAKLPKTQKEKRKSPGQPMRTHTLTSRNLPLIYVNTSVIRIFIPKTEEMQPTVEANQAAKEDTVVLKIGSVAMAPQADNPLGRSVLRKDIYQRALNLGILRDPGSEIEDRQYQIDLQSINIGTAQWHQLKPEKESVSGGVVTETERNSQNPALEWNMASSIRRHQERRAILTPVLTDFSVRITGAPAVIFTKVVSPENLHTEEILVCGHSLEVNITTNLDFFLSVAQVQLLHQLIVANMTGLEPSNKAAEISKQEQKKVDIFDGGMAETSSRYSGAQDSGIGSDSVKIRIVQIEQHSGASQHRIARPSRQSSIVKNLNFIPFDIFITASRISLMTYSCMALSKSKSQEQKNNEKTDKSSLNLPEVDSDVAKPNQACISTVTAEDLLRSSISFPSGKKIGVLSLESLHASTRSSARQALGITIVRQPGRRGTGDLQLEPFLYFIVSQPSLLLSCHHRKQRVEVSIFDAVLKGVASDYKCIDPGKTLPEALDYCTVWLQTVPGEIDSKSGIPPSFITLQIKDFLNGPADVNLDISKPLKANLSFTKLDQINLFLKKIKNAHSLAHSEETSAMSNTMVNKDDLPVSKYYRGKLSKPKIHGDGVQKISAQENMWRAVSCFQKISVQTTQIVISMETVPHTSKPCLLASLSNLNGSLSVKATQKVPGIILGSSFLLSINDFLLKTSLKERSRILIGPCCATANLEAKWCKHSGNPGPEQSIPKISIDLRGGLLQVFWGQEHLNCLVLLHELLNGYLNEEGNFEVQVSEPVPQMSSPVEKNQTFKSEQSSDDLRTGLFQYVQDAESLKLPGVYEVLFYNETEDCPGMMLWRYPEPRVLTLVRITPVPFNTTEDPDISTADLGDVLQVPCSLEYWDELQKVFVAFREFNLSESKVCELQLPDINLVNDQKKLVSSDLWRIVLNSSQNGADDQSSASESGSQSTCDPLVTPTALAACTRVDSCFTPWFVPSLCVSFQFAHLEFHLCHHLDQLGTAAPQYLQPFVSDRNMPSELEYMIVSFREPHMYLRQWNNGSVCQEIQFLAQADCKLLECRNVTMQSVVKPFSIFGQMAVSSDVVEKLLDCTVIVDSVFVNLGQHVVHSLNTAIQAWQQNKCPEVEELVFSHFVICNDTQETLRFGQVDTDENILLASLHSHQYSWRSHKSPQLLHICIEGWGNWRWSEPFSVDHAGTFIRTIQYRGRTASLIIKVQQLNGVQKQIIICGRQIICSYLSQSIELKVVQHYIGQDGQAVVREHFDCLTAKQKLPSYILENNELTELCVKAKGDEDWSRDVCLESKAPEYSIVIQVPSSNSSIIYVWCTVLTLEPNSQVQQRMIVFSPLFIMRSHLPDPIIIHLEKRSLGLSETQIIPGKGQEKPLQNIEPDLVHHLTFQAREEYDPSDCAVPISTSLIKQIATKVHPGGTVNQILDEFYGPEKSLQPIWPYNKKDSDRNEQLSQWDSPMRVKLSIWKPYVRTLLIELLPWALLINESKWDLWLFEGEKIVLQVPAGKIIIPPNFQEAFQIGIYWANTNTVHKSVAIKLVHNLTSPKWKDGGNGEVVTLDEEAFVDTEIRLGAFPGHQKLCQFCISSMVQQGIQIIQIEDKTTIINNTPYQIFYKPQLSVCNPHSGKEYFRVPDSATFSICPGGEQPAMKSSSLPCWDLMPDISQSVLDASLLQKQIMLGFSPAPGADSSQCWSLPAIVRPEFPRQSVAVPLGNFRENGFCTRAIVLTYQEHLGVTYLTLSEDPSPRVIIHNRCPVKMLIKENIKDIPKFEVYCKKIPSECSIHHELYHQISSYPDCKTKDLLPSLLLRVEPLDEVTTEWSDAIDINSQGTQVVFLTGFGYVYVDVVHQCGTVFITVAPEGKAGPILTNTNRAPEKIVTFKMFITQLSLAVFDDLTHHKASAELLRLTLDNIFLCVAPGAGPLPGEEPVAALFELYCVEICCGDLQLDNQLYNKSNFHFAVLVCQGEKAEPIQCSKMQSLLISNKELEEYKEKCFIKLCITLNEGKSILCDINEFSFELKPARLYVEDTFVYYIKTLFDTYLPNSRLAGHSTHLSGGKQVLPMQVTQHARALVNPVKLRKLVIQPVNLLVSIHASLKLYIASDHTPLSFSVFERGPIFTTARQLVHALAMHYAAGALFRAGWVVGSLDILGSPASLVRSIGNGVADFFRLPYEGLTRGPGAFVSGVSRGTTSFVKHISKGTLTSITNLATSLARNMDRLSLDEEHYNRQEEWRRQLPESLGEGLRQGLSRLGISLLGAIAGIVDQPMQNFQKTSEAQASAGHKAKGVISGVGKGIMGVFTKPIGGAAELVSQTGYGILHGAGLSQLPKQRHQPSDLHADQAPNSHVKYVWKMLQSLGRPEVHMALDVVLVRGSGQEHEGCLLLTSEVLFVVSVSEDTQQQAFPVTEIDCAQDSKQNNLLTVQLKQPRVACDVEVDGVRERLSEQQYNRLVDYITKTSCHLAPSCSSMQIPCPVVAAEPPPSTVKTYHYLVDPHFAQVFLSKFTMVKNKALRKGFP

SEQ ID NO: 36103 - protein, 335 aa, Artificial Sequence
  Synthetic polypeptide
VYTQKNINHAAIKTHAQDDHESCGSNSTNRSTAESTKSSIKPRRMQQAAPTDPDLPPGYVQSLIRRVVNNVNIVINNLILKYVEDDIVLSVNITSAECYTVGELWDRAFMDISATDLVLRKVINFSDCTVCLDKRNASGKIEFYQDPLLYKCSFRTRLHFTYENLNSKMPSVIKIHTLVESLKLSITDQQLPMFIRIMQLGIALYYGEIGNFKEGEIEDLTCHNKDMLGNITGSEDETRIDMQYPAQHKGQELYSQQDEEQPQGWVSWAWSFVPAIVSYDDGEEDFVGNDPASTMHQQKAQTLKDPIVSIGFYCTKATVTFKVGLFSCCLYLYQL

SEQ ID NO: 36104 - protein, 17 aa, Artificial Sequence
  Synthetic polypeptide
NELYTMATWDYPEMQDL

SEQ ID NO: 36105 - protein, 2277 aa, Artificial Sequence
  Synthetic polypeptide
IQQHRMNYTLWPHGITQKCKISKQEQKKVDIFDGGMAETSSRYSGAQDSGIGSDSVKIRIVQIEQHSGASQHRIARPSRQSSIVKNLNFIPFDIFITASRISLMTYSCMALSKSKSQEQKNNEKTDKSSLNLPEVDSDVAKPNQACISTVTAEDLLRSSISFPSGKKIGVLSLESLHASTRSSARQALGITIVRQPGRRGTGDLQLEPFLYFIVSQPSLLLSCHHRKQRVEVSIFDAVLKGVASDYKCIDPGKTLPEALDYCTVWLQTVPGEIDSKSGIPPSFITLQIKDFLNGPADVNLDISKPLKANLSFTKLDQINLFLKKIKNAHSLAHSEETSAMSNTMVNKDDLPVSKYYRGKLSKPKIHGDGVQKISAQENMWRAVSCFQKISVQTTQIVISMETVPHTSKPCLLASLSNLNGSLSVKATQKVPGIILGSSFLLSINDFLLKTSLKERSRILIGPCCATANLEAKWCKHSGNPGPEQSIPKISIDLRGGLLQVFWGQEHLNCLVLLHELLNGYLNEEGNFEVQVSEPVPQMSSPVEKNQTFKSEQSSDDLRTGLFQYVQDAESLKLPGVYEVLFYNETEDCPGMMLWRYPEPRVLTLVRITPVPFNTTEDPDISTADLGDVLQVPCSLEYWDELQKVFVAFREFNLSESKVCELQLPDINLVNDQKKLVSSDLWRIVLNSSQNGADDQSSASESGSQSTCDPLVTPTALAACTRVDSCFTPWFVPSLCVSFQFAHLEFHLCHHLDQLGTAAPQYLQPFVSDRNMPSELEYMIVSFREPHMYLRQWNNGSVCQEIQFLAQADCKLLECRNVTMQSVVKPFSIFGQMAVSSDVVEKLLDCTVIVDSVFVNLGQHVVHSLNTAIQAWQQNKCPEVEELVFSHFVICNDTQETLRFGQVDTDENILLASLHSHQYSWRSHKSPQLLHICIEGWGNWRWSEPFSVDHAGTFIRTIQYRGRTASLIIKVQQLNGVQKQIIICGRQIICSYLSQSIELKVVQHYIGQDGQAVVREHFDCLTAKQKLPSYILENNELTELCVKAKGDEDWSRDVCLESKAPEYSIVIQVPSSNSSIIYVWCTVLTLEPNSQVQQRMIVFSPLFIMRSHLPDPIIIHLEKRSLGLSETQIIPGKGQEKPLQNIEPDLVHHLTFQAREEYDPSDCAVPISTSLIKQIATKVHPGGTVNQILDEFYGPEKSLQPIWPYNKKDSDRNEQLSQWDSPMRVKLSIWKPYVRTLLIELLPWALLINESKWDLWLFEGEKIVLQVPAGKIIIPPNFQEAFQIGIYWANTNTVHKSVAIKLVHNLTSPKWKDGGNGEVVTLDEEAFVDTEIRLGAFPGHQKLCQFCISSMVQQGIQIIQIEDKTTIINNTPYQIFYKPQLSVCNPHSGKEYFRVPDSATFSICPGGEQPAMKSSSLPCWDLMPDISQSVLDASLLQKQIMLGFSPAPGADSSQCWSLPAIVRPEFPRQSVAVPLGNFRENGFCTRAIVLTYQEHLGVTYLTLSEDPSPRVIIHNRCPVKMLIKENIKDIPKFEVYCKKIPSECSIHHELYHQISSYPDCKTKDLLPSLLLRVEPLDEVTTEWSDAIDINSQGTQVVFLTGFGYVYVDVVHQCGTVFITVAPEGKAGPILTNTNRAPEKIVTFKMFITQLSLAVFDDLTHHKASAELLRLTLDNIFLCVAPGAGPLPGEEPVAALFELYCVEICCGDLQLDNQLYNKSNFHFAVLVCQGEKAEPIQCSKMQSLLISNKELEEYKEKCFIKLCITLNEGKSILCDINEFSFELKPARLYVEDTFVYYIKTLFDTYLPNSRLAGHSTHLSGGKQVLPMQVTQHARALVNPVKLRKLVIQPVNLLVSIHASLKLYIASDHTPLSFSVFERGPIFTTARQLVHALAMHYAAGALFRAGWVVGSLDILGSPASLVRSIGNGVADFFRLPYEGLTRGPGAFVSGVSRGTTSFVKHISKGTLTSITNLATSLARNMDRLSLDEEHYNRQEEWRRQLPESLGEGLRQGLSRLGISLLGAIAGIVDQPMQNFQKTSEAQASAGHKAKGVISGVGKGIMGVFTKPIGGAAELVSQTGYGILHGAGLSQLPKQRHQPSDLHADQAPNSHVKYVWKMLQSLGRPEVHMALDVVLVRGSGQEHEGCLLLTSEVLFVVSVSEDTQQQAFPVTEIDCAQDSKQNNLLTVQLKQPRVACDVEVDGVRERLSEQQYNRLVDYITKTSCHLAPSCSSMQIPCPVVAAEPPPSTVKTYHYLVDPHFAQVFLSKFTMVKNKALRKGFP

SEQ ID NO: 36106 - protein, 53 aa, Artificial Sequence
  Synthetic polypeptide
IIHYGHMGLPRNARSLNKNRKKWIYLMEAWLKPHLATVVLRIVELAVTVLKSE

SEQ ID NO: 36107 - protein, 47 aa, Artificial Sequence
  Synthetic polypeptide
IQQHRMNYTLWPHGITQKCKISKQEQKKVDIFDGGMAETSSRYSGAQ

SEQ ID NO: 36108 - protein, 41 aa, Artificial Sequence
  Synthetic polypeptide
IIHYGHMGLPRNARSLNKNRKKWIYLMEAWLKPHLATVVLR

SEQ ID NO: 36109 - protein, 45 aa, Artificial Sequence
  Synthetic polypeptide
TSMQKSSIKYWQTESSSTSKSLSTMIKWASSLGCKRMSIWIYQSL

SEQ ID NO: 36110 - protein, 47 aa, Artificial Sequence
  Synthetic polypeptide
SSGLHPWDASGCQFGYIKAFESKPEFHQTGSDKPFFKEDKKCTQFGT

SEQ ID NO: 36111 - protein, 2078 aa, Artificial Sequence
  Synthetic polypeptide
FTAEFYQRYKEELVPFLLKLFQSVEKQGILRNSFYEASIILIPKPGRDTTKRENFTPISLMNIDAKILNKILANRIQQHIKKLIHHDQVGFIPGMQADVNLDISKPLKANLSFTKLDQINLFLKKIKNAHSLAHSEETSAMSNTMVNKDDLPVSKYYRGKLSKPKIHGDGVQKISAQENMWRAVSCFQKISVQTTQIVISMETVPHTSKPCLLASLSNLNGSLSVKATQKVPGIILGSSFLLSINDFLLKTSLKERSRILIGPCCATANLEAKWCKHSGNPGPEQSIPKISIDLRGGLLQVFWGQEHLNCLVLLHELLNGYLNEEGNFEVQVSEPVPQMSSPVEKNQTFKSEQSSDDLRTGLFQYVQDAESLKLPGVYEVLFYNETEDCPGMMLWRYPEPRVLTLVRITPVPFNTTEDPDISTADLGDVLQVPCSLEYWDELQKVFVAFREFNLSESKVCELQLPDINLVNDQKKLVSSDLWRIVLNSSQNGADDQSSASESGSQSTCDPLVTPTALAACTRVDSCFTPWFVPSLCVSFQFAHLEFHLCHHLDQLGTAAPQYLQPFVSDRNMPSELEYMIVSFREPHMYLRQWNNGSVCQEIQFLAQADCKLLECRNVTMQSVVKPFSIFGQMAVSSDVVEKLLDCTVIVDSVFVNLGQHVVHSLNTAIQAWQQNKCPEVEELVFSHFVICNDTQETLRFGQVDTDENILLASLHSHQYSWRSHKSPQLLHICIEGWGNWRWSEPFSVDHAGTFIRTIQYRGRTASLIIKVQQLNGVQKQIIICGRQIICSYLSQSIELKVVQHYIGQDGQAVVREHFDCLTAKQKLPSYILENNELTELCVKAKGDEDWSRDVCLESKAPEYSIVIQVPSSNSSIIYVWCTVLTLEPNSQVQQRMIVFSPLFIMRSHLPDPIIIHLEKRSLGLSETQIIPGKGQEKPLQNIEPDLVHHLTFQAREEYDPSDCAVPISTSLIKQIATKVHPGGTVNQILDEFYGPEKSLQPIWPYNKKDSDRNEQLSQWDSPMRVKLSIWKPYVRTLLIELLPWALLINESKWDLWLFEGEKIVLQVPAGKIIIPPNFQEAFQIGIYWANTNTVHKSVAIKLVHNLTSPKWKDGGNGEVVTLDEEAFVDTEIRLGAFPGHQKLCQFCISSMVQQGIQIIQIEDKTTIINNTPYQIFYKPQLSVCNPHSGKEYFRVPDSATFSICPGGEQPAMKSSSLPCWDLMPDISQSVLDASLLQKQIMLGFSPAPGADSSQCWSLPAIVRPEFPRQSVAVPLGNFRENGFCTRAIVLTYQEHLGVTYLTLSEDPSPRVIIHNRCPVKMLIKENIKDIPKFEVYCKKIPSECSIHHELYHQISSYPDCKTKDLLPSLLLRVEPLDEVTTEWSDAIDINSQGTQVVFLTGFGYVYVDVVHQCGTVFITVAPEGKAGPILTNTNRAPEKIVTFKMFITQLSLAVFDDLTHHKASAELLRLTLDNIFLCVAPGAGPLPGEEPVAALFELYCVEICCGDLQLDNQLYNKSNFHFAVLVCQGEKAEPIQCSKMQSLLISNKELEEYKEKCFIKLCITLNEGKSILCDINEFSFELKPARLYVEDTFVYYIKTLFDTYLPNSRLAGHSTHLSGGKQVLPMQVTQHARALVNPVKLRKLVIQPVNLLVSIHASLKLYIASDHTPLSFSVFERGPIFTTARQLVHALAMHYAAGALFRAGWVVGSLDILGSPASLVRSIGNGVADFFRLPYEGLTRGPGAFVSGVSRGTTSFVKHISKGTLTSITNLATSLARNMDRLSLDEEHYNRQEEWRRQLPESLGEGLRQGLSRLGISLLGAIAGIVDQPMQNFQKTSEAQASAGHKAKGVISGVGKGIMGVFTKPIGGAAELVSQTGYGILHGAGLSQLPKQRHQPSDLHADQAPNSHVKYVWKMLQSLGRPEVHMALDVVLVRGSGQEHEGCLLLTSEVLFVVSVSEDTQQQAFPVTEIDCAQDSKQNNLLTVQLKQPRVACDVEVDGVRERLSEQQYNRLVDYITKTSCHLAPSCSSMQIPCPVVAAEPPPSTVKTYHYLVDPHFAQVFLSKFTMVKNKALRKGFP

SEQ ID NO: 36112 - protein, 23 aa, Artificial Sequence
  Synthetic polypeptide
HKGYSADISRTPRSDLFNPLRRP

SEQ ID NO: 36113 - protein, 809 aa, Artificial Sequence
  Synthetic polypeptide
HTYAWGKKRTTGNISTRAIVLTYQEHLGVTYLTLSEDPSPRVIIHNRCPVKMLIKENIKDIPKFEVYCKKIPSECSIHHELYHQISSYPDCKTKDLLPSLLLRVEPLDEVTTEWSDAIDINSQGTQVVFLTGFGYVYVDVVHQCGTVFITVAPEGKAGPILTNTNRAPEKIVTFKMFITQLSLAVFDDLTHHKASAELLRLTLDNIFLCVAPGAGPLPGEEPVAALFELYCVEICCGDLQLDNQLYNKSNFHFAVLVCQGEKAEPIQCSKMQSLLISNKELEEYKEKCFIKLCITLNEGKSILCDINEFSFELKPARLYVEDTFVYYIKTLFDTYLPNSRLAGHSTHLSGGKQVLPMQVTQHARALVNPVKLRKLVIQPVNLLVSIHASLKLYIASDHTPLSFSVFERGPIFTTARQLVHALAMHYAAGALFRAGWVVGSLDILGSPASLVRSIGNGVADFFRLPYEGLTRGPGAFVSGVSRGTTSFVKHISKGTLTSITNLATSLARNMDRLSLDEEHYNRQEEWRRQLPESLGEGLRQGLSRLGISLLGAIAGIVDQPMQNFQKTSEAQASAGHKAKGVISGVGKGIMGVFTKPIGGAAELVSQTGYGILHGAGLSQLPKQRHQPSDLHADQAPNSHVKYVWKMLQSLGRPEVHMALDVVLVRGSGQEHEGCLLLTSEVLFVVSVSEDTQQQAFPVTEIDCAQDSKQNNLLTVQLKQPRVACDVEVDGVRERLSEQQYNRLVDYITKTSCHLAPSCSSMQIPCPVVAAEPPPSTVKTYHYLVDPHFAQVFLSKFTMVKNKALRKGFP

SEQ ID NO: 36114 - protein, 18 aa, Artificial Sequence
  Synthetic polypeptide
THMHGGRKEQQEILAQGL

SEQ ID NO: 36115 - protein, 10 aa, Artificial Sequence
  Synthetic polypeptide
EDQMKVREAG

SEQ ID NO: 36116 - protein, 35 aa, Artificial Sequence
  Synthetic polypeptide
KYVRLGSWVSGYSWQPCKPGEKHRERGRRLLQASV

SEQ ID NO: 36117 - protein, 6 aa, Artificial Sequence
  Synthetic polypeptide
QKKEAG

SEQ ID NO: 36118 - protein, 35 aa, Artificial Sequence
  Synthetic polypeptide
RRKRLGSWVSGYSWQPCKPGEKHRERGRRLLQASV

SEQ ID NO: 36119 - protein, 378 aa, Artificial Sequence
  Synthetic polypeptide
EERGWVVGSLDILGSPASLVRSIGNGVADFFRLPYEGLTRGPGAFVSGVSRGTTSFVKHISKGTLTSITNLATSLARNMDRLSLDEEHYNRQEEWRRQLPESLGEGLRQGLSRLGISLLGAIAGIVDQPMQNFQKTSEAQASAGHKAKGVISGVGKGIMGVFTKPIGGAAELVSQTGYGILHGAGLSQLPKQRHQPSDLHADQAPNSHVKYVWKMLQSLGRPEVHMALDVVLVRGSGQEHEGCLLLTSEVLFVVSVSEDTQQQAFPVTEIDCAQDSKQNNLLTVQLKQPRVACDVEVDGVRERLSEQQYNRLVDYITKTSCHLAPSCSSMQIPCPVVAAEPPPSTVKTYHYLVDPHFAQVFLSKFTMVKNKALRKGFP

SEQ ID NO: 36120 - protein, 25 aa, Artificial Sequence
  Synthetic polypeptide
MRMESNNMQILQCLLSKLLYSVIPS

SEQ ID NO: 36121 - protein, 92 aa, Artificial Sequence
  Synthetic polypeptide
EDGIKQYANTSVPAIKTALLSDSFLGLQPYGRQPTWCYSKYIEALEQERILLKIQEELEKKLFAGLQPLTNFKASSSTMSLKKNMSAHSSQK

SEQ ID NO: 36122 - protein, 67 aa, Artificial Sequence
  Synthetic polypeptide
EDGIKQYANTSVPAIKTALLSDSFLGLQPYGRQPTWCYSKYIEALEQERILLKIQEELEKKLFAGIL

SEQ ID NO: 36123 - protein, 39 aa, Artificial Sequence
  Synthetic polypeptide
EHMDSGRGTSHIRPITRRALIRLETLKRLHIMLFPLPGT

SEQ ID NO: 36124 - protein, 59 aa, Artificial Sequence
  Synthetic polypeptide
VHVLCRDMDEAGNHHSQQTIPRTKNRTPHVLTHRWELNNENTWTQEGEHHTSGRLQGEL

SEQ ID NO: 36125 - protein, 306 aa, Artificial Sequence
  Synthetic polypeptide
TMRTHGLRKGNITHPADYKESFNTIGNIEEIAYNAVSFTWDVNEEAKIFITVNCLSTDFSSQKGVKGLPLMIQIDTYSYNNRSNKPIHRAYCQIKVFCDKGAERKIRDEERKQNRKKGKGQASQTQCNSSSDGKLAAIPLQKKSDITYFKTMPDLHSQPVLFIPDVHFANLQRTGQVYYNTDDEREGGSVLVKRMFRPMEEEFGPVPSKQMKEEGTKRVLLYVRKETDDVFDALMLKSPTVKGLMEAISEKYGLPVEKIAKLYKKSKKGILVNMDDNIIEHYSNEDTFILNMESMVEGFKVTLMEI

SEQ ID NO: 36126 - protein, 10 aa, Artificial Sequence
  Synthetic polypeptide
HQGSRKKNPR

SEQ ID NO: 36127 - protein, 229 aa, Artificial Sequence
  Synthetic polypeptide
EIVTATPTFSNPHPDQSAAINIKGAERKIRDEERKQNRKKGKGQASQTQCNSSSDGKLAAIPLQKKSDITYFKTMPDLHSQPVLFIPDVHFANLQRTGQVYYNTDDEREGGSVLVKRMFRPMEEEFGPVPSKQMKEEGTKRVLLYVRKETDDVFDALMLKSPTVKGLMEAISEKYGLPVEKIAKLYKKSKKGILVNMDDNIIEHYSNEDTFILNMESMVEGFKVTLMEI

SEQ ID NO: 36128 - protein, 145 aa, Artificial Sequence
  Synthetic polypeptide
FMHQTSFLPYCKKLLQPPQPSATLTLISQQLLTSREQKEKSEMKSGSRTGRKGKARPPKLNATAPLMGSWLPYLYRRRVTSPTSKPCLISTHSQFSSYLMFTLQTCRGPDRCITTRMMNEKVAVSLLNGCSGPWKRSLVQCLQSR

SEQ ID NO: 36129 - protein, 9 aa, Artificial Sequence
  Synthetic polypeptide
NSPSVLQHG

SEQ ID NO: 36130 - protein, 135 aa, Artificial Sequence
  Synthetic polypeptide
VKIPQVYYNTDDEREGGSVLVKRMFRPMEEEFGPVPSKQMKEEGTKRVLLYVRKETDDVFDALMLKSPTVKGLMEAISEKYGLPVEKIAKLYKKSKKGILVNMDDNIIEHYSNEDTFILNMESMVEGFKVTLMEI

SEQ ID NO: 36131 - protein, 58 aa, Artificial Sequence
  Synthetic polypeptide
SQEFLIRIRIPEFHPSSFELKFPKCITTRMMNEKVAVSLLNGCSGPWKRSLVQCLQSR

SEQ ID NO: 36132 - protein, 27 aa, Artificial Sequence
  Synthetic polypeptide
GRVRWLSPVIPALWEAEAGRLPEGKWS

SEQ ID NO: 36133 - protein, 359 aa, Artificial Sequence
  Synthetic polypeptide
SQHFGRLRRADCLRENGADSILDLGLVDSSEKVQQENRKRHGSSRSVVDMDLDDTDDGDDNAPLFYQPGKRGFYTPRPGKNTEARLNCFRNIGRILGLCLLQNELCPITLNRHVIKVLLGRKVNWHDFAFFDPVMYESLRQLILASQSSDADAVFSAMDLAFAIDLCKEEGGGQVELIPNGVNIPVTPQNVYEYVRKYAEHRMLVVAEQPLHAMRKGLLDVLPKNSLEDLTAEDFRLLVNGCGEVNVQMLISFTSFNDESGENAEKLLQFKRWFWSIVEKMSMTERQDLVYFWTSSPSLPASEEGFQPMPSITIRPPDDQHLPTANTCISRLYVPLYSSKQILKQKLLLAIKTKNFGFV

SEQ ID NO: 36134 - protein, 358 aa, Artificial Sequence
  Synthetic polypeptide
SQHFGRLRRADCLRENGADSILDLGLVDSSEKVQENRKRHGSSRSVVDMDLDDTDDGDDNAPLFYQPGKRGFYTPRPGKNTEARLNCFRNIGRILGLCLLQNELCPITLNRHVIKVLLGRKVNWHDFAFFDPVMYESLRQLILASQSSDADAVFSAMDLAFAIDLCKEEGGGQVELIPNGVNIPVTPQNVYEYVRKYAEHRMLVVAEQPLHAMRKGLLDVLPKNSLEDLTAEDFRLLVNGCGEVNVQMLISFTSFNDESGENAEKLLQFKRWFWSIVEKMSMTERQDLVYFWTSSPSLPASEEGFQPMPSITIRPPDDQHLPTANTCISRLYVPLYSSKQILKQKLLLAIKTKNFGFV

SEQ ID NO: 36135 - protein, 2784 aa, Artificial Sequence
  Synthetic polypeptide
SHLLRRLREVSEKLNKYNLNSHPPLNVLEQATIKQCVVGPNHAAFLLEDGRVCRIGFSVQPDRLELGKPDNNDGSKLNSNSGAGRTSRPGRTSDSPWFLSGSETLGRLAGNTLGSRWSSGVGGSGGGSSGRSSAGARDSRRQTRVIRTGRDRGSGLLGSQPQPVIPASVIPEELISQAQVVLQGKSRSVIIRELQRTNLDVNLAVNNLLSRDDEDGDDGDDTASESYLPGEDLMSLLDADIHSAHPSVIIDADAMFSEDISYFGYPSFRRSSLSRLGSSRVLLLPLERDSELLRERESVLRLRERRWLDGASFDNERGSTSKEGEPNLDKKNTPVQSPVSLGEDLQWWPDKDGTKFICIGALYSELLAVSSKGELYQWKWSESEPYRNAQNPSLHHPRATFLGLTNEKIVLLSANSIRATVATENNKVATWVDETLSSVASKLEHTAQTYSELQGERIVSLHCCALYTCAQLENSLYWWGVVPFSQRKKMLEKARAKNKKPKSSAGISSMPNITVGTQVCLRNNPLYHAGAVAFSISAGIPKVGVLMESVWNMNDSCRFQLRSPESLKNMEKASKTTEAKPESKQEPVKTEMGPPPSPASTCSDASSIASSASMPYKRRRSTPAPKEEEKVNEEQWSLREVVFVEDVKNVPVGKVLKVDGAYVAVKFPGTSSNTNCQNSSGPDADPSSLLQDCRLLRIDELQVVKTGGTPKVPDCFQRTPKKLCIPEKTEILAVNVDSKGVHAVLKTGNWVRYCIFDLATGKAEQENNFPTSSIAFLGQNERNVAIFTAGQESPIILRDGNGTIYPMAKDCMGGIRDPDWLDLPPISSLGMGVHSLINLPANSTIKKKAAVIIMAVEKQTLMQHILRCDYEACRQYLMNLEQAVVLEQNLQMLQTFISHRCDGNRNILHACVSVCFPTSNKETKEEEEAERSERNTFAERLSAVEAIANAISVVSSNGPGNRAGSSSSRSLRLREMMRRSLRAAGLGRHEAGASSSDHQDPVSPPIAPPSWVPDPPAMDPDGDIDFILAPAVGSLTTAATGTGQGPSTSTIPGPSTEPSVVESKDRKANAHFILKLLCDSVVLQPYLRELLSAKDARGMTPFMSAVSGRAYPAAITILETAQKIAKAEISSSEKEEDVFMGMVCPSGTNPDDSPLYVLCCNDTCSFTWTGAEHINQDIFECRTCGLLESLCCCTECARVCHKGHDCKLKRTSPTAYCDCWEKCKCKTLIAGQKSARLDLLYRLLTATNLVTLPNSRGEHLLLFLVQTVARQTVEHCQYRPPRIREDRNRKTASPEDSDMPDHDLEPPRFAQLALERVLQDWNALKSMIMFGSQENKDPLSASSRIGHLLPEEQVYLNQQSGTIRLDCFTHCLIVKCTADILLLDTLLGTLVKELQNKYTPGRREEAIAVTMRFLRSVARVFVILSVEMASSKKKNNFIPQPIGKCKRVFQALLPYAVEELCNVAESLIVPVRMGIARPTAPFTLASTSIDAMQGSEELFSVEPLPPRPSSDQSSSSSQSQSSYIIRNPQQRRISQSQPVRGRDEEQDDIVSADVEEVEVVEGVAGEEDHHDEQEEHGEENAEAEGQHDEHDEDGSDMELDLLAAAETESDSESNHSNQDNASGRRSVVTAATAGSEAGASSVPAFFSEDDSQSNDSSDSDSSSSQSDDIEQETFMLDEPLERTTNSSHANGAAQAPRSMQWAVRNTQHQRAASTAPSSTSTPAASSAGLIYIDPSNLRRSGTISTSAAAAAAALEASNASSYLTSASSLARAYSIVIRQISDLMGLIPKYNHLVYSQIPAAVKLTYQDAVNLQNYVEEKLIPTWNWMVSIMDSTEAQLRYGSALASAGDPGHPNHPLHASQNSARRERMTAREEASLRTLEGRRRATLLSARQGMMSARGDFLNYALSLMRSHNDEHSDVLPVLDVCSLKHVAYVFQALIYWIKAMNQQTTLDTPQLERKRTRELLELGIDNEDSEHENDDDTNQSATLNDKDDDSLPAETGQNHPFFRRSDSMTFLGCIPPNPFEVPLAEAIPLADQPHLLQPNARKEDLFGRPSQGLYSSSASSGKCLMEVTVDRNCLEVLPTKMSYAANLKNVMNMQNRQKKEGEEQPVLPEETESSKPGPSAHDLAAQLKSSLLAEIGLTESEGPPLTSFRPQCSFMGMVISHDMLLGRWRLSLELFGRVFMEDVGAEPGSILTELGGFEVKESKFRREMEKLRNQQSRDLSLEVDRDRDLLIQQTMRQLNNHFGRRCATTPMAVHRVKVTFKDEPGEGSGVARSFYTAIAQAFLSNEKLPNLECIQNANKGTHTSLMQRLRNRGERDREREREREMRRSSGLRAGSRRDRDRDFRRQLSIDTRPFRPASEGNPSDDPEPLPAHRQALGERLYPRVQAMQPAFASKITGMLLELSPAQLLLLLASEDSLRARVDEAMELIIAHGRENGADSILDLGLVDSSEKVQQENRKRHGSSRSVVDMDLDDTDDGDDNAPLFYQPGKRGFYTPRPGKNTEARLNCFRNIGRILGLCLLQNELCPITLNRHVIKVLLGRKVNWHDFAFFDPVMYESLRQLILASQSSDADAVFSAMDLAFAIDLCKEEGGGQVELIPNGVNIPVTPQNVYEYVRKYAEHRMLVVAEQPLHAMRKGLLDVLPKNSLEDLTAEDFRLLVNGCGEVNVQMLISFTSFNDESGENAEKLLQFKRWFWSIVEKMSMTERQDLVYFWTSSPSLPASEEGFQPMPSITIRPPDDQHLPTANTCISRLYVPLYSSKQILKQKLLLAIKTKNFGFV

SEQ ID NO: 36136 - protein, 22 aa, Artificial Sequence
  Synthetic polypeptide
PGVVTCACNPTYSGGYEKFLRS

SEQ ID NO: 36137 - protein, 15 aa, Artificial Sequence
  Synthetic polypeptide
HVLVIPPTQEVTRSF

SEQ ID NO: 36138 - protein, 2783 aa, Artificial Sequence
  Synthetic polypeptide
SHLLRRLREVSEKLNKYNLNSHPPLNVLEQATIKQCVVGPNHAAFLLEDGRVCRIGFSVQPDRLELGKPDNNDGSKLNSNSGAGRTSRPGRTSDSPWFLSGSETLGRLAGNTLGSRWSSGVGGSGGGSSGRSSAGARDSRRQTRVIRTGRDRGSGLLGSQPQPVIPASVIPEELISQAQVVLQGKSRSVIIRELQRTNLDVNLAVNNLLSRDDEDGDDGDDTASESYLPGEDLMSLLDADIHSAHPSVIIDADAMFSEDISYFGYPSFRRSSLSRLGSSRVLLLPLERDSELLRERESVLRLRERRWLDGASFDNERGSTSKEGEPNLDKKNTPVQSPVSLGEDLQWWPDKDGTKFICIGALYSELLAVSSKGELYQWKWSESEPYRNAQNPSLHHPRATFLGLTNEKIVLLSANSIRATVATENNKVATWVDETLSSVASKLEHTAQTYSELQGERIVSLHCCALYTCAQLENSLYWWGVVPFSQRKKMLEKARAKNKKPKSSAGISSMPNITVGTQVCLRNNPLYHAGAVAFSISAGIPKVGVLMESVWNMNDSCRFQLRSPESLKNMEKASKTTEAKPESKQEPVKTEMGPPPSPASTCSDASSIASSASMPYKRRRSTPAPKEEEKVNEEQWSLREVVFVEDVKNVPVGKVLKVDGAYVAVKFPGTSSNTNCQNSSGPDADPSSLLQDCRLLRIDELQVVKTGGTPKVPDCFQRTPKKLCIPEKTEILAVNVDSKGVHAVLKTGNWVRYCIFDLATGKAEQENNFPTSSIAFLGQNERNVAIFTAGQESPIILRDGNGTIYPMAKDCMGGIRDPDWLDLPPISSLGMGVHSLINLPANSTIKKKAAVIIMAVEKQTLMQHILRCDYEACRQYLMNLEQAVVLEQNLQMLQTFISHRCDGNRNILHACVSVCFPTSNKETKEEEEAERSERNTFAERLSAVEAIANAISVVSSNGPGNRAGSSSSRSLRLREMMRRSLRAAGLGRHEAGASSSDHQDPVSPPIAPPSWVPDPPAMDPDGDIDFILAPAVGSLTTAATGTGQGPSTSTIPGPSTEPSVVESKDRKANAHFILKLLCDSVVLQPYLRELLSAKDARGMTPFMSAVSGRAYPAAITILETAQKIAKAEISSSEKEEDVFMGMVCPSGTNPDDSPLYVLCCNDTCSFTWTGAEHINQDIFECRTCGLLESLCCCTECARVCHKGHDCKLKRTSPTAYCDCWEKCKCKTLIAGQKSARLDLLYRLLTATNLVTLPNSRGEHLLLFLVQTVARQTVEHCQYRPPRIREDRNRKTASPEDSDMPDHDLEPPRFAQLALERVLQDWNALKSMIMFGSQENKDPLSASSRIGHLLPEEQVYLNQQSGTIRLDCFTHCLIVKCTADILLLDTLLGTLVKELQNKYTPGRREEAIAVTMRFLRSVARVFVILSVEMASSKKKNNFIPQPIGKCKRVFQALLPYAVEELCNVAESLIVPVRMGIARPTAPFTLASTSIDAMQGSEELFSVEPLPPRPSSDQSSSSSQSQSSYIIRNPQQRRISQSQPVRGRDEEQDDIVSADVEEVEVVEGVAGEEDHHDEQEEHGEENAEAEGQHDEHDEDGSDMELDLLAAAETESDSESNHSNQDNASGRRSVVTAATAGSEAGASSVPAFFSEDDSQSNDSSDSDSSSSQSDDIEQETFMLDEPLERTTNSSHANGAAQAPRSMQWAVRNTQHQRAASTAPSSTSTPAASSAGLIYIDPSNLRRSGTISTSAAAAAAALEASNASSYLTSASSLARAYSIVIRQISDLMGLIPKYNHLVYSQIPAAVKLTYQDAVNLQNYVEEKLIPTWNWMVSIMDSTEAQLRYGSALASAGDPGHPNHPLHASQNSARRERMTAREEASLRTLEGRRRATLLSARQGMMSARGDFLNYALSLMRSHNDEHSDVLPVLDVCSLKHVAYVFQALIYWIKAMNQQTTLDTPQLERKRTRELLELGIDNEDSEHENDDDTNQSATLNDKDDDSLPAETGQNHPFFRRSDSMTFLGCIPPNPFEVPLAEAIPLADQPHLLQPNARKEDLFGRPSQGLYSSSASSGKCLMEVTVDRNCLEVLPTKMSYAANLKNVMNMQNRQKKEGEEQPVLPEETESSKPGPSAHDLAAQLKSSLLAEIGLTESEGPPLTSFRPQCSFMGMVISHDMLLGRWRLSLELFGRVFMEDVGAEPGSILTELGGFEVKESKFRREMEKLRNQQSRDLSLEVDRDRDLLIQQTMRQLNNHFGRRCATTPMAVHRVKVTFKDEPGEGSGVARSFYTAIAQAFLSNEKLPNLECIQNANKGTHTSLMQRLRNRGERDREREREREMRRSSGLRAGSRRDRDRDFRRQLSIDTRPFRPASEGNPSDDPEPLPAHRQALGERLYPRVQAMQPAFASKITGMLLELSPAQLLLLLASEDSLRARVDEAMELIIAHGRENGADSILDLGLVDSSEKVQENRKRHGSSRSVVDMDLDDTDDGDDNAPLFYQPGKRGFYTPRPGKNTEARLNCFRNIGRILGLCLLQNELCPITLNRHVIKVLLGRKVNWHDFAFFDPVMYESLRQLILASQSSDADAVFSAMDLAFAIDLCKEEGGGQVELIPNGVNIPVTPQNVYEYVRKYAEHRMLVVAEQPLHAMRKGLLDVLPKNSLEDLTAEDFRLLVNGCGEVNVQMLISFTSFNDESGENAEKLLQFKRWFWSIVEKMSMTERQDLVYFWTSSPSLPASEEGFQPMPSITIRPPDDQHLPTANTCISRLYVPLYSSKQILKQKLLLAIKTKNFGFV

SEQ ID NO: 36139 - protein, 2777 aa, Artificial Sequence
  Synthetic polypeptide
SHLLRRLREVSEKLNKYNLNSHPPLNVLEQATIKQCVVGPNHAAFLLEDGRVCRIGFSVQPDRLELGKPDNNDGSKLNSNSGAGRTSRPGRTSDSPWFLSGSETLGRLAGNTLGSRWSSGVGGSGGGSSGRSSAGARDSRRQTRVIRTGRDRGSGLLGSQPQPVIPASVIPEELISQAQVVLQGKSRSVIIRELQRTNLDVNLAVNNLLSRDDEDGDDGDDTASESYLPGEDLMSLLDADIHSAHPSVIIDADAMFSEDISYFGYPSFRRSSLSRLGSSRERDSELLRERESVLRLRERRWLDGASFDNERGSTSKEGEPNLDKKNTPVQSPVSLGEDLQWWPDKDGTKFICIGALYSELLAVSSKGELYQWKWSESEPYRNAQNPSLHHPRATFLGLTNEKIVLLSANSIRATVATENNKVATWVDETLSSVASKLEHTAQTYSELQGERIVSLHCCALYTCAQLENSLYWWGVVPFSQRKKMLEKARAKNKKPKSSAGISSMPNITVGTQVCLRNNPLYHAGAVAFSISAGIPKVGVLMESVWNMNDSCRFQLRSPESLKNMEKASKTTEAKPESKQEPVKTEMGPPPSPASTCSDASSIASSASMPYKRRRSTPAPKEEEKVNEEQWSLREVVFVEDVKNVPVGKVLKVDGAYVAVKFPGTSSNTNCQNSSGPDADPSSLLQDCRLLRIDELQVVKTGGTPKVPDCFQRTPKKLCIPEKTEILAVNVDSKGVHAVLKTGNWVRYCIFDLATGKAEQENNFPTSSIAFLGQNERNVAIFTAGQESPIILRDGNGTIYPMAKDCMGGIRDPDWLDLPPISSLGMGVHSLINLPANSTIKKKAAVIIMAVEKQTLMQHILRCDYEACRQYLMNLEQAVVLEQNLQMLQTFISHRCDGNRNILHACVSVCFPTSNKETKEEEEAERSERNTFAERLSAVEAIANAISVVSSNGPGNRAGSSSSRSLRLREMMRRSLRAAGLGRHEAGASSSDHQDPVSPPIAPPSWVPDPPAMDPDGDIDFILAPAVGSLTTAATGTGQGPSTSTIPGPSTEPSVVESKDRKANAHFILKLLCDSVVLQPYLRELLSAKDARGMTPFMSAVSGRAYPAAITILETAQKIAKAEISSSEKEEDVFMGMVCPSGTNPDDSPLYVLCCNDTCSFTWTGAEHINQDIFECRTCGLLESLCCCTECARVCHKGHDCKLKRTSPTAYCDCWEKCKCKTLIAGQKSARLDLLYRLLTATNLVTLPNSRGEHLLLFLVQTVARQTVEHCQYRPPRIREDRNRKTASPEDSDMPDHDLEPPRFAQLALERVLQDWNALKSMIMFGSQENKDPLSASSRIGHLLPEEQVYLNQQSGTIRLDCFTHCLIVKCTADILLLDTLLGTLVKELQNKYTPGRREEAIAVTMRFLRSVARVFVILSVEMASSKKKNNFIPQPIGKCKRVFQALLPYAVEELCNVAESLIVPVRMGIARPTAPFTLASTSIDAMQGSEELFSVEPLPPRPSSDQSSSSSQSQSSYIIRNPQQRRISQSQPVRGRDEEQDDIVSADVEEVEVVEGVAGEEDHHDEQEEHGEENAEAEGQHDEHDEDGSDMELDLLAAAETESDSESNHSNQDNASGRRSVVTAATAGSEAGASSVPAFFSEDDSQSNDSSDSDSSSSQSDDIEQETFMLDEPLERTTNSSHANGAAQAPRSMQWAVRNTQHQRAASTAPSSTSTPAASSAGLIYIDPSNLRRSGTISTSAAAAAAALEASNASSYLTSASSLARAYSIVIRQISDLMGLIPKYNHLVYSQIPAAVKLTYQDAVNLQNYVEEKLIPTWNWMVSIMDSTEAQLRYGSALASAGDPGHPNHPLHASQNSARRERMTAREEASLRTLEGRRRATLLSARQGMMSARGDFLNYALSLMRSHNDEHSDVLPVLDVCSLKHVAYVFQALIYWIKAMNQQTTLDTPQLERKRTRELLELGIDNEDSEHENDDDTNQSATLNDKDDDSLPAETGQNHPFFRRSDSMTFLGCIPPNPFEVPLAEAIPLADQPHLLQPNARKEDLFGRPSQGLYSSSASSGKCLMEVTVDRNCLEVLPTKMSYAANLKNVMNMQNRQKKEGEEQPVLPEETESSKPGPSAHDLAAQLKSSLLAEIGLTESEGPPLTSFRPQCSFMGMVISHDMLLGRWRLSLELFGRVFMEDVGAEPGSILTELGGFEVKESKFRREMEKLRNQQSRDLSLEVDRDRDLLIQQTMRQLNNHFGRRCATTPMAVHRVKVTFKDEPGEGSGVARSFYTAIAQAFLSNEKLPNLECIQNANKGTHTSLMQRLRNRGERDREREREREMRRSSGLRAGSRRDRDRDFRRQLSIDTRPFRPASEGNPSDDPEPLPAHRQALGERLYPRVQAMQPAFASKITGMLLELSPAQLLLLLASEDSLRARVDEAMELIIAHGRENGADSILDLGLVDSSEKVQENRKRHGSSRSVVDMDLDDTDDGDDNAPLFYQPGKRGFYTPRPGKNTEARLNCFRNIGRILGLCLLQNELCPITLNRHVIKVLLGRKVNWHDFAFFDPVMYESLRQLILASQSSDADAVFSAMDLAFAIDLCKEEGGGQVELIPNGVNIPVTPQNVYEYVRKYAEHRMLVVAEQPLHAMRKGLLDVLPKNSLEDLTAEDFRLLVNGCGEVNVQMLISFTSFNDESGENAEKLLQFKRWFWSIVEKMSMTERQDLVYFWTSSPSLPASEEGFQPMPSITIRPPDDQHLPTANTCISRLYVPLYSSKQILKQKLLLAIKTKNFGFV

SEQ ID NO: 36140 - protein, 10 aa, Artificial Sequence
  Synthetic polypeptide
FKNKRKAFQL

SEQ ID NO: 36141 - protein, 96 aa, Artificial Sequence
  Synthetic polypeptide
DLISTNNLKIREKPFSCSWKGCERRFARSDELSRHRRTHTGEKKFACPMCDRRFMRSDHLTKHARRHLSAKKLPNWQMEVSKLNDIALPPTPAPTQ

SEQ ID NO: 36142 - protein, 49 aa, Artificial Sequence
  Synthetic polypeptide
LELEGLCEGIGAGLVDVAIWVGTCSDYPKGDASTGWNSVSRIIIEELPK

SEQ ID NO: 36143 - protein, 12 aa, Artificial Sequence
  Synthetic polypeptide
NWKDFVKELVLD

SEQ ID NO: 36144 - protein, 6 aa, Artificial Sequence
  Synthetic polypeptide
RIGRTL

SEQ ID NO: 36145 - protein, 194 aa, Artificial Sequence
  Synthetic polypeptide
LEASQGLTRSRCHRHTSYATCRTGDASPSTPEENETTTTSAFTIQEYFAKRMAALKNKPQVPVPGSDISETQVERKRGKKRNKEATGKDVESYLQPKAKRHTEGKPERAEAQERVAKKKSAPAEEQLRGPCWDQSSKASAQDAGDHVQPPEGRDFTLKPKKRRGKKKLQKPVEIAEDATLEETLVKKKKKKDSK

SEQ ID NO: 36146 - protein, 65 aa, Artificial Sequence
  Synthetic polypeptide
WAGSPFSFHHDWKLPKASPGADAIGTPPMQPAELAMPVPPLQRRTKPRQPAPSPSRSTLPSGWQH

SEQ ID NO: 36147 - protein, 101 aa, Artificial Sequence
  Synthetic polypeptide
VLTLSSHETWLFKSLAPPPAIWPCDGLALPSPSTMIGSFPRPHQEQMPSAHLLCNLQNWRCQSLHSRGERNHDNQRLHHPGVLCQADGSTEEQAPGSSSRV

SEQ ID NO: 36148 - protein, 66 aa, Artificial Sequence
  Synthetic polypeptide
LEASQGLTRSRCHRHTSYATCRTGDASPSTPEENETTTTSAFTIQEYFAKRMAALKNKPQVPVPGS

SEQ ID NO: 36149 - protein, 54 aa, Artificial Sequence
  Synthetic polypeptide
LEASQGLTRSRCHRHTSYATCRTGDASPSTPEENETTTTSAFTIQEYFAKRMAA

SEQ ID NO: 36150 - protein, 89 aa, Artificial Sequence
  Synthetic polypeptide
VLTLSSHETWLFKSLAPPPAIWPCDGLALPSPSTMIGSFPRPHQEQMPSAHLLCNLQNWRCQSLHSRGERNHDNQRLHHPGVLCQADGS

SEQ ID NO: 36151 - protein, 26 aa, Artificial Sequence
  Synthetic polypeptide
PCFSHCHHLSSLTGFRGSGARSHRSY

SEQ ID NO: 36152 - protein, 398 aa, Artificial Sequence
  Synthetic polypeptide
LGLGAQEQGATDHIKVQVKNNHLGLGATINNEDNWIAHQDDFNQLLAELNTCHGQETTDSSDKKEKKSFSLEEKSKISKNRVHYMKFTKGKSWKALTLSQKRPYVDEAERLRLQHMQDYPNYKYRPRRKKQAKRLCKRVDPGFLLSSLSRDQNALPEKRSGSRGALGEKEDRGEYSPGTALPSLRGCYHEGPAGGGGGGTPSSVDTYPYGLPTPPEMSPLDVLEPEQTFFSSPCQEEHGHPRRIPHLPGHPYSPEYAPSPLHCSHPLGSLALGQSPGVSMMSPVPGCPPSPAYYSPATYHPLHSNLQAHLGQLSPPPEHPGFDALDQLSQVELLGDMDRNEFDQYLNTPGHPDSATGAMALSGHVPVSQVTPTGPTETSLISVLADATATYYNSYSVS

SEQ ID NO: 36153 - protein, 14 aa, Artificial Sequence
  Synthetic polypeptide
MLQPLSSLELTDWV

SEQ ID NO: 36154 - protein, 286 aa, Artificial Sequence
  Synthetic polypeptide
LGLGAQEQGATDHIKVQVKNNHLGLGATINNEDNWIAHQDDFNQLLAELNTCHGQETTDSSDKKEKKSFSLEEKSKISKNRVHYMKFTKGKDLSSRSKTDLDCIFGKRQSKKTPEGDASPSTPEENETTTTSAFTIQEYFAKRMAALKNKPQVPVPGSDISETQVERKRGKKRNKEATGKDVESYLQPKAKRHTEGKPERAEAQERVAKKKSAPAEEQLRGPCWDQSSKASAQDAGDHVQPPEGRDFTLKPKKRRGKKKLQKPVEIAEDATLEETLVKKKKKKDSK

SEQ ID NO: 36155 - protein, 132 aa, Artificial Sequence
  Synthetic polypeptide
LGLGAQEQGATDHIKVQVKNNHLGLGATINNEDNWIAHQDDFNQLLAELNTCHGQETTDSSDKKEKKSFSLEEKSKISKNRVHYMKFTKGRCQSLHSRGERNHDNQRLHHPGVLCQADGSTEEQAPGSSSRV

SEQ ID NO: 36156 - protein, 146 aa, Artificial Sequence
  Synthetic polypeptide
LGLGAQEQGATDHIKVQVKNNHLGLGATINNEDNWIAHQDDFNQLLAELNTCHGQETTDSSDKKEKKSFSLEEKSKISKNRVHYMKFTKGKDLSSRSKTDLDCIFGKRQSKKTPEGDASPSTPEENETTTTSAFTIQEYFAKRMAA

SEQ ID NO: 36157 - protein, 92 aa, Artificial Sequence
  Synthetic polypeptide
LGLGAQEQGATDHIKVQVKNNHLGLGATINNEDNWIAHQDDFNQLLAELNTCHGQETTDSSDKKEKKSFSLEEKSKISKNRVHYMKFTKVYC

SEQ ID NO: 36158 - protein, 442 aa, Artificial Sequence
  Synthetic polypeptide
ILCTAFGAGRRKQKWAVDPQNTAWSNDDSKFGQRMLEKMGWSKGKGLGAQEQGATDHIKVQVKNNHLGLGATINNEDNWIAHQDDFNQLLAELNTCHGQETTDSSDKKEKKSFSLEEKSKISKNRVHYMKFTKGKSWKALTLSQKRPYVDEAERLRLQHMQDYPNYKYRPRRKKQAKRLCKRVDPGFLLSSLSRDQNALPEKRSGSRGALGEKEDRGEYSPGTALPSLRGCYHEGPAGGGGGGTPSSVDTYPYGLPTPPEMSPLDVLEPEQTFFSSPCQEEHGHPRRIPHLPGHPYSPEYAPSPLHCSHPLGSLALGQSPGVSMMSPVPGCPPSPAYYSPATYHPLHSNLQAHLGQLSPPPEHPGFDALDQLSQVELLGDMDRNEFDQYLNTPGHPDSATGAMALSGHVPVSQVTPTGPTETSLISVLADATATYYNSYSVS

SEQ ID NO: 36159 - protein, 74 aa, Artificial Sequence
  Synthetic polypeptide
RIWFLLGDVRQISFSKPQIFISASDNGTIHTRWGTVKTEYYVQRLEQVGGSRSGLWILRTLPGVMTIPSLASGC

SEQ ID NO: 36160 - protein, 27 aa, Artificial Sequence
  Synthetic polypeptide
KLNIMYSVWSRSAEAEVGCGSSEHCLE

SEQ ID NO: 36161 - protein, 330 aa, Artificial Sequence
  Synthetic polypeptide
ILCTAFGAGRRKQKWAVDPQNTAWSNDDSKFGQRMLEKMGWSKGKGLGAQEQGATDHIKVQVKNNHLGLGATINNEDNWIAHQDDFNQLLAELNTCHGQETTDSSDKKEKKSFSLEEKSKISKNRVHYMKFTKGKDLSSRSKTDLDCIFGKRQSKKTPEGDASPSTPEENETTTTSAFTIQEYFAKRMAALKNKPQVPVPGSDISETQVERKRGKKRNKEATGKDVESYLQPKAKRHTEGKPERAEAQERVAKKKSAPAEEQLRGPCWDQSSKASAQDAGDHVQPPEGRDFTLKPKKRRGKKKLQKPVEIAEDATLEETLVKKKKKKDSK

SEQ ID NO: 36162 - protein, 176 aa, Artificial Sequence
  Synthetic polypeptide
ILCTAFGAGRRKQKWAVDPQNTAWSNDDSKFGQRMLEKMGWSKGKGLGAQEQGATDHIKVQVKNNHLGLGATINNEDNWIAHQDDFNQLLAELNTCHGQETTDSSDKKEKKSFSLEEKSKISKNRVHYMKFTKGRCQSLHSRGERNHDNQRLHHPGVLCQADGSTEEQAPGSSSRV

SEQ ID NO: 36163 - protein, 190 aa, Artificial Sequence
  Synthetic polypeptide
ILCTAFGAGRRKQKWAVDPQNTAWSNDDSKFGQRMLEKMGWSKGKGLGAQEQGATDHIKVQVKNNHLGLGATINNEDNWIAHQDDFNQLLAELNTCHGQETTDSSDKKEKKSFSLEEKSKISKNRVHYMKFTKGKDLSSRSKTDLDCIFGKRQSKKTPEGDASPSTPEENETTTTSAFTIQEYFAKRMAA

SEQ ID NO: 36164 - protein, 136 aa, Artificial Sequence
  Synthetic polypeptide
ILCTAFGAGRRKQKWAVDPQNTAWSNDDSKFGQRMLEKMGWSKGKGLGAQEQGATDHIKVQVKNNHLGLGATINNEDNWIAHQDDFNQLLAELNTCHGQETTDSSDKKEKKSFSLEEKSKISKNRVHYMKFTKVYC

SEQ ID NO: 36165 - protein, 38 aa, Artificial Sequence
  Synthetic polypeptide
KNISFEVSRTKVGGSRSGLWILRTLPGVMTIPSLASGC

SEQ ID NO: 36166 - protein, 24 aa, Artificial Sequence
  Synthetic polypeptide
ALKLVGPRSAEAEVGCGSSEHCLE

SEQ ID NO: 36167 - protein, 436 aa, Artificial Sequence
  Synthetic polypeptide
DQGRRKQKWAVDPQNTAWSNDDSKFGQRMLEKMGWSKGKGLGAQEQGATDHIKVQVKNNHLGLGATINNEDNWIAHQDDFNQLLAELNTCHGQETTDSSDKKEKKSFSLEEKSKISKNRVHYMKFTKGKSWKALTLSQKRPYVDEAERLRLQHMQDYPNYKYRPRRKKQAKRLCKRVDPGFLLSSLSRDQNALPEKRSGSRGALGEKEDRGEYSPGTALPSLRGCYHEGPAGGGGGGTPSSVDTYPYGLPTPPEMSPLDVLEPEQTFFSSPCQEEHGHPRRIPHLPGHPYSPEYAPSPLHCSHPLGSLALGQSPGVSMMSPVPGCPPSPAYYSPATYHPLHSNLQAHLGQLSPPPEHPGFDALDQLSQVELLGDMDRNEFDQYLNTPGHPDSATGAMALSGHVPVSQVTPTGPTETSLISVLADATATYYNSYSVS

SEQ ID NO: 36168 - protein, 324 aa, Artificial Sequence
  Synthetic polypeptide
DQGRRKQKWAVDPQNTAWSNDDSKFGQRMLEKMGWSKGKGLGAQEQGATDHIKVQVKNNHLGLGATINNEDNWIAHQDDFNQLLAELNTCHGQETTDSSDKKEKKSFSLEEKSKISKNRVHYMKFTKGKDLSSRSKTDLDCIFGKRQSKKTPEGDASPSTPEENETTTTSAFTIQEYFAKRMAALKNKPQVPVPGSDISETQVERKRGKKRNKEATGKDVESYLQPKAKRHTEGKPERAEAQERVAKKKSAPAEEQLRGPCWDQSSKASAQDAGDHVQPPEGRDFTLKPKKRRGKKKLQKPVEIAEDATLEETLVKKKKKKDSK

SEQ ID NO: 36169 - protein, 170 aa, Artificial Sequence
  Synthetic polypeptide
DQGRRKQKWAVDPQNTAWSNDDSKFGQRMLEKMGWSKGKGLGAQEQGATDHIKVQVKNNHLGLGATINNEDNWIAHQDDFNQLLAELNTCHGQETTDSSDKKEKKSFSLEEKSKISKNRVHYMKFTKGRCQSLHSRGERNHDNQRLHHPGVLCQADGSTEEQAPGSSSRV

SEQ ID NO: 36170 - protein, 184 aa, Artificial Sequence
  Synthetic polypeptide
DQGRRKQKWAVDPQNTAWSNDDSKFGQRMLEKMGWSKGKGLGAQEQGATDHIKVQVKNNHLGLGATINNEDNWIAHQDDFNQLLAELNTCHGQETTDSSDKKEKKSFSLEEKSKISKNRVHYMKFTKGKDLSSRSKTDLDCIFGKRQSKKTPEGDASPSTPEENETTTTSAFTIQEYFAKRMAA

SEQ ID NO: 36171 - protein, 130 aa, Artificial Sequence
  Synthetic polypeptide
DQGRRKQKWAVDPQNTAWSNDDSKFGQRMLEKMGWSKGKGLGAQEQGATDHIKVQVKNNHLGLGATINNEDNWIAHQDDFNQLLAELNTCHGQETTDSSDKKEKKSFSLEEKSKISKNRVHYMKFTKVYC

SEQ ID NO: 36172 - protein, 19 aa, Artificial Sequence
  Synthetic polypeptide
QGDVKSCHPAEEKVPVGGY

SEQ ID NO: 36173 - protein, 843 aa, Artificial Sequence
  Synthetic polypeptide
RAAIRLKKKSQSVDINAPGFNPLAGAGKQTPQASKPPAPKTPIIEEEQNNAANTQKHPSRRSELKRFYTIDTGQKKTLDKKDGRRMSFQKPKGTIEYTVESRDSLNSIALKFDTTPNELVQLNKLFSRAVVTGQVLYVPDPEYVSSVESSPSLSPVSPLSPTSSEAEFDKTTNPDVHPTEATPSSTFTGIRPARVVSSTSEEEEAFTEKFLKINCKYITSGKGTVSGVLLVTPNNIMFDPHKNDPLVQENGCEEYGIMCPMEEVMSAAMYKEILDSKIKESLPIDIDQLSGRDFCHSKKMTGSNTEEIDSRIRDAGNDSASTAPRSTEESLSEDVFTESELSPIREELVSSDELRQDKSSGASSESVQTVNQAEVESLTVKSESTGTPGHLRSDTEHSTNEVGTLCHKTDLNNLEMAIKEDQIADNFQGISGPKEDSTSIKGNSDQDSFLHENSLHQEESQKENMPCGETAEFKQKQSVNKGKQGKEQNQDSQTEAEELRKLWKTHTMQQTKQQRENIQQVSQKEAKHKITSADGHIESSALLKEKQRHRLHKFLCLRVGKPMRKTFVSQASATMQQYAQRDKKHEYWFAVPQERTDHLYAFFIQWSPEIYAEDTGEYTREPGFIVVKKIEESETIEDSSNQAAAREWEITTREDINSKQVATVKADLESESFRPNLSDPSELLLPDQIEKLTKHLPPRTIGYPWTLVYGTGKHGTSLKTLYRTMTGLDTPVLMVIKDSDGQVFGALASEPLKVSDGFYGTGETFVFTFCPEFEVFKWTGDNMFFIKGDMDSLAFGGGGGEFALWLDGDLYHGRSHSCKTFGNRTLSKKEDFFIQDIEIWAFE

SEQ ID NO: 36174 - protein, 46 aa, Artificial Sequence
  Synthetic polypeptide
EPSLKQTKELGGNNGLDFESNTRNEKGERLQLLGDLTRGCKELPSG

SEQ ID NO: 36175 - protein, 870 aa, Artificial Sequence
  Synthetic polypeptide
RAAIRLKKKSQSVDINAPGFNPLAGAGKQTPQASKPPAPKTPIIEEEQNNAANTQKHPSRRSELKRFYTIDTGQKKTLDKKDGRRMSFQKPKGTIEYTVESRDSLNSIALKFDTTPNELVQLNKLFSRAVVTGQVLYVPDPEYVSSVESSPSLSPVSPLSPTSSEAEFDKTTNPDVHPTEATPSSTFTGIRPARVVSSTSEEEEAFTEKFLKINCKYITSGKGTVSGVLLVTPNNIMFDPHKNDPLVQENGCEEYGIMCPMEEVMSAAMYKEILDSKIKESLPIDIDQLSGRDFCHSKKMTGSNTEEIDSRIRDAGNDSASTAPRSTEESLSEDVFTESELSPIREELVSSDELRQDKSSGASSESVQTVNQAEVESLTVKSESTGTPGHLRSDTEHSTNEVGTLCHKTDLNNLEMAIKEDQIADNFQGISGPKEDSTSIKGNSDQDSFLHENSLHQEESQKENMPCGETAEFKQKQSVNKGKQGKEQNQDSQTEAEELRKLWKTHTMQQTKQQRENIQQVSQKEAKHKITSADGHIESSALLKEKQRHRLHKFLCLRVGKPMRKTFVSQASATMQQYAQRDKKHEYWFAVPQERTDHLYAFFIQWSPEIYAEDTGEYTREPGFIVVKKIEESETIEDSSNQAAAREWEVVSVAEYHRRIDALNTEELRTLCRRLQITTREDINSKQVATVKADLESESFRPNLSDPSELLLPDQIEKLTKHLPPRTIGYPWTLVYGTGKHGTSLKTLYRTMTGLDTPVLMVIKDSDGQVFGALASEPLKVSDGFYGTGETFVFTFCPEFEVFKWTGDNMFFIKGDMDSLAFGGGGGEFALWLDGDLYHGRSHSCKTFGNRTLSKKEDFFIQDIEIWAFE

SEQ ID NO: 36176 - protein, 410 aa, Artificial Sequence
  Synthetic polypeptide
EQLRSTAPSVSDAEDGGFLHFHLRYIRTMYLGIQSQRRKEHQRRFYWAMMYEYADVNMLRLLETFLESAPQLVLQLYIMLQKNSAETLPCVSSVTSLMSLAWVLASYHKLLRDSRDDKKSMSYRGAIIQVFWRLFTISSRVISFALFASIFQLYFGIFVVVHWCAMAFWIIHGGTDFCMSKWEEILFNMVVGIVYIFCWFNVKEGRTRYRMFAYYTIVLTENAALTFLWYFYRDPETTDSYAVPALCCVFISFVAGIAMMLLYYGVLHPTGPRAKILASSCCAELLWGIPLPPDVEPMAPEIPGYRGTQVTPTRAVTEQQEDLTADTCLPVFQVRPMGPPTPLGRPYLPEGPLIKIDMPRKRYPAWDAHFVDRRLRRTINILQYVTPTAVGIRYRDGPLLYELLQYESSL

SEQ ID NO: 36177 - protein, 59 aa, Artificial Sequence
  Synthetic polypeptide
GRSQDGRIGTAPLYSSQRERCRRRGISAFPSEVYPHHVPGDSEPAAEGTPATLLLGYDV

SEQ ID NO: 36178 - protein, 207 aa, Artificial Sequence
  Synthetic polypeptide
HCRYLNAIQTMCPHILRYLTTAVITNKDVRKRRQVLKDLVKVIQQESYTYKDPITEFVECLYVNFDFDGAQKKLRECESVLVNDFFLVACLEDFIENARLFIFETFCRIHQCISINMLADKLNMTPEEAERWIVNLIRNARLDAKIDSKLGHVVMGNNAVSPYQQVIEKTKSLSFRSQMLAMNIEKKLNQNSRSEAPNWATQDSGFY

SEQ ID NO: 36179 - protein, 20 aa, Artificial Sequence
  Synthetic polypeptide
TDTVDILMQFRQCVHTFFAI

SEQ ID NO: 36180 - protein, 115 aa, Artificial Sequence
  Synthetic polypeptide
HCRYLNAIQTMCPHILRYLTTAVITNKDVRKRRQVLKDLVKVIQQESYTYKDPITEFVECLYVNFDFDGAQKKLRECESVLVNDFFLVACLEDFIENARLFIFETFCRIHQCISI

SEQ ID NO: 36181 - protein, 344 aa, Artificial Sequence
  Synthetic polypeptide
RSPQLPGHGPVPEGHRADDQKFRQEYLDTLYRYAKFQYECGNYSGAAEYLYFFRVLVPATDRNALSSLWGKLASEILMQNWDAAMEDLTRLKETIDNNSVSSPLQSLQQRTWLIHWSLFVFFNHPKGRDNIIDLFLYQPQYLNAIQTMCPHILRYLTTAVITNKDVRKRRQVLKDLVKVIQQESYTYKDPITEFVECLYVNFDFDGAQKKLRECESVLVNDFFLVACLEDFIENARLFIFETFCRIHQCISINMLADKLNMTPEEAERWIVNLIRNARLDAKIDSKLGHVVMGNNAVSPYQQVIEKTKSLSFRSQMLAMNIEKKLNQNSRSEAPNWATQDSGFY

SEQ ID NO: 36182 - protein, 26 aa, Artificial Sequence
  Synthetic polypeptide
GVPNSQVMDQYRRATEQMIRSLGRNI

SEQ ID NO: 36183 - protein, 3 aa, Artificial Sequence
  Synthetic polypeptide
SEV

SEQ ID NO: 36184 - protein, 71 aa, Artificial Sequence
  Synthetic polypeptide
RSPQLPGHGPVPEGHRADDQKFRQEYLDTLYRYAKFQYECGNYSGAAEYLYFFRVLMESCYVAQADLKLLA

SEQ ID NO: 36185 - protein, 24 aa, Artificial Sequence
  Synthetic polypeptide
RSPQLPGHGPVPEGHRADDQKFRQ

SEQ ID NO: 36186 - protein, 23 aa, Artificial Sequence
  Synthetic polypeptide
GVPNSQVMDQYRRATEQMIRSLG

SEQ ID NO: 36187 - protein, 23 aa, Artificial Sequence
  Synthetic polypeptide
RSPQLPGHGPVPEGHRADDQKFR

SEQ ID NO: 36188 - protein, 22 aa, Artificial Sequence
  Synthetic polypeptide
GVPNSQVMDQYRRATEQMIRSL

SEQ ID NO: 36189 - protein, 454 aa, Artificial Sequence
  Synthetic polypeptide
GQALSTLDSITLMYPFFYRPMFEVIEDGWHSFLPEQEFELYSSATSEWRLSYVNKEFAVCPSYPPIVTVPKSIDDEALRKVATFRHGGRFPVLSYYHKKNGMVIMRSGQPLTGTNGRRCKEDEKLINATLRAGKRGYIIDTRSLNVAQQTRAKGGGFEQEAHYPQWRRIHKSIERYHILQESLIKLVEACNDQTHNMDRWLSKLEASNWLTHIKEILTTACLAAQCIDREGASILIHGTEGTDSTLQVTSLAQIILEPRSRTIRGFEALIEREWLQAGHPFQQRCAQSAYCNTKQKWEAPVFLLFLDCVWQILRQFPCSFEFNENFLIMLFEHAYASQFGTFLGNNESERCKLKLQQKTMSLWSWVNQPSELSKFTNPLFEANNLVIWPSVAPQSLPLWEGIFLRWNRSSKYLDEAYEEMVNIIEYNKELQAKVNILRRQLAELETEDGMQESP

SEQ ID NO: 36190 - protein, 11 aa, Artificial Sequence
  Synthetic polypeptide
ARHCLLWTPSL

SEQ ID NO: 36191 - protein, 21 aa, Artificial Sequence
  Synthetic polypeptide
PGIVYSGLHHSDVPFLLPSYV

SEQ ID NO: 36192 - protein, 69 aa, Artificial Sequence
  Synthetic polypeptide
SHWCVMLVRENHRHATLTCESCSMYYAQQTYRSKTITSSRSRMWDLPCSVSGWRPPTCESRSALWWNFN

SEQ ID NO: 36193 - protein, 1796 aa, Artificial Sequence
  Synthetic polypeptide
PPVGPECGTFPAACLGGDLQPVSLGVPCGGILTKRKGTILSPGYPEPYDNNLNCVWKITVPEGAGIQVQVVSFATEHNWDSLDFYDGGDNNAPRLGSYSGTTIPHLLNSTSNNLYLNFQSDISVSAAGFHLEYTAIGLDSCPEPQTPSSGIKIGDRYMVGDVVSFQCDQGYSLQGHSHITCMPGPVRRWNYPIPICLAQCGGAMSDFSGVILSPGFPGNYPSSLDCTWTINLPIGFGVHLQFVNFSTETIHDYLEVRSGSSETSTVIGRLSGPQIPSSLFSTTHETSLYFHSDYSQNKQGFHIVYQAYQLQSCPDPRPFRNGFVIGNDFTVGQTISFECFPGYTLIGNSALTCLHGVSRNWNHPLPRCEALCGGNITAMNGTIYSPGYPDEYPNFQDCFWLVRVPPGNGIYINFTVLQTEPIYDFITVWDGPDQNSPQIGQFSGNTALESVYSTSNQILIKFHSDFTTSGFFVLSYHAYQLRVCQPPPPVPNAEILTEDDEFEIGDIIRYQCLPGFTLVGNAILTCRLGERLQMDGAPPVCQVLCPANELRLDSTGVILSPGYPDSYPNLQMCAWSISVEKGYNITMFVEFFQTEKEFDVLQVYDGPNIQSPVLISLSGDYSSAFNITSNGHEVFLQWSADHGNNKKGFRIRYIAFYCSTPESPPHGYIISQTGGQLNSVVRWACDRGFRLVGKSSAVCRKSSYGYHAWDAPVPACQAISCGIPKAPTNGGILTTDYLVGTRVTYFCNDGYRLSSKELTTAVCQSDGTWSNHNKTPRCVVVTCPSINSFILEHGRWRIVNGSHYEYKTKVVFSCDPGYHGLGPASIECLPNGTWSWRNERPYCQIISCGELPTPPNGNKIGTQTSYGSTAIFTCDLGFMLVGSAVRECLSSGLWSESETRCLAGHCGIPELIVNGQVIGENYGYRDTVVYQCNPGFRLIGSSVRICQQDHNWSGQLPSCVPVSCGHPGSPIYGRTSGNGFNFNDVVTFSCNIGYLMQGPTKAQCQANRQWSHPPPMCKVVNCSDPGIPANSKRESKIEHGNFTYGTVVFYDCNPGYFLFGSSVLICQPNGQWDKPLPECIMIDCGHPGVPPNAVLSGEKYTFGSTVHYSCTGKRSLLGQSSRTCQLNGHWSGSQPHCSGDATGTCGDPGTPGHGSRQESNFRTKSTVRYACDTGYILHGSEERTCLANGSWTGRQPECKAVQCGNPGTTANGKVFRIDGTTFSSSVIYSCMEGYILSGPSVRQCTANGTWSGTLPNCTIISCGDPGIPANGLRYGDDYVVGQNVSYMCQPGYTMELNGSRIRTCTINGTWSGVMPTCRAVTCPTPPQISNGRLEGTNFDWGFSISYICSPGYELSFPAVLTCVGNGTWSGEVPQCLPKFCGDPGIPAQGKREGKSFIYQSEVSFSCNFPFILVGSSTRICQADGTWSGSSPHCIEPTQTSCENPGVPRHGSQNNTFGFQVGSVVQFHCKKGHLLQGSTTRTCLPDLTWSGIQPECIPHSCKQPETPAHANVVGMDLPSHGYTLIYTCQPGFFLAGGTEHRVCRSDNTWTGKVPICEAGSKILVKDPRPALGTPSPKLSVPDDVFAQNYIWKGSYNFKGRKQPMTLTVTSFNASTGRVNATLSNSNMELLLSGVYKSQEARLMLRIYLIKVPAHASVKKMKEENWAMDGFVSAEPDGATYVFQGFIQGKDYGQFGLQRLGLNMSEGSNSSNQPHGTNSSSVAIAILVPFFALIFAGFGFYLYKQRTAPKTQYTGCSVHENNNGQAAFENPMYDTNAKSVEGKAVRFDPNLNTVCTMV

SEQ ID NO: 36194 - protein, 7 aa, Artificial Sequence
  Synthetic polypeptide
ECPVVEF

SEQ ID NO: 36195 - protein, 1731 aa, Artificial Sequence
  Synthetic polypeptide
PPVGPECGTFPAACLGGDLQPVSLGVPCGGILTKRKGTILSPGYPEPYDNNLNCVWKITVPEGAGIQVQVVSFATEHNWDSLDFYDGGDNNAPRLGSYSGTTIPHLLNSTSNNLYLNFQSDISVSAAGFHLEYTAIGLDSCPEPQTPSSGIKIGDRYMVGDVVSFQCDQGYSLQGHSHITCMPGPVRRWNYPIPICLAQCGGAMSDFSGVILSPGFPGNYPSSLDCTWTINLPIGFGVHLQFVNFSTETIHDYLEVRSGSSETSTVIGRLSGPQIPSSLFSTTHETSLYFHSDYSQNKQGFHIVYQAYQLQSCPDPRPFRNGFVIGNDFTVGQTISFECFPGYTLIGNSALTCLHGVSRNWNHPLPRCEALCGGNITAMNGTIYSPGYPDEYPNFQDCFWLVRVPPGNGIYINFTVLQTEPIYDFITVWDGPDQNSPQIGQFSGNTALESVYSTSNQILIKFHSDFTTSGFFVLSYHAYQLRVCQPPPPVPNAEILTEDDEFEIGDIIRYQCLPGFTLVGNAILTCRLGERLQMDGAPPVCQVLCPANELRLDSTGVILSPGYPDSYPNLQMCAWSISVEKGYNITMFVEFFQTEKEFDVLQVYDGPNIQSPVLISLSGDYSSAFNITSNGHEVFLQWSADHGNNKKGFRIRYIAFYCSTPESPPHGYIISQTGGQLNSVVRWACDRGFRLVGKSSAVCRKSSYGYHAWDAPVPACQAISCGIPKAPTNGGILTTDYLVGTRVTYFCNDGYRLSSKELTTAVCQSDGTWSNHNKTPRCVVISCGELPTPPNGNKIGTQTSYGSTAIFTCDLGFMLVGSAVRECLSSGLWSESETRCLAGHCGIPELIVNGQVIGENYGYRDTVVYQCNPGFRLIGSSVRICQQDHNWSGQLPSCVPVSCGHPGSPIYGRTSGNGFNFNDVVTFSCNIGYLMQGPTKAQCQANRQWSHPPPMCKVVNCSDPGIPANSKRESKIEHGNFTYGTVVFYDCNPGYFLFGSSVLICQPNGQWDKPLPECIMIDCGHPGVPPNAVLSGEKYTFGSTVHYSCTGKRSLLGQSSRTCQLNGHWSGSQPHCSGDATGTCGDPGTPGHGSRQESNFRTKSTVRYACDTGYILHGSEERTCLANGSWTGRQPECKAVQCGNPGTTANGKVFRIDGTTFSSSVIYSCMEGYILSGPSVRQCTANGTWSGTLPNCTIISCGDPGIPANGLRYGDDYVVGQNVSYMCQPGYTMELNGSRIRTCTINGTWSGVMPTCRAVTCPTPPQISNGRLEGTNFDWGFSISYICSPGYELSFPAVLTCVGNGTWSGEVPQCLPKFCGDPGIPAQGKREGKSFIYQSEVSFSCNFPFILVGSSTRICQADGTWSGSSPHCIEPTQTSCENPGVPRHGSQNNTFGFQVGSVVQFHCKKGHLLQGSTTRTCLPDLTWSGIQPECIPHSCKQPETPAHANVVGMDLPSHGYTLIYTCQPGFFLAGGTEHRVCRSDNTWTGKVPICEAGSKILVKDPRPALGTPSPKLSVPDDVFAQNYIWKGSYNFKGRKQPMTLTVTSFNASTGRVNATLSNSNMELLLSGVYKSQEARLMLRIYLIKVPAHASVKKMKEENWAMDGFVSAEPDGATYVFQGFIQGKDYGQFGLQRLGLNMSEGSNSSNQPHGTNSSSVAIAILVPFFALIFAGFGFYLYKQRTAPKTQYTGCSVHENNNGQAAFENPMYDTNAKSVEGKAVRFDPNLNTVCTMV

SEQ ID NO: 36196 - protein, 41 aa, Artificial Sequence
  Synthetic polypeptide
RNESESAGIPLACSSLSSKSLWLLLKAPWPHVVAIFQLPVE

SEQ ID NO: 36197 - protein, 46 aa, Artificial Sequence
  Synthetic polypeptide
HALPYPPSLSGCYSRHLGPMWWPFFSSQWSDSLTRMARILQRLFEL

SEQ ID NO: 36198 - protein, 2839 aa, Artificial Sequence
  Synthetic polypeptide
KCWHSFSMLFPILQVSLAATQGTLAPCGGHFSAPSGVILSPGWPGYYKDSLNCEWVIEAEPGHSIKITFERFQTELNYDVLEVHDGPNLLSPLLGSYNGTQVPQFLFSSSNFIYLLFTTDNSRSNNGFKIHYESVTVNTYSCLDPGIPVHGRRYGHDFSIGSTVSFSCDSGYRLSHEEPLLCEKNHWWSHPLPTCDALCGGDVRGPSGTILSPGYPEFYPNSLNCTWTVDVTHGKGVQFNFHTFHLEDHHDYLLITENGSFTQPLARLTGSDLPPTINAGLYGNFRAQLRFISDFSISYEGFNITFSEYNLEPCEDPGIPQYGSRIGFNFGIGDTLTFSCSSGYRLEGTSEIICLGGGRRVWSAPLPRCVAECGASATNNEGILLSPNYPLNYENNHECIYSIQVQAGKGINISARTFHLAQGDVLKIYDGKDKTTHLLGAFTGASMRGLTLSSTSNQLWLEFNSDTEGTDEGFQLVYTSFELSHCEDPGIPQFGYKISDQGHFAGSTIIYGCNPGYTLHGSSLLKCMTGERRAWDYPLPSCIAECGGRFKGESSGRILSPGYPFPYDNNLRCMWMIEVDPGNIVSLQFLAFDTEASHDILRVWDGPPENDMLLKEISGSLIPEGIHSTLNIVTIQFDTDFYISKSGFAIQFSSSVATACRDPGVPMNGTRNGDGREPGDTVVFQCDPGYELQGEERITCIQVENRYFWQPSPPVCIAPCGGNLTGSSGFILSPNFPHPYPHSRDCDWTITVNADYVISLAFISFSIEPNYDFLYIYDGPDSNSPLIGSFQDSKLPERIESSSNTMHLAFRSDGSVSYTGFHLEYKAKLRESCFDPGNIMNGTRLGMDYKLGSTVTYYCDAGYVLQGYSTLTCIMGDDGRPGWNRALPSCHAPCGSRSTGSEGTVLSPNYPKNYSVGHNCVYSIAVPKEFVVFGQFVFFQTSLHDVVEVYDGPTQQSSLLSSLSGSHSGESLPLSSGNQITIRFTSVGPITAKGFHFVYQAVPRTSSTQCSSVPEPRFGRRIGNEFAVGSSVLFDCNPGYILHGSIAIRCETVPNSLAQWNDSLPTCIVPCGGILTKRKGTILSPGYPEPYDNNLNCVWKITVPEGAGIQVQVVSFATEHNWDSLDFYDGGDNNAPRLGSYSGTTIPHLLNSTSNNLYLNFQSDISVSAAGFHLEYTAIGLDSCPEPQTPSSGIKIGDRYMVGDVVSFQCDQGYSLQGHSHITCMPGPVRRWNYPIPICLAQCGGAMSDFSGVILSPGFPGNYPSSLDCTWTINLPIGFGVHLQFVNFSTETIHDYLEVRSGSSETSTVIGRLSGPQIPSSLFSTTHETSLYFHSDYSQNKQGFHIVYQAYQLQSCPDPRPFRNGFVIGNDFTVGQTISFECFPGYTLIGNSALTCLHGVSRNWNHPLPRCEALCGGNITAMNGTIYSPGYPDEYPNFQDCFWLVRVPPGNGIYINFTVLQTEPIYDFITVWDGPDQNSPQIGQFSGNTALESVYSTSNQILIKFHSDFTTSGFFVLSYHAYQLRVCQPPPPVPNAEILTEDDEFEIGDIIRYQCLPGFTLVGNAILTCRLGERLQMDGAPPVCQVLCPANELRLDSTGVILSPGYPDSYPNLQMCAWSISVEKGYNITMFVEFFQTEKEFDVLQVYDGPNIQSPVLISLSGDYSSAFNITSNGHEVFLQWSADHGNNKKGFRIRYIAFYCSTPESPPHGYIISQTGGQLNSVVRWACDRGFRLVGKSSAVCRKSSYGYHAWDAPVPACQAISCGIPKAPTNGGILTTDYLVGTRVTYFCNDGYRLSSKELTTAVCQSDGTWSNHNKTPRCVVVTCPSINSFILEHGRWRIVNGSHYEYKTKVVFSCDPGYHGLGPASIECLPNGTWSWRNERPYCQIISCGELPTPPNGNKIGTQTSYGSTAIFTCDLGFMLVGSAVRECLSSGLWSESETRCLAGHCGIPELIVNGQVIGENYGYRDTVVYQCNPGFRLIGSSVRICQQDHNWSGQLPSCVPVSCGHPGSPIYGRTSGNGFNFNDVVTFSCNIGYLMQGPTKAQCQANRQWSHPPPMCKVVNCSDPGIPANSKRESKIEHGNFTYGTVVFYDCNPGYFLFGSSVLICQPNGQWDKPLPECIMIDCGHPGVPPNAVLSGEKYTFGSTVHYSCTGKRSLLGQSSRTCQLNGHWSGSQPHCSGDATGTCGDPGTPGHGSRQESNFRTKSTVRYACDTGYILHGSEERTCLANGSWTGRQPECKAVQCGNPGTTANGKVFRIDGTTFSSSVIYSCMEGYILSGPSVRQCTANGTWSGTLPNCTIISCGDPGIPANGLRYGDDYVVGQNVSYMCQPGYTMELNGSRIRTCTINGTWSGVMPTCRAVTCPTPPQISNGRLEGTNFDWGFSISYICSPGYELSFPAVLTCVGNGTWSGEVPQCLPKFCGDPGIPAQGKREGKSFIYQSEVSFSCNFPFILVGSSTRICQADGTWSGSSPHCIEPTQTSCENPGVPRHGSQNNTFGFQVGSVVQFHCKKGHLLQGSTTRTCLPDLTWSGIQPECIPHSCKQPETPAHANVVGMDLPSHGYTLIYTCQPGFFLAGGTEHRVCRSDNTWTGKVPICEAGSKILVKDPRPALGTPSPKLSVPDDVFAQNYIWKGSYNFKGRKQPMTLTVTSFNASTGRVNATLSNSNMELLLSGVYKSQEARLMLRIYLIKVPAHASVKKMKEENWAMDGFVSAEPDGATYVFQGFIQGKDYGQFGLQRLGLNMSEGSNSSNQPHGTNSSSVAIAILVPFFALIFAGFGFYLYKQRTAPKTQYTGCSVHENNNGQAAFENPMYDTNAKSVEGKAVRFDPNLNTVCTMV

SEQ ID NO: 36199 - protein, 2769 aa, Artificial Sequence
  Synthetic polypeptide
KCWHSFSMLFPILQVSLAATQGTLAPCGGHFSAPSGVILSPGWPGYYKDSLNCEWVIEAEPGHSIKITFERFQTELNYDVLEVHDGPNLLSPLLGSYNGTQVPQFLFSSSNFIYLLFTTDNSRSNNGFKIHYESVTVNTYSCLDPGIPVHGRRYGHDFSIGSTVSFSCDSGYRLSHEEPLLCEKNHWWSHPLPTCDALCGGDVRGPSGTILSPGYPEFYPNSLNCTWTVDVTHGKGVQFNFHTFHLEDHHDYLLITENGSFTQPLARLTGSDLPPTINAGLYGNFRAQLRFISDFSISYEGFNITFSEYNLEPCEDPGIPQYGSRIGFNFGIGDTLTFSCSSGYRLEGTSEIICLGGGRRVWSAPLPRCVAECGASATNNEGILLSPNYPLNYENNHECIYSIQVQAGKGINISARTFHLAQGDVLKIYDGKDKTTHLLGAFTGASMRGLTLSSTSNQLWLEFNSDTEGTDEGFQLVYTSFELSHCEDPGIPQFGYKISDQGHFAGSTIIYGCNPGYTLHGSSLLKCMTGERRAWDYPLPSCIAECGGRFKGESSGRILSPGYPFPYDNNLRCMWMIEVDPGNIVSLQFLAFDTEASHDILRVWDGPPENDMLLKEISGSLIPEGIHSTLNIVTIQFDTDFYISKSGFAIQFSSSVATACRDPGVPMNGTRNGDGREPGDTVVFQCDPGYELQGEERITCIQVENRYFWQPSPPVCIAPCGGNLTGSSGFILSPNFPHPYPHSRDCDWTITVNADYVISLAFISFSIEPNYDFLYIYDGPDSNSPLIGSFQDSKLPERIESSSNTMHLAFRSDGSVSYTGFHLEYKAKLRESCFDPGNIMNGTRLGMDYKLGSTVTYYCDAGYVLQGYSTLTCIMGDDGRPGWNRALPSCHAPCGSRSTGSEGTVLSPNYPKNYSVGHNCVYSIAVPKEFAVPRTSSTQCSSVPEPRFGRRIGNEFAVGSSVLFDCNPGYILHGSIAIRCETVPNSLAQWNDSLPTCIVPCGGILTKRKGTILSPGYPEPYDNNLNCVWKITVPEGAGIQVQVVSFATEHNWDSLDFYDGGDNNAPRLGSYSGTTIPHLLNSTSNNLYLNFQSDISVSAAGFHLEYTAIGLDSCPEPQTPSSGIKIGDRYMVGDVVSFQCDQGYSLQGHSHITCMPGPVRRWNYPIPICLAQCGGAMSDFSGVILSPGFPGNYPSSLDCTWTINLPIGFGVHLQFVNFSTETIHDYLEVRSGSSETSTVIGRLSGPQIPSSLFSTTHETSLYFHSDYSQNKQGFHIVYQAYQLQSCPDPRPFRNGFVIGNDFTVGQTISFECFPGYTLIGNSALTCLHGVSRNWNHPLPRCEALCGGNITAMNGTIYSPGYPDEYPNFQDCFWLVRVPPGNGIYINFTVLQTEPIYDFITVWDGPDQNSPQIGQFSGNTALESVYSTSNQILIKFHSDFTTSGFFVLSYHAYQLRVCQPPPPVPNAEILTEDDEFEIGDIIRYQCLPGFTLVGNAILTCRLGERLQMDGAPPVCQVLCPANELRLDSTGVILSPGYPDSYPNLQMCAWSISVEKGYNITMFVEFFQTEKEFDVLQVYDGPNIQSPVLISLSGDYSSAFNITSNGHEVFLQWSADHGNNKKGFRIRYIAFYCSTPESPPHGYIISQTGGQLNSVVRWACDRGFRLVGKSSAVCRKSSYGYHAWDAPVPACQAISCGIPKAPTNGGILTTDYLVGTRVTYFCNDGYRLSSKELTTAVCQSDGTWSNHNKTPRCVVVTCPSINSFILEHGRWRIVNGSHYEYKTKVVFSCDPGYHGLGPASIECLPNGTWSWRNERPYCQIISCGELPTPPNGNKIGTQTSYGSTAIFTCDLGFMLVGSAVRECLSSGLWSESETRCLAGHCGIPELIVNGQVIGENYGYRDTVVYQCNPGFRLIGSSVRICQQDHNWSGQLPSCVPVSCGHPGSPIYGRTSGNGFNFNDVVTFSCNIGYLMQGPTKAQCQANRQWSHPPPMCKVVNCSDPGIPANSKRESKIEHGNFTYGTVVFYDCNPGYFLFGSSVLICQPNGQWDKPLPECIMIDCGHPGVPPNAVLSGEKYTFGSTVHYSCTGKRSLLGQSSRTCQLNGHWSGSQPHCSGDATGTCGDPGTPGHGSRQESNFRTKSTVRYACDTGYILHGSEERTCLANGSWTGRQPECKAVQCGNPGTTANGKVFRIDGTTFSSSVIYSCMEGYILSGPSVRQCTANGTWSGTLPNCTIISCGDPGIPANGLRYGDDYVVGQNVSYMCQPGYTMELNGSRIRTCTINGTWSGVMPTCRAVTCPTPPQISNGRLEGTNFDWGFSISYICSPGYELSFPAVLTCVGNGTWSGEVPQCLPKFCGDPGIPAQGKREGKSFIYQSEVSFSCNFPFILVGSSTRICQADGTWSGSSPHCIEPTQTSCENPGVPRHGSQNNTFGFQVGSVVQFHCKKGHLLQGSTTRTCLPDLTWSGIQPECIPHSCKQPETPAHANVVGMDLPSHGYTLIYTCQPGFFLAGGTEHRVCRSDNTWTGKVPICEAGSKILVKDPRPALGTPSPKLSVPDDVFAQNYIWKGSYNFKGRKQPMTLTVTSFNASTGRVNATLSNSNMELLLSGVYKSQEARLMLRIYLIKVPAHASVKKMKEENWAMDGFVSAEPDGATYVFQGFIQGKDYGQFGLQRLGLNMSEGSNSSNQPHGTNSSSVAIAILVPFFALIFAGFGFYLYKQRTAPKTQYTGCSVHENNNGQAAFENPMYDTNAKSVEGKAVRFDPNLNTVCTMV

SEQ ID NO: 36200 - protein, 2774 aa, Artificial Sequence
  Synthetic polypeptide
KCWHSFSMLFPILQVSLAATQGTLAPCGGHFSAPSGVILSPGWPGYYKDSLNCEWVIEAEPGHSIKITFERFQTELNYDVLEVHDGPNLLSPLLGSYNGTQVPQFLFSSSNFIYLLFTTDNSRSNNGFKIHYESVTVNTYSCLDPGIPVHGRRYGHDFSIGSTVSFSCDSGYRLSHEEPLLCEKNHWWSHPLPTCDALCGGDVRGPSGTILSPGYPEFYPNSLNCTWTVDVTHGKGVQFNFHTFHLEDHHDYLLITENGSFTQPLARLTGSDLPPTINAGLYGNFRAQLRFISDFSISYEGFNITFSEYNLEPCEDPGIPQYGSRIGFNFGIGDTLTFSCSSGYRLEGTSEIICLGGGRRVWSAPLPRCVAECGASATNNEGILLSPNYPLNYENNHECIYSIQVQAGKGINISARTFHLAQGDVLKIYDGKDKTTHLLGAFTGASMRGLTLSSTSNQLWLEFNSDTEGTDEGFQLVYTSFELSHCEDPGIPQFGYKISDQGHFAGSTIIYGCNPGYTLHGSSLLKCMTGERRAWDYPLPSCIAECGGRFKGESSGRILSPGYPFPYDNNLRCMWMIEVDPGNIVSLQFLAFDTEASHDILRVWDGPPENDMLLKEISGSLIPEGIHSTLNIVTIQFDTDFYISKSGFAIQFSSSVATACRDPGVPMNGTRNGDGREPGDTVVFQCDPGYELQGEERITCIQVENRYFWQPSPPVCIAPCGGNLTGSSGFILSPNFPHPYPHSRDCDWTITVNADYVISLAFISFSIEPNYDFLYIYDGPDSNSPLIGSFQDSKLPERIESSSNTMHLAFRSDGSVSYTGFHLEYKAKLRESCFDPGNIMNGTRLGMDYKLGSTVTYYCDAGYVLQGYSTLTCIMGDDGRPGWNRALPSCHAPCGSRSTGSEGTVLSPNYPKNYSVGHNCVYSIAVPKEFVVFGQFVFFQTSLHDVVEVYDGPTQQSSLLSSLSGSHSGESLPLSSGNQITIRFTSVGPITAKGFHFVYQAVPRTSSTQCSSVPEPRFGRRIGNEFAVGSSVLFDCNPGYILHGSIAIRCETVPNSLAQWNDSLPTCIVPCGGILTKRKGTILSPGYPEPYDNNLNCVWKITVPEGAGIQVQVVSFATEHNWDSLDFYDGGDNNAPRLGSYSGTTIPHLLNSTSNNLYLNFQSDISVSAAGFHLEYTAIGLDSCPEPQTPSSGIKIGDRYMVGDVVSFQCDQGYSLQGHSHITCMPGPVRRWNYPIPICLAQCGGAMSDFSGVILSPGFPGNYPSSLDCTWTINLPIGFGVHLQFVNFSTETIHDYLEVRSGSSETSTVIGRLSGPQIPSSLFSTTHETSLYFHSDYSQNKQGFHIVYQAYQLQSCPDPRPFRNGFVIGNDFTVGQTISFECFPGYTLIGNSALTCLHGVSRNWNHPLPRCEALCGGNITAMNGTIYSPGYPDEYPNFQDCFWLVRVPPGNGIYINFTVLQTEPIYDFITVWDGPDQNSPQIGQFSGNTALESVYSTSNQILIKFHSDFTTSGFFVLSYHAYQLRVCQPPPPVPNAEILTEDDEFEIGDIIRYQCLPGFTLVGNAILTCRLGERLQMDGAPPVCQVLCPANELRLDSTGVILSPGYPDSYPNLQMCAWSISVEKGYNITMFVEFFQTEKEFDVLQVYDGPNIQSPVLISLSGDYSSAFNITSNGHEVFLQWSADHGNNKKGFRIRYIAFYCSTPESPPHGYIISQTGGQLNSVVRWACDRGFRLVGKSSAVCRKSSYGYHAWDAPVPACQAISCGIPKAPTNGGILTTDYLVGTRVTYFCNDGYRLSSKELTTAVCQSDGTWSNHNKTPRCVVISCGELPTPPNGNKIGTQTSYGSTAIFTCDLGFMLVGSAVRECLSSGLWSESETRCLAGHCGIPELIVNGQVIGENYGYRDTVVYQCNPGFRLIGSSVRICQQDHNWSGQLPSCVPVSCGHPGSPIYGRTSGNGFNFNDVVTFSCNIGYLMQGPTKAQCQANRQWSHPPPMCKVVNCSDPGIPANSKRESKIEHGNFTYGTVVFYDCNPGYFLFGSSVLICQPNGQWDKPLPECIMIDCGHPGVPPNAVLSGEKYTFGSTVHYSCTGKRSLLGQSSRTCQLNGHWSGSQPHCSGDATGTCGDPGTPGHGSRQESNFRTKSTVRYACDTGYILHGSEERTCLANGSWTGRQPECKAVQCGNPGTTANGKVFRIDGTTFSSSVIYSCMEGYILSGPSVRQCTANGTWSGTLPNCTIISCGDPGIPANGLRYGDDYVVGQNVSYMCQPGYTMELNGSRIRTCTINGTWSGVMPTCRAVTCPTPPQISNGRLEGTNFDWGFSISYICSPGYELSFPAVLTCVGNGTWSGEVPQCLPKFCGDPGIPAQGKREGKSFIYQSEVSFSCNFPFILVGSSTRICQADGTWSGSSPHCIEPTQTSCENPGVPRHGSQNNTFGFQVGSVVQFHCKKGHLLQGSTTRTCLPDLTWSGIQPECIPHSCKQPETPAHANVVGMDLPSHGYTLIYTCQPGFFLAGGTEHRVCRSDNTWTGKVPICEAGSKILVKDPRPALGTPSPKLSVPDDVFAQNYIWKGSYNFKGRKQPMTLTVTSFNASTGRVNATLSNSNMELLLSGVYKSQEARLMLRIYLIKVPAHASVKKMKEENWAMDGFVSAEPDGATYVFQGFIQGKDYGQFGLQRLGLNMSEGSNSSNQPHGTNSSSVAIAILVPFFALIFAGFGFYLYKQRTAPKTQYTGCSVHENNNGQAAFENPMYDTNAKSVEGKAVRFDPNLNTVCTMV

SEQ ID NO: 36201 - protein, 56 aa, Artificial Sequence
  Synthetic polypeptide
LPGKDYDLSPHPSPNSPQETGSKGKRKRTRYKISDNTFSTPSAEPHVVAIFQLPVE

SEQ ID NO: 36202 - protein, 39 aa, Artificial Sequence
  Synthetic polypeptide
VIIPSLLQVLNPMWWPFFSSQWSDSLTRMARILQRLFEL

SEQ ID NO: 36203 - protein, 2838 aa, Artificial Sequence
  Synthetic polypeptide
LPGKDYDLSPHPSPNSPQETGSKAPCGGHFSAPSGVILSPGWPGYYKDSLNCEWVIEAEPGHSIKITFERFQTELNYDVLEVHDGPNLLSPLLGSYNGTQVPQFLFSSSNFIYLLFTTDNSRSNNGFKIHYESVTVNTYSCLDPGIPVHGRRYGHDFSIGSTVSFSCDSGYRLSHEEPLLCEKNHWWSHPLPTCDALCGGDVRGPSGTILSPGYPEFYPNSLNCTWTVDVTHGKGVQFNFHTFHLEDHHDYLLITENGSFTQPLARLTGSDLPPTINAGLYGNFRAQLRFISDFSISYEGFNITFSEYNLEPCEDPGIPQYGSRIGFNFGIGDTLTFSCSSGYRLEGTSEIICLGGGRRVWSAPLPRCVAECGASATNNEGILLSPNYPLNYENNHECIYSIQVQAGKGINISARTFHLAQGDVLKIYDGKDKTTHLLGAFTGASMRGLTLSSTSNQLWLEFNSDTEGTDEGFQLVYTSFELSHCEDPGIPQFGYKISDQGHFAGSTIIYGCNPGYTLHGSSLLKCMTGERRAWDYPLPSCIAECGGRFKGESSGRILSPGYPFPYDNNLRCMWMIEVDPGNIVSLQFLAFDTEASHDILRVWDGPPENDMLLKEISGSLIPEGIHSTLNIVTIQFDTDFYISKSGFAIQFSSSVATACRDPGVPMNGTRNGDGREPGDTVVFQCDPGYELQGEERITCIQVENRYFWQPSPPVCIAPCGGNLTGSSGFILSPNFPHPYPHSRDCDWTITVNADYVISLAFISFSIEPNYDFLYIYDGPDSNSPLIGSFQDSKLPERIESSSNTMHLAFRSDGSVSYTGFHLEYKAKLRESCFDPGNIMNGTRLGMDYKLGSTVTYYCDAGYVLQGYSTLTCIMGDDGRPGWNRALPSCHAPCGSRSTGSEGTVLSPNYPKNYSVGHNCVYSIAVPKEFVVFGQFVFFQTSLHDVVEVYDGPTQQSSLLSSLSGSHSGESLPLSSGNQITIRFTSVGPITAKGFHFVYQAVPRTSSTQCSSVPEPRFGRRIGNEFAVGSSVLFDCNPGYILHGSIAIRCETVPNSLAQWNDSLPTCIVPCGGILTKRKGTILSPGYPEPYDNNLNCVWKITVPEGAGIQVQVVSFATEHNWDSLDFYDGGDNNAPRLGSYSGTTIPHLLNSTSNNLYLNFQSDISVSAAGFHLEYTAIGLDSCPEPQTPSSGIKIGDRYMVGDVVSFQCDQGYSLQGHSHITCMPGPVRRWNYPIPICLAQCGGAMSDFSGVILSPGFPGNYPSSLDCTWTINLPIGFGVHLQFVNFSTETIHDYLEVRSGSSETSTVIGRLSGPQIPSSLFSTTHETSLYFHSDYSQNKQGFHIVYQAYQLQSCPDPRPFRNGFVIGNDFTVGQTISFECFPGYTLIGNSALTCLHGVSRNWNHPLPRCEALCGGNITAMNGTIYSPGYPDEYPNFQDCFWLVRVPPGNGIYINFTVLQTEPIYDFITVWDGPDQNSPQIGQFSGNTALESVYSTSNQILIKFHSDFTTSGFFVLSYHAYQLRVCQPPPPVPNAEILTEDDEFEIGDIIRYQCLPGFTLVGNAILTCRLGERLQMDGAPPVCQVLCPANELRLDSTGVILSPGYPDSYPNLQMCAWSISVEKGYNITMFVEFFQTEKEFDVLQVYDGPNIQSPVLISLSGDYSSAFNITSNGHEVFLQWSADHGNNKKGFRIRYIAFYCSTPESPPHGYIISQTGGQLNSVVRWACDRGFRLVGKSSAVCRKSSYGYHAWDAPVPACQAISCGIPKAPTNGGILTTDYLVGTRVTYFCNDGYRLSSKELTTAVCQSDGTWSNHNKTPRCVVVTCPSINSFILEHGRWRIVNGSHYEYKTKVVFSCDPGYHGLGPASIECLPNGTWSWRNERPYCQIISCGELPTPPNGNKIGTQTSYGSTAIFTCDLGFMLVGSAVRECLSSGLWSESETRCLAGHCGIPELIVNGQVIGENYGYRDTVVYQCNPGFRLIGSSVRICQQDHNWSGQLPSCVPVSCGHPGSPIYGRTSGNGFNFNDVVTFSCNIGYLMQGPTKAQCQANRQWSHPPPMCKVVNCSDPGIPANSKRESKIEHGNFTYGTVVFYDCNPGYFLFGSSVLICQPNGQWDKPLPECIMIDCGHPGVPPNAVLSGEKYTFGSTVHYSCTGKRSLLGQSSRTCQLNGHWSGSQPHCSGDATGTCGDPGTPGHGSRQESNFRTKSTVRYACDTGYILHGSEERTCLANGSWTGRQPECKAVQCGNPGTTANGKVFRIDGTTFSSSVIYSCMEGYILSGPSVRQCTANGTWSGTLPNCTIISCGDPGIPANGLRYGDDYVVGQNVSYMCQPGYTMELNGSRIRTCTINGTWSGVMPTCRAVTCPTPPQISNGRLEGTNFDWGFSISYICSPGYELSFPAVLTCVGNGTWSGEVPQCLPKFCGDPGIPAQGKREGKSFIYQSEVSFSCNFPFILVGSSTRICQADGTWSGSSPHCIEPTQTSCENPGVPRHGSQNNTFGFQVGSVVQFHCKKGHLLQGSTTRTCLPDLTWSGIQPECIPHSCKQPETPAHANVVGMDLPSHGYTLIYTCQPGFFLAGGTEHRVCRSDNTWTGKVPICEAGSKILVKDPRPALGTPSPKLSVPDDVFAQNYIWKGSYNFKGRKQPMTLTVTSFNASTGRVNATLSNSNMELLLSGVYKSQEARLMLRIYLIKVPAHASVKKMKEENWAMDGFVSAEPDGATYVFQGFIQGKDYGQFGLQRLGLNMSEGSNSSNQPHGTNSSSVAIAILVPFFALIFAGFGFYLYKQRTAPKTQYTGCSVHENNNGQAAFENPMYDTNAKSVEGKAVRFDPNLNTVCTMV

SEQ ID NO: 36204 - protein, 52 aa, Artificial Sequence
  Synthetic polypeptide
QKRGTSDQTKVCKESNNFQERTMTFHLIPALTHHRKQDLKPHVVAIFQLPVE

SEQ ID NO: 36205 - protein, 2768 aa, Artificial Sequence
  Synthetic polypeptide
LPGKDYDLSPHPSPNSPQETGSKAPCGGHFSAPSGVILSPGWPGYYKDSLNCEWVIEAEPGHSIKITFERFQTELNYDVLEVHDGPNLLSPLLGSYNGTQVPQFLFSSSNFIYLLFTTDNSRSNNGFKIHYESVTVNTYSCLDPGIPVHGRRYGHDFSIGSTVSFSCDSGYRLSHEEPLLCEKNHWWSHPLPTCDALCGGDVRGPSGTILSPGYPEFYPNSLNCTWTVDVTHGKGVQFNFHTFHLEDHHDYLLITENGSFTQPLARLTGSDLPPTINAGLYGNFRAQLRFISDFSISYEGFNITFSEYNLEPCEDPGIPQYGSRIGFNFGIGDTLTFSCSSGYRLEGTSEIICLGGGRRVWSAPLPRCVAECGASATNNEGILLSPNYPLNYENNHECIYSIQVQAGKGINISARTFHLAQGDVLKIYDGKDKTTHLLGAFTGASMRGLTLSSTSNQLWLEFNSDTEGTDEGFQLVYTSFELSHCEDPGIPQFGYKISDQGHFAGSTIIYGCNPGYTLHGSSLLKCMTGERRAWDYPLPSCIAECGGRFKGESSGRILSPGYPFPYDNNLRCMWMIEVDPGNIVSLQFLAFDTEASHDILRVWDGPPENDMLLKEISGSLIPEGIHSTLNIVTIQFDTDFYISKSGFAIQFSSSVATACRDPGVPMNGTRNGDGREPGDTVVFQCDPGYELQGEERITCIQVENRYFWQPSPPVCIAPCGGNLTGSSGFILSPNFPHPYPHSRDCDWTITVNADYVISLAFISFSIEPNYDFLYIYDGPDSNSPLIGSFQDSKLPERIESSSNTMHLAFRSDGSVSYTGFHLEYKAKLRESCFDPGNIMNGTRLGMDYKLGSTVTYYCDAGYVLQGYSTLTCIMGDDGRPGWNRALPSCHAPCGSRSTGSEGTVLSPNYPKNYSVGHNCVYSIAVPKEFAVPRTSSTQCSSVPEPRFGRRIGNEFAVGSSVLFDCNPGYILHGSIAIRCETVPNSLAQWNDSLPTCIVPCGGILTKRKGTILSPGYPEPYDNNLNCVWKITVPEGAGIQVQVVSFATEHNWDSLDFYDGGDNNAPRLGSYSGTTIPHLLNSTSNNLYLNFQSDISVSAAGFHLEYTAIGLDSCPEPQTPSSGIKIGDRYMVGDVVSFQCDQGYSLQGHSHITCMPGPVRRWNYPIPICLAQCGGAMSDFSGVILSPGFPGNYPSSLDCTWTINLPIGFGVHLQFVNFSTETIHDYLEVRSGSSETSTVIGRLSGPQIPSSLFSTTHETSLYFHSDYSQNKQGFHIVYQAYQLQSCPDPRPFRNGFVIGNDFTVGQTISFECFPGYTLIGNSALTCLHGVSRNWNHPLPRCEALCGGNITAMNGTIYSPGYPDEYPNFQDCFWLVRVPPGNGIYINFTVLQTEPIYDFITVWDGPDQNSPQIGQFSGNTALESVYSTSNQILIKFHSDFTTSGFFVLSYHAYQLRVCQPPPPVPNAEILTEDDEFEIGDIIRYQCLPGFTLVGNAILTCRLGERLQMDGAPPVCQVLCPANELRLDSTGVILSPGYPDSYPNLQMCAWSISVEKGYNITMFVEFFQTEKEFDVLQVYDGPNIQSPVLISLSGDYSSAFNITSNGHEVFLQWSADHGNNKKGFRIRYIAFYCSTPESPPHGYIISQTGGQLNSVVRWACDRGFRLVGKSSAVCRKSSYGYHAWDAPVPACQAISCGIPKAPTNGGILTTDYLVGTRVTYFCNDGYRLSSKELTTAVCQSDGTWSNHNKTPRCVVVTCPSINSFILEHGRWRIVNGSHYEYKTKVVFSCDPGYHGLGPASIECLPNGTWSWRNERPYCQIISCGELPTPPNGNKIGTQTSYGSTAIFTCDLGFMLVGSAVRECLSSGLWSESETRCLAGHCGIPELIVNGQVIGENYGYRDTVVYQCNPGFRLIGSSVRICQQDHNWSGQLPSCVPVSCGHPGSPIYGRTSGNGFNFNDVVTFSCNIGYLMQGPTKAQCQANRQWSHPPPMCKVVNCSDPGIPANSKRESKIEHGNFTYGTVVFYDCNPGYFLFGSSVLICQPNGQWDKPLPECIMIDCGHPGVPPNAVLSGEKYTFGSTVHYSCTGKRSLLGQSSRTCQLNGHWSGSQPHCSGDATGTCGDPGTPGHGSRQESNFRTKSTVRYACDTGYILHGSEERTCLANGSWTGRQPECKAVQCGNPGTTANGKVFRIDGTTFSSSVIYSCMEGYILSGPSVRQCTANGTWSGTLPNCTIISCGDPGIPANGLRYGDDYVVGQNVSYMCQPGYTMELNGSRIRTCTINGTWSGVMPTCRAVTCPTPPQISNGRLEGTNFDWGFSISYICSPGYELSFPAVLTCVGNGTWSGEVPQCLPKFCGDPGIPAQGKREGKSFIYQSEVSFSCNFPFILVGSSTRICQADGTWSGSSPHCIEPTQTSCENPGVPRHGSQNNTFGFQVGSVVQFHCKKGHLLQGSTTRTCLPDLTWSGIQPECIPHSCKQPETPAHANVVGMDLPSHGYTLIYTCQPGFFLAGGTEHRVCRSDNTWTGKVPICEAGSKILVKDPRPALGTPSPKLSVPDDVFAQNYIWKGSYNFKGRKQPMTLTVTSFNASTGRVNATLSNSNMELLLSGVYKSQEARLMLRIYLIKVPAHASVKKMKEENWAMDGFVSAEPDGATYVFQGFIQGKDYGQFGLQRLGLNMSEGSNSSNQPHGTNSSSVAIAILVPFFALIFAGFGFYLYKQRTAPKTQYTGCSVHENNNGQAAFENPMYDTNAKSVEGKAVRFDPNLNTVCTMV

SEQ ID NO: 36206 - protein, 2773 aa, Artificial Sequence
  Synthetic polypeptide
LPGKDYDLSPHPSPNSPQETGSKAPCGGHFSAPSGVILSPGWPGYYKDSLNCEWVIEAEPGHSIKITFERFQTELNYDVLEVHDGPNLLSPLLGSYNGTQVPQFLFSSSNFIYLLFTTDNSRSNNGFKIHYESVTVNTYSCLDPGIPVHGRRYGHDFSIGSTVSFSCDSGYRLSHEEPLLCEKNHWWSHPLPTCDALCGGDVRGPSGTILSPGYPEFYPNSLNCTWTVDVTHGKGVQFNFHTFHLEDHHDYLLITENGSFTQPLARLTGSDLPPTINAGLYGNFRAQLRFISDFSISYEGFNITFSEYNLEPCEDPGIPQYGSRIGFNFGIGDTLTFSCSSGYRLEGTSEIICLGGGRRVWSAPLPRCVAECGASATNNEGILLSPNYPLNYENNHECIYSIQVQAGKGINISARTFHLAQGDVLKIYDGKDKTTHLLGAFTGASMRGLTLSSTSNQLWLEFNSDTEGTDEGFQLVYTSFELSHCEDPGIPQFGYKISDQGHFAGSTIIYGCNPGYTLHGSSLLKCMTGERRAWDYPLPSCIAECGGRFKGESSGRILSPGYPFPYDNNLRCMWMIEVDPGNIVSLQFLAFDTEASHDILRVWDGPPENDMLLKEISGSLIPEGIHSTLNIVTIQFDTDFYISKSGFAIQFSSSVATACRDPGVPMNGTRNGDGREPGDTVVFQCDPGYELQGEERITCIQVENRYFWQPSPPVCIAPCGGNLTGSSGFILSPNFPHPYPHSRDCDWTITVNADYVISLAFISFSIEPNYDFLYIYDGPDSNSPLIGSFQDSKLPERIESSSNTMHLAFRSDGSVSYTGFHLEYKAKLRESCFDPGNIMNGTRLGMDYKLGSTVTYYCDAGYVLQGYSTLTCIMGDDGRPGWNRALPSCHAPCGSRSTGSEGTVLSPNYPKNYSVGHNCVYSIAVPKEFVVFGQFVFFQTSLHDVVEVYDGPTQQSSLLSSLSGSHSGESLPLSSGNQITIRFTSVGPITAKGFHFVYQAVPRTSSTQCSSVPEPRFGRRIGNEFAVGSSVLFDCNPGYILHGSIAIRCETVPNSLAQWNDSLPTCIVPCGGILTKRKGTILSPGYPEPYDNNLNCVWKITVPEGAGIQVQVVSFATEHNWDSLDFYDGGDNNAPRLGSYSGTTIPHLLNSTSNNLYLNFQSDISVSAAGFHLEYTAIGLDSCPEPQTPSSGIKIGDRYMVGDVVSFQCDQGYSLQGHSHITCMPGPVRRWNYPIPICLAQCGGAMSDFSGVILSPGFPGNYPSSLDCTWTINLPIGFGVHLQFVNFSTETIHDYLEVRSGSSETSTVIGRLSGPQIPSSLFSTTHETSLYFHSDYSQNKQGFHIVYQAYQLQSCPDPRPFRNGFVIGNDFTVGQTISFECFPGYTLIGNSALTCLHGVSRNWNHPLPRCEALCGGNITAMNGTIYSPGYPDEYPNFQDCFWLVRVPPGNGIYINFTVLQTEPIYDFITVWDGPDQNSPQIGQFSGNTALESVYSTSNQILIKFHSDFTTSGFFVLSYHAYQLRVCQPPPPVPNAEILTEDDEFEIGDIIRYQCLPGFTLVGNAILTCRLGERLQMDGAPPVCQVLCPANELRLDSTGVILSPGYPDSYPNLQMCAWSISVEKGYNITMFVEFFQTEKEFDVLQVYDGPNIQSPVLISLSGDYSSAFNITSNGHEVFLQWSADHGNNKKGFRIRYIAFYCSTPESPPHGYIISQTGGQLNSVVRWACDRGFRLVGKSSAVCRKSSYGYHAWDAPVPACQAISCGIPKAPTNGGILTTDYLVGTRVTYFCNDGYRLSSKELTTAVCQSDGTWSNHNKTPRCVVISCGELPTPPNGNKIGTQTSYGSTAIFTCDLGFMLVGSAVRECLSSGLWSESETRCLAGHCGIPELIVNGQVIGENYGYRDTVVYQCNPGFRLIGSSVRICQQDHNWSGQLPSCVPVSCGHPGSPIYGRTSGNGFNFNDVVTFSCNIGYLMQGPTKAQCQANRQWSHPPPMCKVVNCSDPGIPANSKRESKIEHGNFTYGTVVFYDCNPGYFLFGSSVLICQPNGQWDKPLPECIMIDCGHPGVPPNAVLSGEKYTFGSTVHYSCTGKRSLLGQSSRTCQLNGHWSGSQPHCSGDATGTCGDPGTPGHGSRQESNFRTKSTVRYACDTGYILHGSEERTCLANGSWTGRQPECKAVQCGNPGTTANGKVFRIDGTTFSSSVIYSCMEGYILSGPSVRQCTANGTWSGTLPNCTIISCGDPGIPANGLRYGDDYVVGQNVSYMCQPGYTMELNGSRIRTCTINGTWSGVMPTCRAVTCPTPPQISNGRLEGTNFDWGFSISYICSPGYELSFPAVLTCVGNGTWSGEVPQCLPKFCGDPGIPAQGKREGKSFIYQSEVSFSCNFPFILVGSSTRICQADGTWSGSSPHCIEPTQTSCENPGVPRHGSQNNTFGFQVGSVVQFHCKKGHLLQGSTTRTCLPDLTWSGIQPECIPHSCKQPETPAHANVVGMDLPSHGYTLIYTCQPGFFLAGGTEHRVCRSDNTWTGKVPICEAGSKILVKDPRPALGTPSPKLSVPDDVFAQNYIWKGSYNFKGRKQPMTLTVTSFNASTGRVNATLSNSNMELLLSGVYKSQEARLMLRIYLIKVPAHASVKKMKEENWAMDGFVSAEPDGATYVFQGFIQGKDYGQFGLQRLGLNMSEGSNSSNQPHGTNSSSVAIAILVPFFALIFAGFGFYLYKQRTAPKTQYTGCSVHENNNGQAAFENPMYDTNAKSVEGKAVRFDPNLNTVCTMV

SEQ ID NO: 36207 - protein, 7 aa, Artificial Sequence
  Synthetic polypeptide
CLVQDLP

SEQ ID NO: 36208 - protein, 302 aa, Artificial Sequence
  Synthetic polypeptide
FRTYKVLSAWYRISLEFRNLAEKYQTVIADICRRMGIGMAEFLDKHVTSEQEWDKYCHYVAGLVGIGLSRLFSASEFEDPLVGEDTERANSMGLFLQKTNIIRDYLEDQQGGREFWPQEVWSRYVKKLGDFAKPENIDLAVQCLNELITNALHHIPDVITYLSRLRNQSVFNFCAIPQVMAIATLAACYNNQQVFKGAVKIRKGQAVTLMMDATNMPAVKAIIYQYMEEIYHRIPDSDPSSSKTRQIISTIRTQNLPNCQLISRSHYSPIYLSFVMLLAALSWQYLTTLSQVTEDYVQTGEH

SEQ ID NO: 36209 - protein, 50 aa, Artificial Sequence
  Synthetic polypeptide
SWASSLSALCLRLLVCKVRAERINFAHIKYLVPGTGSPLSLEIWLRNTKQ

SEQ ID NO: 36210 - protein, 35 aa, Artificial Sequence
  Synthetic polypeptide
FRTYKVLSAWYRISLEFRNLAEKYQTVIADICRRM

SEQ ID NO: 36211 - protein, 27 aa, Artificial Sequence
  Synthetic polypeptide
FRTYKVLSAWYRISLEFRNLAEKYQTV

SEQ ID NO: 36212 - protein, 62 aa, Artificial Sequence
  Synthetic polypeptide
FRTYKVLSAWYRISLEFRNLAEKYQTVIADICRRMGIGMAEFLDKHVTSEQEWDKPQSLKTP

SEQ ID NO: 36213 - protein, 61 aa, Artificial Sequence
  Synthetic polypeptide
PSRCCHASCTACRTVEMHFQNHQLARTLLDLNMKVQQLKKEYELEITSDSQSPKDDAANPE

SEQ ID NO: 36214 - protein, 54 aa, Artificial Sequence
  Synthetic polypeptide
DVPASPSPSAMTESFPRPPQKPSSQVDAAMLPVQPAEPWKCISKTTSWLELYWT

SEQ ID NO: 36215 - protein, 22 aa, Artificial Sequence
  Synthetic polypeptide
MLPCFLYSLQNRGNAFPKPPAG

SEQ ID NO: 36216 - protein, 14 aa, Artificial Sequence
  Synthetic polypeptide
ICFVIPVWNSNRNR

SEQ ID NO: 36217 - protein, 11 aa, Artificial Sequence
  Synthetic polypeptide
YLCGTPTETGE

SEQ ID NO: 36218 - protein, 358 aa, Artificial Sequence
  Synthetic polypeptide
RPSFELNLLCDTCVELQQKPVNKDQCPRERPEELESGGMYHCHSGSKPTEKGANEYAYAKWKLCSASAICFIFMIAEVVGGHIAGSLAVVTDAAHLLIDLTSFLLSLFSLWLSSKPPSKRLTFGWHRAEILGALLSILCIWVVTGVLVYLACERLLYPDYQIQATVMIIVSSCAVAANIVLTVVLHQRCLGHNHKEVQANASVRAAFVHALGDLFQSISVLISALIIYFKPEYKIADPICTFIFSILVLASTITILKDFSILLMEGVPKSLNYSGVKELILAVDGVLSVHSLHIWSLTMNQVILSAHVATAASRDSQVVRREIAKALSKSFTMHSLTIQMESPVDQDPDCLFCEDPCD

SEQ ID NO: 36219 - protein, 285 aa, Artificial Sequence
  Synthetic polypeptide
ICFVIPGGHIAGSLAVVTDAAHLLIDLTSFLLSLFSLWLSSKPPSKRLTFGWHRAEILGALLSILCIWVVTGVLVYLACERLLYPDYQIQATVMIIVSSCAVAANIVLTVVLHQRCLGHNHKEVQANASVRAAFVHALGDLFQSISVLISALIIYFKPEYKIADPICTFIFSILVLASTITILKDFSILLMEGVPKSLNYSGVKELILAVDGVLSVHSLHIWSLTMNQVILSAHVATAASRDSQVVRREIAKALSKSFTMHSLTIQMESPVDQDPDCLFCEDPCD

SEQ ID NO: 36220 - protein, 19 aa, Artificial Sequence
  Synthetic polypeptide
YLVGTLLGVLLLSQMLPTS

SEQ ID NO: 36221 - protein, 31 aa, Artificial Sequence
  Synthetic polypeptide
RPSFELNLLCDTWWAHCWESCCCHRCCPPLN

SEQ ID NO: 36222 - protein, 52 aa, Artificial Sequence
  Synthetic polypeptide
ICFVIPGGHIAGSLAVVTDAAHLLIDLTSFLLSLFSLWLSSKPPSKRLTFGW

SEQ ID NO: 36223 - protein, 444 aa, Artificial Sequence
  Synthetic polypeptide
PCTNRTKPVTLYFIICKLGYDYREMLHNATFCLVPRGRRLGSFRFLEALQAACVPVMLSNGWELPFSEVINWNQAAVIGDERLLLQIPSTIRSIHQDKILALRQQTQFLWEAYFSSVEKIVLTTLEIIQDRIFKHISRNSLIWNKHPGGLFVLPQYSSYLGDFPYYYANLGLKPPSKFTAVIHAVTPLVSQSQPVLKLLVAAAKSQYCAQIIVLWNCDKPLPAKHRWPATAVPVVVIEGESKVMSSRFLPYDNIITDAVLSLDEDTVLSTTEVDFAFTVWQSFPERIVGYPARSHFWDNSKERWGYTSKWTNDYSMVLTGAAIYHKYYHYLYSHYLPASLKNMVDQLANCEDILMNFLVSAVTKLPPIKVTQKKQYKETMMGQTSRASRWADPDHFAQRQSCMNTFASWFGYMPLIHSQMRLDPVLFKDQVSILRKKYRDIERL

SEQ ID NO: 36224 - protein, 46 aa, Artificial Sequence
  Synthetic polypeptide
HFTSSSVNWGMIIGKCCTMPLSVWFLVVAGLGPSDSWRLCRLPASL

SEQ ID NO: 36225 - protein, 3 aa, Artificial Sequence
  Synthetic polypeptide
TGV

SEQ ID NO: 36226 - protein, 115 aa, Artificial Sequence
  Synthetic polypeptide
PCTNRTKPVTLYFIICKLGYDYREMLHNATFCLVPRGRRLGSFRFLEALQAACVPVMLSNGWELPFSEVINWNQAAVIGDERLLLQTPISVGLVICYGGKHAERDSFYNQVYSSG

SEQ ID NO: 36227 - protein, 76 aa, Artificial Sequence
  Synthetic polypeptide
LLPAFPTHLLSTFWKASTQLHLTSSRVTSLMPQTRPNSPGMIIGKCCTMPLSVWFLVVAGLGPSDSWRLCRLPASL

SEQ ID NO: 36228 - protein, 10 aa, Artificial Sequence
  Synthetic polypeptide
CLRQGQILLV

SEQ ID NO: 36229 - protein, 464 aa, Artificial Sequence
  Synthetic polypeptide
SPRFPHTPPFHFLESQHPAASDFFQSHFLDASDKAKFSWYDYREMLHNATFCLVPRGRRLGSFRFLEALQAACVPVMLSNGWELPFSEVINWNQAAVIGDERLLLQIPSTIRSIHQDKILALRQQTQFLWEAYFSSVEKIVLTTLEIIQDRIFKHISRNSLIWNKHPGGLFVLPQYSSYLGDFPYYYANLGLKPPSKFTAVIHAVTPLVSQSQPVLKLLVAAAKSQYCAQIIVLWNCDKPLPAKHRWPATAVPVVVIEGESKVMSSRFLPYDNIITDAVLSLDEDTVLSTTEVDFAFTVWQSFPERIVGYPARSHFWDNSKERWGYTSKWTNDYSMVLTGAAIYHKYYHYLYSHYLPASLKNMVDQLANCEDILMNFLVSAVTKLPPIKVTQKKQYKETMMGQTSRASRWADPDHFAQRQSCMNTFASWFGYMPLIHSQMRLDPVLFKDQVSILRKKYRDIERL

SEQ ID NO: 36230 - protein, 135 aa, Artificial Sequence
  Synthetic polypeptide
SPRFPHTPPFHFLESQHPAASDFFQSHFLDASDKAKFSWYDYREMLHNATFCLVPRGRRLGSFRFLEALQAACVPVMLSNGWELPFSEVINWNQAAVIGDERLLLQTPISVGLVICYGGKHAERDSFYNQVYSSG

SEQ ID NO: 36231 - protein, 233 aa, Artificial Sequence
  Synthetic polypeptide
HLRIMGDDGEKGDPGEEGKHGKVGRMGPKGIKGELGDMGDQGNIGKTGPIGKKGDKGEKGLLGIPGEKGKAGTVCDCGRYRKFVGQLDISIARLKTSMKFVKNVIAGIRETEEKFYYIVQEEKNYRESLTHCRIRGGMLAMPKDEAANTLIADYVAKSGFFRVFIGVNDLEREGQYMFTDNTPLQNYSNWNEGEPSDPYGHEDCVEMLSSGRWNDTECHLTMYFVCEFIKKKK

SEQ ID NO: 36232 - protein, 95 aa, Artificial Sequence
  Synthetic polypeptide
GSWEMMVKKEIQEKRESMAKWDAWGRKELKENWVIWEIRAILARLGPLGRRVTKGKKVCLEYLEKKAKQVLSVIVEDTGNLLDNWILVLLGSRHL

SEQ ID NO: 36233 - protein, 20 aa, Artificial Sequence
  Synthetic polypeptide
DACQAHCVHCPLVAPEDHGR

SEQ ID NO: 36234 - protein, 125 aa, Artificial Sequence
  Synthetic polypeptide
GLPSHIKPVWVWILIAVLPLKSVPHTQFHQDPKEMMVKKEIQEKRESMAKWDAWGRKELKENWVIWEIRAILARLGPLGRRVTKGKKVCLEYLEKKAKQVLSVIVEDTGNLLDNWILVLLGSRHL

SEQ ID NO: 36235 - protein, 7 aa, Artificial Sequence
  Synthetic polypeptide
NQSGSGY

SEQ ID NO: 36236 - protein, 269 aa, Artificial Sequence
  Synthetic polypeptide
YLPSAMIVRPPQPHKTSLGLDIDSRPTAEVCATHTISPGPKGDDGEKGDPGEEGKHGKVGRMGPKGIKGELGDMGDQGNIGKTGPIGKKGDKGEKGLLGIPGEKGKAGTVCDCGRYRKFVGQLDISIARLKTSMKFVKNVIAGIRETEEKFYYIVQEEKNYRESLTHCRIRGGMLAMPKDEAANTLIADYVAKSGFFRVFIGVNDLEREGQYMFTDNTPLQNYSNWNEGEPSDPYGHEDCVEMLSSGRWNDTECHLTMYFVCEFIKKKK

SEQ ID NO: 36237 - protein, 158 aa, Artificial Sequence
  Synthetic polypeptide
TSYFNHSHIAITSSVLNSTSFTQVHSENASVCPQATQFFFPQGFSVIKAWCTLRKPLTITSGQPEMEMMVKKEIQEKRESMAKWDAWGRKELKENWVIWEIRAILARLGPLGRRVTKGKKVCLEYLEKKAKQVLSVIVEDTGNLLDNWILVLLGSRHL

SEQ ID NO: 36238 - protein, 14 aa, Artificial Sequence
  Synthetic polypeptide
GSLSLSQVGSLKWR

SEQ ID NO: 36239 - protein, 229 aa, Artificial Sequence
  Synthetic polypeptide
NGDDGEKGDPGEEGKHGKVGRMGPKGIKGELGDMGDQGNIGKTGPIGKKGDKGEKGLLGIPGEKGKAGTVCDCGRYRKFVGQLDISIARLKTSMKFVKNVIAGIRETEEKFYYIVQEEKNYRESLTHCRIRGGMLAMPKDEAANTLIADYVAKSGFFRVFIGVNDLEREGQYMFTDNTPLQNYSNWNEGEPSDPYGHEDCVEMLSSGRWNDTECHLTMYFVCEFIKKKK

SEQ ID NO: 36240 - protein, 117 aa, Artificial Sequence
  Synthetic polypeptide
HSTRPSPEAKQMPVPCFLDFPASRAEMMVKKEIQEKRESMAKWDAWGRKELKENWVIWEIRAILARLGPLGRRVTKGKKVCLEYLEKKAKQVLSVIVEDTGNLLDNWILVLLGSRHL

SEQ ID NO: 36241 - protein, 39 aa, Artificial Sequence
  Synthetic polypeptide
VLASFSASLPRNDTAQGPHQKPSRCQCHAFWTSQPPELR

SEQ ID NO: 36242 - protein, 9 aa, Artificial Sequence
  Synthetic polypeptide
GLPSHVELR

SEQ ID NO: 36243 - protein, 134 aa, Artificial Sequence
  Synthetic polypeptide
VFDSSSFTCSSFSCLLVKKVLASPSPSTMIVSFLRSPKPCGTEMMVKKEIQEKRESMAKWDAWGRKELKENWVIWEIRAILARLGPLGRRVTKGKKVCLEYLEKKAKQVLSVIVEDTGNLLDNWILVLLGSRHL

SEQ ID NO: 36244 - protein, 39 aa, Artificial Sequence
  Synthetic polypeptide
FPAPGIVPEMYCSGVLSGFWLPPPMFLYLYYKDGSCLCP

SEQ ID NO: 36245 - protein, 54 aa, Artificial Sequence
  Synthetic polypeptide
CLKCTVRGSCLDFGCLLQCSSTSTTRMGHVCVRDSVFLFAPLSGHVPLWHGGSN

SEQ ID NO: 36246 - protein, 134 aa, Artificial Sequence
  Synthetic polypeptide
NVLFGGLVWILVASSNVPLPLLQGWVMFVSVTAFFFSLLFLGMFLSGMVAQIDANWNFLDFAYHFTVFVFYFGAFLLEAAATSLHDLHCNTTITGQPLLSDNQYNINVAASIFAFMTTACYGCSLGLALRRWRP

SEQ ID NO: 36247 - protein, 87 aa, Artificial Sequence
  Synthetic polypeptide
RRRRMISAFPSEDFAYHFTVFVFYFGAFLLEAAATSLHDLHCNTTITGQPLLSDNQYNINVAASIFAFMTTACYGCSLGLALRRWRP

SEQ ID NO: 36248 - protein, 40 aa, Artificial Sequence
  Synthetic polypeptide
FLHFHLRILPTILQYLSSILEPFYWKQQPHPCMICIAIQP

SEQ ID NO: 36249 - protein, 44 aa, Artificial Sequence
  Synthetic polypeptide
GQVWWLTPVILALWEAKVCRLSDLRSLRLAWATRSLVFLIIIGN

SEQ ID NO: 36250 - protein, 9 aa, Artificial Sequence
  Synthetic polypeptide
PGQHDLWFF

SEQ ID NO: 36251 - protein, 309 aa, Artificial Sequence
  Synthetic polypeptide
PGVVAHACNPSTLGGQGVPIVGPQEFETSLGNTIFGFSNNYWELRRRRPKLKKLKKLLMENPYEGPDSQKEKDSNSSKYTTEDLLDQIQASEEEIMTQLQVLNACKIGGYWRILEFDYEMKLLNHVTQLVDSESWSFGKVPLNTCLQELGPLEPEEMIEHCLKCYGKKYVDEGEVYFELDADKICRAAARMLLQNAVKFNLAEFQEVWQQSVPEGMVTSLDQLKGLALVDRHSRPEIIFLLKVDDLPEDNQERFNSLFSLREKWTEEDIAPYIQDLCGEKQTIGALLTKYSHSSMQNGVKVYNSRRPIS

SEQ ID NO: 36252 - protein, 56 aa, Artificial Sequence
  Synthetic polypeptide
ESSPLPNLKYPGKESTAEGCRDLCLGKPGSGCTKKRLLKIDVIISRPTQTVLSQKN

SEQ ID NO: 36253 - protein, 12 aa, Artificial Sequence
  Synthetic polypeptide
ESQAQAARRKGY

SEQ ID NO: 36254 - protein, 390 aa, Artificial Sequence
  Synthetic polypeptide
SQVPRERKHCRRLQGPLPRKARLRLHEEKVIKDRRHHLKTYPNCFVAKELIDWLIEHKEASDRETAIKLMQKLADRGIIHHVCDEHKEFKDVKLFYRFRKDDGTFPLDNEVKAFMRGQRLYEKLMSPENTLLQPREEEGVKYERTFMASEFLDWLVQEGEATTRKEAEQLCHRLMEHGIIQHVSNKHPFVDSNLLYQFRMNFRRRRRLMELLNEKSPSSQETHDSPFCLRKQSHDNRKSTSFMSVSPSKEIKIVSAVRRSSMSSCGSSGYFSSSPTLSSSPPVLCNPKSVLKRPVTSEELLTPGAPYARKTFTIVGDAVGWGFVVRGSKPCHIQAVDPSGPAAAAGMKVCQFVVSVNGLNVLHVDYRTVSNLILTGPRTIVMEVMEELEC

SEQ ID NO: 36255 - protein, 160 aa, Artificial Sequence
  Synthetic polypeptide
ERPRLIPLLTLSLYIPLPCFKKNSVHVSPEMLCDCGDHVVIMNTRHIAFSGNKWEQKVYSSHTGYPGGFRQVTAAQLHLRDPVAIVKLAIYGMLPKNLHRRTMMERLHLFPDEYIPEDILKNLVEELPQPRKIPKRLDEYTQEEIDAFPRLWTPPEDYRL

SEQ ID NO: 36256 - protein, 35 aa, Artificial Sequence
  Synthetic polypeptide
FLCSPFHSIYLYLALKKIVFMYHLKCYVTVGIMLL

SEQ ID NO: 36257 - protein, 3 aa, Artificial Sequence
  Synthetic polypeptide
NVM

SEQ ID NO: 36258 - protein, 153 aa, Artificial Sequence
  Synthetic polypeptide
ERPRLIPLLTLSLYIPLPCFKKNSVHVSPEMLCDCGDHVVIMNTRHIAFSGNKWEQKVYSSHTGYPGGFRQVTAAQLHLRDPVAIVKLAIYGMLPKNLHRRTMMERLHLFPDEYIPEDILKNLVEELPQPRKIPKRLDEYTQEEIDAFPRLWT

SEQ ID NO: 36259 - protein, 4 aa, Artificial Sequence
  Synthetic polypeptide
HVWI

SEQ ID NO: 36260 - protein, 114 aa, Artificial Sequence
  Synthetic polypeptide
AGRSGWLTPIISALWEAKAGRSRGQEIETILANTFGFEISFPEFCLKGVTLKNFSTSNLNTDFLAKKIIPSKDKNILPKVFHYYGPALEFVQMIKLSDLPSCYMSDIEFEFTED

SEQ ID NO: 36261 - protein, 35 aa, Artificial Sequence
  Synthetic polypeptide
SQHFGRPRRADHEVRRSRPSWLTRLDLKLVFLNFV

SEQ ID NO: 36262 - protein, 689 aa, Artificial Sequence
  Synthetic polypeptide
AGRSGWLTPIISALWEAKAGRSRGQEIETILANTFGFEISFPEFCLKGVTLKNFSTSNLNTDFLAKKIIPSKDKNILPKVFHYYGPALEFVQMIKLSDLPSCYMSDIEFELGLTNSTKQNSVLLLEQISSLCSKVGALFVLPCTISNILIPPPNQLSSRKWKEYIAKKPKTISVPDVEVKGECSSYYLLLQGNGNRRCKATLIHSANQINGSFALNLIHGKMKTKTEEAKLSFPFDLLSLPHFSGEQIVQREKQLANVQVLALEECLKRRKLAKQPETVSVAELKSLLVLTRKHFLDYFDAVIPKMILRKMDKIKTFNILNDFSPVEPNSSSLMETNPLEWPERHVLQNLETFEKTKQKMRTGSLPHSSEQLLGHKEGPRDSITLLDAKELLKYFTSDGLPIGDLQPLPIQKGEKTFVLTPELSPGKLQVLPFEKASVCHYHGIEYCLDDRKALERDGGFSELQSRLIRYETQTTCTRESFPVPTVLSPLPSPVVSSDPGSVPDGEVLQNELRTEVSRLKRRSKDLNCLYPRKRLVKSESSESLLSQTTGNSNHYHHHVTSRKPQTERSLPVTCPLVPIPSCETPKLATKTSSGQKSMHESKTSRQIKESRSQKHTRILKEVVTETLKKHSITETHECFTACSQRLFEISKFYLKDLKTSRGLFEEMKKTANNNAVQVIDWVLEKTSKK

SEQ ID NO: 36263 - protein, 562 aa, Artificial Sequence
  Synthetic polypeptide
IAHQAKDFAKMHCERFLCILRIIGTTLFGVSLLLGITAAYIVGYQFIQTDNYYFSFGLYGAFLASHLIIQSLFAFLEHRKMKKSLETPIKLNKTVALCIAAYQEDPDYLRKCLQSVKRLTYPGIKVVMVIDGNSEDDLYMMDIFSEVMGRDKSATYIWKNNFHEKGPGETDESHKESSQHVTQLVLSNKSICIMQKWGGKREVMYTAFRALGRSVDYVQVCDSDTMLDPASSVEMVKVLEEDPMVGGVGGDVQILNKYDSWISFLSSVRYWMAFNIERACQSYFGCVQCISGPLGMYRNSLLHEFVEDWYNQEFMGNQCSFGDDRHLTNRVLSLGYATKYTARSKCLTETPIEYLRWLNQQTRWSKSYFREWLYNAMWFHKHHLWMTYEAIITGFFPFFLIATVIQLFYRGKIWNILLFLLTVQLVGLIKSSFASCLRGNIVMVFMSLYSVLYMSSLLPAKMFAIATINKAGWGTSGRKTIVVNFIGLIPVSVWFTILLGGVIFTIYKESKRPFSESKQTVLIVGTLLYACYWVMLLTLYVVLINKCGRRKKGQQYDMVLDV

SEQ ID NO: 36264 - protein, 18 aa, Artificial Sequence
  Synthetic polypeptide
HIKQKILQRCIVRGFYVS

SEQ ID NO: 36265 - protein, 19 aa, Artificial Sequence
  Synthetic polypeptide
VDYEIINSTSSKRFCKDAL

SEQ ID NO: 36266 - protein, 93 aa, Artificial Sequence
  Synthetic polypeptide
ISLTRSDDSVRGEFPYTSSLFSPAAIHVRCDLLLLAFHHDCEASPAMWNCLSHFQKLVVQNGDKNDQERVCPCSGAWGADCHCGRLHKEDSCL

SEQ ID NO: 36267 - protein, 152 aa, Artificial Sequence
  Synthetic polypeptide
DVTCSSLPSTMIVRPPQPCGTVYHISRNSWFKMETRMIKNVCAPAVVLGERIVIVGGYTRRILAYDPQSNKFVKCADMKDRRMHHGATVMGNKLYVTGGRRLTTDCNIEDSASFDCYDPETDTWTSQGQLPHKLFDHACLTLQCIPRTSGLP

SEQ ID NO: 36268 - protein, 23 aa, Artificial Sequence
  Synthetic polypeptide
GLPSHVELFITFPETRGSKWRQE

SEQ ID NO: 36269 - protein, 24 aa, Artificial Sequence
  Synthetic polypeptide
GQAQWLTPVIPVLWEAKFHLLKVL

SEQ ID NO: 36270 - protein, 11 aa, Artificial Sequence
  Synthetic polypeptide
SQYFGKPSSTS

SEQ ID NO: 36271 - protein, 571 aa, Artificial Sequence
  Synthetic polypeptide
PSTVAHTCNPSTLGSQVPPLEGFVMNRVQGDYFETLLYKIFVSIDEHTNVAELANVLEIDLSLVKNAVSMYCRLGFAHKKGQVINLDQLHSSWKNVPSVNRLKSTLDPQKMLLSWDGGESRSPVQEASSATDTDTNSQEDPADTASVSSLSLSTGHTKRIAFLFDSTLTAFLMMGNLSPNLKSHAVTMFEVGKLSDESLDSFLIELEKVQSTGEGEAQRYFDHALTLRNTILFLRHNKDLVAQTAQPDQPNYGFPLDLLRCESLLGLDPATCSRVLNKNYTLLVSMAPLTNEIRPVSSCTPQHIGPAIPEVSSVWFKLYIYHVTGQGPPSLLLSKGTRLRKLPDIFQSYDRLLITSWGHDPGVVPTSNVLTMLNDALTHSAVLIQGHGLHGIGETVHVPFPFDETELQGEFTRVNMGVHKALQILRNRVDLQHLCGYVTMLNASSQLADRKLSDASDERGEPDLASGSDVNGSTESFEMVIEEATIDSATKQTSGATTEADWVPLELCFGIPLFSSELNRKVCRKIAAHGLCRKESLQNLLHSSRKLSLQVLNFVHSFQVTKTKKSKWYLY

SEQ ID NO: 36272 - protein, 620 aa, Artificial Sequence
  Synthetic polypeptide
PSTVAHTCNPSTLGSQVPPLEGFVMNRVQGDYFETLLYKIFVSIDEHTNVAELANVLEIDLSLVKNAVSMYCRLGFAHKKGQVINLDQLHSSWKNVPSVNRLKSTLDPQKMLLSWDGGESRSPVQEASSATDTDTNSQEDPADTASVSSLSLSTGHTKRIAFLFDSTLTAFLMMGNLSPNLKSHAVTMFEVGKLSDESLDSFLIELEKVQSTGEGEAQRYFDHALTLRNTILFLRHNKDLVAQTAQPDQPNYGFPLDLLRCESLLGLDPATCSRVLNKNYTLLVSMAPLTNEIRPVSSCTPQHIGPAIPEVSSVWFKLYIYHVTGQGPPSLLLSKGTRLRKLPDIFQSYDRLLITSWGHDPGVVPTSNVLTMLNDALTHSAVLIQGHGLHGIGETVHVPFPFDETELQGEFTRVNMGVHKALQILRNRVDLQHLCGYVTMLNASSQLADRKLSDASDERGEPDLASGSDVNGSTESFEMVIEEATIDSATKQTSGATTEADWVPLELCFGIPLFSSELNRKVCRKIAAHGLCRKESLQNLLHSSRKLSLQVLNFVHSFQEGASILDIHTEPSFSSLLSQSSCADMGVPLPAKNLIFKDGVLSEWSGRSPSSLLIANLHLQ

SEQ ID NO: 36273 - protein, 109 aa, Artificial Sequence
  Synthetic polypeptide
PSTVAHTCNPSTLGSQVPPLEGFVMNRVQGDYFETLLYKIFVSIDEHTNVAELANVLEIDLSLVKNAVSMYCRLGFAHKKGQVINLDQLHSSWKNVPSVNRLKGGVSPC

SEQ ID NO: 36274 - protein, 21 aa, Artificial Sequence
  Synthetic polypeptide
SRRIFYFVGPGRLDLLSPGCA

SEQ ID NO: 36275 - protein, 26 aa, Artificial Sequence
  Synthetic polypeptide
LEGFSTLWDQGDWICSHQDVHEAQKH

SEQ ID NO: 36276 - protein, 666 aa, Artificial Sequence
  Synthetic polypeptide
KDFLLCGTREIGSALTRMCMRHRSIEAKLRQFSSALIDCLINPLQEQMEEWKKVANQLDKDHAKEYKKARQEIKKKSSDTLKLQKKAKKGRGDIQPQLDSALQDVNDKYLLLEETEKQAVRKALIEERGRFCTFISMLRPVIEEEISMLGEITHLQTISEDLKSLTMDPHKLPSSSEQVILDLKGSDYSWSYQTPPSSPSTTMSRKSSVCSSLNSVNSSDSRSSGSHSHSPSSHYRYRSSNLAQQAPVRLSSVSSHDSGFISQDAFQSKSPSPMPPEAPNQNSSSSASSEASETCQSVSECSSPTSVSSGSTMGAWVSTEKDWAKPGPYDQPLVNTLQRRKEKREPDPNGGGPTTASGPPAAAEEAQRPRSMTVSAATRPGEEMEACEELALALSRGLQLDTQRSSRDSLQCSSGYSTQTTTPCCSEDTIPSQVSDYDYFSVSGDQEADQQEFDKSSTIPRNSDISQSYRRMFQAKRPASTAGLPTTLGPAMVTPGVATIRRTPSTKPSVRRGTIGAGPIPIKTPVIPVKTPTVPDLPGVLPAPPDGPEERGEHSPESPSVGEGPQGVTSMPSSMWSGQASVNPPLPGPKPSIPEEHRQAIPESEAEDQEREPPSATVSPGQIPESDPADLSPRDTPQGEDMLNAIRRGVKLKKTTTNDRSAPRFS

SEQ ID NO: 36277 - protein, 691 aa, Artificial Sequence
  Synthetic polypeptide
KDFLLCGTREIGSALTRMCMRHRSIEAKLRQFSSALIDCLINPLQEQMEEWKKVANQLDKDHAKEYKKARQEIKKKSSDTLKLQKKAKKGRGDIQPQLDSALQDVNDKYLLLEETEKQAVRKALIEERGRFCTFISMLRPVIEEEISMLGEITHLQTISEDLKSLTMDPHKLPSSSEQVILDLKGSDYSWSYQTPPSSPSTTMSRKSSVCSSLNSVNSSDSRSSGSHSHSPSSHYRYRSSNLAQQAPVRLSSVSSHDSGFISQDAFQSKSPSPMPPEAPNQLSNGFSHYSLSSESHVGPTGAGLFPHCLPASRLLPRVTSVHLPDYAHYYTIGPGMFPSSQIPSWKDWAKPGPYDQPLVNTLQRRKEKREPDPNGGGPTTASGPPAAAEEAQRPRSMTVSAATRPGEEMEACEELALALSRGLQLDTQRSSRDSLQCSSGYSTQTTTPCCSEDTIPSQVSDYDYFSVSGDQEADQQEFDKSSTIPRNSDISQSYRRMFQAKRPASTAGLPTTLGPAMVTPGVATIRRTPSTKPSVRRGTIGAGPIPIKTPVIPVKTPTVPDLPGVLPAPPDGPEERGEHSPESPSVGEGPQGVTSMPSSMWSGQASVNPPLPGPKPSIPEEHRQAIPESEAEDQEREPPSATVSPGQIPESDPADLSPRDTPQGEDMLNAIRRGVKLKKTTTNDRSAPRFS

SEQ ID NO: 36278 - protein, 695 aa, Artificial Sequence
  Synthetic polypeptide
KDFLLCGTREIGSALTRMCMRHRSIEAKLRQFSSALIDCLINPLQEQMEEWKKVANQLDKDHAKEYKKARQEIKKKSSDTLKLQKKAKKVDTLGRGDIQPQLDSALQDVNDKYLLLEETEKQAVRKALIEERGRFCTFISMLRPVIEEEISMLGEITHLQTISEDLKSLTMDPHKLPSSSEQVILDLKGSDYSWSYQTPPSSPSTTMSRKSSVCSSLNSVNSSDSRSSGSHSHSPSSHYRYRSSNLAQQAPVRLSSVSSHDSGFISQDAFQSKSPSPMPPEAPNQLSNGFSHYSLSSESHVGPTGAGLFPHCLPASRLLPRVTSVHLPDYAHYYTIGPGMFPSSQIPSWKDWAKPGPYDQPLVNTLQRRKEKREPDPNGGGPTTASGPPAAAEEAQRPRSMTVSAATRPGEEMEACEELALALSRGLQLDTQRSSRDSLQCSSGYSTQTTTPCCSEDTIPSQVSDYDYFSVSGDQEADQQEFDKSSTIPRNSDISQSYRRMFQAKRPASTAGLPTTLGPAMVTPGVATIRRTPSTKPSVRRGTIGAGPIPIKTPVIPVKTPTVPDLPGVLPAPPDGPEERGEHSPESPSVGEGPQGVTSMPSSMWSGQASVNPPLPGPKPSIPEEHRQAIPESEAEDQEREPPSATVSPGQIPESDPADLSPRDTPQGEDMLNAIRRGVKLKKTTTNDRSAPRFS

SEQ ID NO: 36279 - protein, 125 aa, Artificial Sequence
  Synthetic polypeptide
KDFLLCGTREIGSALTRMCMRHRSIEAKLRQFSSALIDCLINPLQEQMEEWKKVANQLDKDHAKEYKKARQEIKKKSSDTLKLQKKAKKGRGDIQPQLDSALQDVNDKYLLLEETEKQAVRKALI

SEQ ID NO: 36280 - protein, 37 aa, Artificial Sequence
  Synthetic polypeptide
QGSLTPALQTDTGLSLVRNLTAQQENDMSHRPAEHLV

SEQ ID NO: 36281 - protein, 329 aa, Artificial Sequence
  Synthetic polypeptide
PHSKRMTCHIDQLNTWYDMKTHQEVTSSRLFSEIQTTLGTFGLNGLDRLLCFMIVKELQNFLSMFQKIILRDRTVQDTLKTLMNAVSPLKSIVANSNKIYFSAIAKTQKIWTAYLEAIMKVGQMQILRQQIANELNYSCRFDSKHLAAALENLNKALLADIEAHYQDPSLPYPKEDNTLLYEITAYLEAAGIHNPLNKIYITTKRLPYFPIVNFLFLIAQLPKLQYNKNLGMVCRKPTDPVDWPPLVLGLLTLLKQFHSRYTEQFLALIGQFICSTVEQCTSQKIPEIPADVVGALLFLEDYVRYTKLPRRVAEAHVPNFIFDEFRTVL

SEQ ID NO: 36282 - protein, 15 aa, Artificial Sequence
  Synthetic polypeptide
YRSVTREEPDRTARE

SEQ ID NO: 36283 - protein, 78 aa, Artificial Sequence
  Synthetic polypeptide
FQLLGRLKWEDHLSPGVQDQPGQHSGLQADREADGTEGVDEDIIVTQSQTNFTCPITKEEMKKPVKNKVCGHTYEEDA

SEQ ID NO: 36284 - protein, 29 aa, Artificial Sequence
  Synthetic polypeptide
AQEFKISLDNIVVFKLTEKLTEQKEWMKI

SEQ ID NO: 36285 - protein, 132 aa, Artificial Sequence
  Synthetic polypeptide
FQLLGRLKWEDHLSPGVQDQPGQHSGLQADREADGTEGVDEDIIVTQSQTNFTCPITKEEMKKPVKNKVCGHTYEEDAIVRMIESRQKRKKKAYCPQIGCSHTDIRKSDLIQDEALRRAIENHNKKRHRHSE

SEQ ID NO: 36286 - protein, 113 aa, Artificial Sequence
  Synthetic polypeptide
GRGRYWGSLPRRCPSTLASPTGTMTSTTTRCSRISTATRRRTSTSSSSRASCSPRRPARISGRNSSCCPPRPCPLAAAPGSARPPTLRSHPSPFGETTTAVAGASPRPTSWRW

SEQ ID NO: 36287 - protein, 16 aa, Artificial Sequence
  Synthetic polypeptide
DGGGTGAASRDDAPQR

SEQ ID NO: 36288 - protein, 450 aa, Artificial Sequence
  Synthetic polypeptide
TGAVLGQPPATMPLNVSFTNRNYDLDYDSVQPYFYCDEEENFYQQQQQSELQPPAPSEDIWKKFELLPTPPLSPSRRSGLCSPSYVAVTPFSLRGDNDGGGGSFSTADQLEMVTELLGGDMVNQSFICDPDDETFIKNIIIQDCMWSGFSAAAKLVSEKLASYQAARKDSGSPNPARGHSVCSTSSLYLQDLSAAASECIDPSVVFPYPLNDSSSPKSCASQDSSAFSPSSDSLLSSTESSPQGSPEPLVLHEETPPTTSSDSEEEQEDEEEIDVVSVEKRQAPGKRSESGSPSAGGHSKPPHSPLVLKRCHVSTHQHNYAAPPSTRKDYPAAKRVKLDSVRVLRQISNNRKCTSPRSSDTEENVKRRTHNVLERQRRNELKRSFFALRDQIPELENNEKAPKVVILKKATAYILSVQAEEQKLISEEDLLRKRREQLKHKLEQLRNSCA

SEQ ID NO: 36289 - protein, 83 aa, Artificial Sequence
  Synthetic polypeptide
ECSLSAQANTGRAQVHEEDQGSRLQGPECVWGPTDGQRAAHRTTVASEHPAGHAIPPEPLFGSGWALQKIGGQVPDSGSAPDE

SEQ ID NO: 36290 - protein, 493 aa, Artificial Sequence
  Synthetic polypeptide
STVQENCLDDRNVLYLHRPIQAVPKFMKRIKVPDYKDRSVFGVPLTVNVQRTGQPLPQSIQQAMRYLRNHCLDQVGLFRKSGVKSRIQALRQMNEGAIDCVNYEGQSAYDVADMLKQYFRDLPEPLMTNKLSETFLQIYQYVPKDQRLQAIKAAIMLLPDENREVLQTLLYFLSDVTAAVKENQMTPTNLAVCLAPSLFHLNTLKRENSSPRVMQRKQSLGKPDQKDLNENLAATQGLAHMIAECKKLFQVPEEMSRCRNSYTEQELKPLTLEALGHLGNDDSADYQHFLQDCVDGLFKEVKEKFKGWVSYSTSEQAELSYKKVSEGPPLRLWRSVIEVPAVPEEILKRLLKEQHLWDVDLLDSKVIEILDSQTEIYQYVQNSMAPHPARDYVVLRTWRTNLPKGACALLLTSVDHDRAPVVGVRVNVLLSRYLIEPCGPGKSKLTYMCRVDLRGHMPEWYTKSFGHLCAAEVVKIRDSFSNQNTETKDTKSR

SEQ ID NO: 36291 - protein, 26 aa, Artificial Sequence
  Synthetic polypeptide
ALSRRTVWMIGMFFICTGQYRPCPSS

SEQ ID NO: 36292 - protein, 54 aa, Artificial Sequence
  Synthetic polypeptide
ATITPLHSVWMKGCIKVLKDQPPNSVEGLLNALRYTTKHLNDETTSKQIKSMLQ

SEQ ID NO: 36293 - protein, 41 aa, Artificial Sequence
  Synthetic polypeptide
PGVVAHIGSHSYVERLKWEDPLSPGVPACSEPRSHHCIQSG

SEQ ID NO: 36294 - protein, 26 aa, Artificial Sequence
  Synthetic polypeptide
AQEFQPAVSHDHTTAFSLDERLYQSS

SEQ ID NO: 36295 - protein, 98 aa, Artificial Sequence
  Synthetic polypeptide
IILVLVTLLLALCAPILVVLQFLKYVMLFSVQGLASCLSVCKLMFILTTYFSLSPGVIYSGRSFPGPSIRSSIKRSSGSLNKYPIFSHPASRARAGSC

SEQ ID NO: 36296 - protein, 290 aa, Artificial Sequence
  Synthetic polypeptide
SWLPSSLPSVLLYWWCCSSSSMSCSSQFRVWLPAFLSANSCSSLLHTSVSVQESFIQGDLFLGLPLEAALRGLLGALTSTPYSPTQHLEREQALAKQFAEILHFTLRFDELKMTNPAIQNDFSYYRRTLSRMRINNVPAEGENEVNNELANRMSLFYAEATPMLKTLSDATTKFVSENKNLPIENTTDCLSTMASVCRVMLETPEYRSRFTNEETVSFCLRVMVGVIILYDHVHPVGAFAKTSKIDMKGCIKVLKDQPPNSVEGLLNALRYTTKHLNDETTSKQIKSMLQ

SEQ ID NO: 36297 - protein, 121 aa, Artificial Sequence
  Synthetic polypeptide
SWLPSSLPSVLLYWWCCSSSSMSCSSQFRVWLPAFLSANSCSSLLHTSVSVQESFIQGDLFLGLPLEAALRGLLGALTSTPYSPTQHLEREQALAKQFAEILHFTLRFDELKVELSIGPDC

SEQ ID NO: 36298 - protein, 34 aa, Artificial Sequence
  Synthetic polypeptide
CSGRRRLGDHTGTHHGLVHRFPDTHPFFISCLPG

SEQ ID NO: 36299 - protein, 624 aa, Artificial Sequence
  Synthetic polypeptide
AVGEEGLGITQELITAWYIGFLTLILSSFLVYLVEKDVPEVDAQGEEMKEEFETYADALWWGLITLATIGYGDKTPKTWEGRLIAATFSLIGVSFFALPAGILGSGLALKVQEQHRQKHFEKRRKPAAELIQAAWRYYATNPNRIDLVATWRFYESVVSFPFFRKEQLEAASSQKLGLLDRVRLSNPRGSNTKGKLFTPLNVDAIEESPSKEPKPVGLNNKERFRTAFRMKAYAFWQSSEDAGTGDPMAEDRGYGNDFPIEDMIPTLKAAIRAVRILQFRLYKKKFKETLRPYDVKDVIEQYSAGHLDMLSRIKYLQTRIDMIFTPGPPSTPKHKKSQKGSAFTFPSQQSPRNEPYVARPSTSEIEDQSMMGKFVKVERQVQDMGKKLDFLVDMHMQHMERLQVQVTEYYPTKGTSSPAEAEKKEDNRYSDLKTIICNYSETGPPEPPYSFHQVTIDKVSPYGFFAHDPVNLPRGGPSSGKVQATPPSSATTYVERPTVLPILTLLDSRVSCHSQADLQGPYSDRISPRQRRSITRDSDTPLSLMSVNHEELERSPSGFSISQDRDDYVFGPNGGSSWMREKRYLAEGETDTDTDPFTPSGSMPLSSTGDGISDSVWTPSNKPI

SEQ ID NO: 36300 - protein, 21 aa, Artificial Sequence
  Synthetic polypeptide
QWEKKAWGSHRNSSRPGTSVS

SEQ ID NO: 36301 - protein, 612 aa, Artificial Sequence
  Synthetic polypeptide
AVGEEGLGITQELITAWYIGFLTLILSSFLVYLVEKDVPEVDAQGEEMKEEFETYADALWWGLITLATIGYGDKTPKTWEGRLIAATFSLIGVSFFALPAGILGSGLALKVQEQHRQKHFEKRRKPAAELIQAAWRYYATNPNRIDLVATWRFYESVVSFPFFRKEQLEAASSQKLGLLDRVRLSNPRGSNTKGKLFTPLNVDAIEESPSKEPKPVGLNNKERFRTAFRMKAYAFWQSSEDAGTGDPMAEDRGYGNDFPIEDMIPTLKAAIRAVRILQFRLYKKKFKETLRPYDVKDVIEQYSAGHLDMLSRIKYLQTRIDMIFTPGPPSTPKHKKSQKGNEPYVARPSTSEIEDQSMMGKFVKVERQVQDMGKKLDFLVDMHMQHMERLQVQVTEYYPTKGTSSPAEAEKKEDNRYSDLKTIICNYSETGPPEPPYSFHQVTIDKVSPYGFFAHDPVNLPRGGPSSGKVQATPPSSATTYVERPTVLPILTLLDSRVSCHSQADLQGPYSDRISPRQRRSITRDSDTPLSLMSVNHEELERSPSGFSISQDRDDYVFGPNGGSSWMREKRYLAEGETDTDTDPFTPSGSMPLSSTGDGISDSVWTPSNKPI

SEQ ID NO: 36302 - protein, 288 aa, Artificial Sequence
  Synthetic polypeptide
RESRRRSLRFTCDSLDGYHSFECGSIDPLTGSHYTCRRSPRLLTNGYYIWTEDSFLCDKDGNITLNPSQTSVMYKENLVRIFRKKKRICHSFSSLFNLSTSKSWLHGSIFGDINSSPSEDNWLKGTRRLDTDHCNGNADDLDCSSLTDDWESGKMNAESVITSSSSHIISQPPGGNSHSLSLQSQLTASERFQENSSDHSETRLLQEVFFQAILLAVCLIISACARWFMGEILASVFTCSLMITVACLSKFDNHLGMPSMNVLHLNIWKLSNLQSTWNQVFYWKGVSE

SEQ ID NO: 36303 - protein, 60 aa, Artificial Sequence
  Synthetic polypeptide
NPVSTKNTKKKKKSALRGGGPLQSQLLESLRRENDVNPGGGACVSPVIPWMVTILLNAAP

SEQ ID NO: 36304 - protein, 10 aa, Artificial Sequence
  Synthetic polypeptide
IQEAELAFHL

SEQ ID NO: 36305 - protein, 251 aa, Artificial Sequence
  Synthetic polypeptide
RESRRRSLRFTCDSLDGYHSFECGSIDPLTGSHYTCRRSPRLLTNGYYIWTEDSFLCDKDGNITLNPSQTSVMYKENLVSTSKSWLHGSIFGDINSSPSEDNWLKGTRRLDTDHCNGNADDLDCSSLTDDWESGKMNAESVITSSSSHIISQPPGGNSHSLSLQSQLTASERFQENSSDHSETRLLQEVFFQAILLAVCLIISACARWFMGEILASVFTCSLMITVAYVKSLFLSLASYFKTTACARFVKI

SEQ ID NO: 36306 - protein, 207 aa, Artificial Sequence
  Synthetic polypeptide
RESRRRSLRFTCDSLDGYHSFECGSIDPLTGSHYTCRRSPRLLTNGYYIWTEDSFLCDKDGNITLNPSQTSVMYKENLVRIFRKKKRICHSFSSLFNLSTSKSWLHGSIFGDINSSPSEDNWLKGTRRLDTDHCNGNETRLLQEVFFQAILLAVCLIISACARWFMGEILASVFTCSLMITVAYVKSLFLSLASYFKTTACARFVKI

SEQ ID NO: 36307 - protein, 74 aa, Artificial Sequence
  Synthetic polypeptide
RESRRRSLRFTCDSLDGYHSFECGSIDPLTGSHYTCRRSPRLLTNGYYIWTEDSFLCDKDGNITLNPSQTSVMY

SEQ ID NO: 36308 - protein, 66 aa, Artificial Sequence
  Synthetic polypeptide
RESRRRSLRFTCDSLDGYHSFECGSIDPLTGSHYTCRRSPRLLTNGYYIWTEDSFLCDKDGNITLN

SEQ ID NO: 36309 - protein, 38 aa, Artificial Sequence
  Synthetic polypeptide
PWALGITSGPREKERNGKQHEIHPCACREAPAQPGGTG

SEQ ID NO: 36310 - protein, 319 aa, Artificial Sequence
  Synthetic polypeptide
GVQATAEKTVSVEEPRPLGLTQTFSSHDPGLWASPAAPGKKKEMGNSMKSTPAPAERPLPNPEGLDSDFLAVLSDYPSPDISPPIFRRGEKLRVISDEGGWWKAISLSTGRESYIPGICVARVYHGWLFEGLGRDKAEELLQLPDTKVGSFMIRESETKKGFYSLSVRHRQVKHYRIFRLPNNWYYISPRLTFQCLEDLVNHYSEVADGLCCVLTTPCLTQSTAAPAVRASSSPVTLRQKTVDWRRVSRLQEDPEGTENPLGVDESLFSYGLRESIASYLSLTSEDNTSFDRKKKSISLMYGGSKRKSSFFSSPPYFED

SEQ ID NO: 36311 - protein, 27 aa, Artificial Sequence
  Synthetic polypeptide
LKLSHLMTLGSGHHQRPQGKRKKWETA

SEQ ID NO: 36312 - protein, 275 aa, Artificial Sequence
  Synthetic polypeptide
GVQATAEKTVSVEEPRPLGLTQTFSSHDPGLWASPAAPGKKKEMGNSMKSTPAPAERPLPNPEGLDSDFLAVLSDYPSPDISPPIFRRGEKLRVISDEGGWWKAISLSTGRESYIPGICVARVYHGWLFEGLGRDKAEELLQLPDTKVGSFMIRESETKKEVADGLCCVLTTPCLTQSTAAPAVRASSSPVTLRQKTVDWRRVSRLQEDPEGTENPLGVDESLFSYGLRESIASYLSLTSEDNTSFDRKKKSISLMYGGSKRKSSFFSSPPYFED

SEQ ID NO: 36313 - protein, 169 aa, Artificial Sequence
  Synthetic polypeptide
WYYQGFLLLRLPHFSLATAMYEVPVASRHDSEGSPAMWNCTEGAVFGHSVETPHIRAEPSQDLRLESPTRSLIMEAPRGVQVSAAAGDFKATCRKELHLQSTEGEIFLNAETIKLGNLPTGSFSSSSPSSSSSRQTVYELCVCPNGKLYLSPAGVGSTCQSSSNICLWS

SEQ ID NO: 36314 - protein, 78 aa, Artificial Sequence
  Synthetic polypeptide
ISLTRSDGIIRGFCFCVFLIFLLPPRCMKCLLPPAMILRAPQPCGTALKEPYLGTLWRRRTSEQSHPKISGLNHPPDP

SEQ ID NO: 36315 - protein, 9 aa, Artificial Sequence
  Synthetic polypeptide
GLPSHVELH

SEQ ID NO: 36316 - protein, 48 aa, Artificial Sequence
  Synthetic polypeptide
EAEVGGSLQPRSSRPAWHNPGGREGSARRAHEDGVQKTGHSVLGLRRV

SEQ ID NO: 36317 - protein, 397 aa, Artificial Sequence
  Synthetic polypeptide
SQYFERLRWEDHSSPGVQDQPGTILEEEKAQQEERMRMESRRQATVSWDSGGSDEAPPKPSRPGYPSPRSSEGFYPSPQHMVQTNHYQVSGYPGSHGITAMAGSIYPGQASLLDQTDSWNHRPQEIAMWQPNVEDSTVLDLRGIGQVLPTHLMEERLIRQQQEMEEDQRWLEKEERFLKPDVRLSRGSIDREDGSLQGPIGNQHIYQPVGKPDPAAPPKKPPRPGAPGHLGSLASLSSPADSYNEGVKLQPQEISPPPTANLDRSNDKVYENVTGLVKAVIEMSSKIQPAPPEEYVPMVKEVGLALRTLLATVDETIPLLPASTHREIEMAQKLLNSDLGELINKMKLAQQYVMTSLQQEYKKQMLTAAHALAVDAKNLLDVIDQARLKMLGQTRPH

SEQ ID NO: 36318 - protein, 28 aa, Artificial Sequence
  Synthetic polypeptide
GGRITPAQEFKTSLAQSWRKRRLSKKSA

SEQ ID NO: 36319 - protein, 351 aa, Artificial Sequence
  Synthetic polypeptide
SQYFERLRWEDHSSPGVQDQPGTILEEEKAQQEERMRMESRRQATVSWDSGGSDEAPPKPSRPGYPSPRSSEGFYPSPQHMVQTNHYQDSTVLDLRGIGQVLPTHLMEERLIRQQQEMEEDQRWLEKEERFLKPDVRLSRGSIDREDGSLQGPIGNQHIYQPVGKPDPAAPPKKPPRPGAPGHLGSLASLSSPADSYNEGVKLQPQEISPPPTANLDRSNDKVYENVTGLVKAVIEMSSKIQPAPPEEYVPMVKEVGLALRTLLATVDETIPLLPASTHREIEMAQKLLNSDLGELINKMKLAQQYVMTSLQQEYKKQMLTAAHALAVDAKNLLDVIDQARLKMLGQTRPH

SEQ ID NO: 36320 - protein, 410 aa, Artificial Sequence
  Synthetic polypeptide
SQYFERLRWEDHSSPGVQDQPGTILEEEKAQQEERMRMESRRQATVSWDSGGSDEAPPKPSRPGYPSPRSSEGFYPSPQHMVQTNHYQVSGYPGSHGITAMAGSIYPGQASLLDQTDSWNHRPQEIAMWQPNVEDSTVLDLRGIGQVLPTHLMEERLIRQQQEMEEDQRWLEKEERFLKPDVRLSRGSIDREDGSLQGPIGNQHIYQPVGKPGKEEKNWAERNPAAPPKKPPRPGAPGHLGSLASLSSPADSYNEGVKPNQLQPQEISPPPTANLDRSNDKVYENVTGLVKAVIEMSSKIQPAPPEEYVPMVKEVGLALRTLLATVDETIPLLPASTHREIEMAQKLLNSDLGELINKMKLAQQYVMTSLQQEYKKQMLTAAHALAVDAKNLLDVIDQARLKMLGQTRPH

SEQ ID NO: 36321 - protein, 410 aa, Artificial Sequence
  Synthetic polypeptide
SQYFERLRWEDHSSPGVQDQPGTILEEEKAQQEERMRMESRRQATVSWDSGGSDEAPPKPSRPGYPSPRSSEGFYPSPQHMVQTNHYQVSGYPGSHGITAMAGSIYPGQASLLDQTDSWNHRPQEIAMWQPNVEDSTVLDLRGIGQVLPTHLMEERLIRQQQEMEEDQRWLEKEERFLKPDVRLSRGSIDREDGSLQGPIGNQHIYQPVGKPGKEEKNWAERNPAAPPKKPPRPGAPGHLGSLASLSSPADSYNEGVKPWRLQPQEISPPPTANLDRSNDKVYENVTGLVKAVIEMSSKIQPAPPEEYVPMVKEVGLALRTLLATVDETIPLLPASTHREIEMAQKLLNSDLGELINKMKLAQQYVMTSLQQEYKKQMLTAAHALAVDAKNLLDVIDQARLKMLGQTRPH

SEQ ID NO: 36322 - protein, 400 aa, Artificial Sequence
  Synthetic polypeptide
SQYFERLRWEDHSSPGVQDQPGTILEEEKAQQEERMRMESRRQATVSWDSGGSDEAPPKPSRPGYPSPRSSEGFYPSPQHMVQTNHYQVSGYPGSHGITAMAGSIYPGQASLLDQTDSWNHRPQEIAMWQPNVEDSTVLDLRGIGQVLPTHLMEERLIRQQQEMEEDQRWLEKEERFLKPDVRLSRGSIDREDGSLQGPIGNQHIYQPVGKPDPAAPPKKPPRPGAPGHLGSLASLSSPADSYNEGVKPWRLQPQEISPPPTANLDRSNDKVYENVTGLVKAVIEMSSKIQPAPPEEYVPMVKEVGLALRTLLATVDETIPLLPASTHREIEMAQKLLNSDLGELINKMKLAQQYVMTSLQQEYKKQMLTAAHALAVDAKNLLDVIDQARLKMLGQTRPH

SEQ ID NO: 36323 - protein, 31 aa, Artificial Sequence
  Synthetic polypeptide
EAEVGGSLQPRSSRPAWHNPGGREGSARRAH

SEQ ID NO: 36324 - protein, 36 aa, Artificial Sequence
  Synthetic polypeptide
SQYFERLRWEDHSSPGVQDQPGTILEEEKAQQEERM

SEQ ID NO: 36325 - protein, 21 aa, Artificial Sequence
  Synthetic polypeptide
VQEFETSVGNMAKPHLYKRNR

SEQ ID NO: 36326 - protein, 696 aa, Artificial Sequence
  Synthetic polypeptide
AGCSGSCLYSQHSGITLESRSLRPAWATWQNLISTKETDDYAEIIDEEDTYTMPSTRDYEIQRERIELGRCIGEGQFGDVHQGIYMSPENPALAVAIKTCKNCTSDSVREKFLQEALTMRQFDHPHIVKLIGVITENPVWIIMELCTLGELRSFLQVRKYSLDLASLILYAYQLSTALAYLESKRFVHRDIAARNVLVSSNDCVKLGDFGLSRYMEDSTYYKASKGKLPIKWMAPESINFRRFTSASDVWMFGVCMWEILMHGVKPFQGVKNNDVIGRIENGERLPMPPNCPPTLYSLMTKCWAYDPSRRPRFTELKAQLSTILEEEKAQQEERMRMESRRQATVSWDSGGSDEAPPKPSRPGYPSPRSSEGFYPSPQHMVQTNHYQVSGYPGSHGITAMAGSIYPGQASLLDQTDSWNHRPQEIAMWQPNVEDSTVLDLRGIGQVLPTHLMEERLIRQQQEMEEDQRWLEKEERFLKPDVRLSRGSIDREDGSLQGPIGNQHIYQPVGKPDPAAPPKKPPRPGAPGHLGSLASLSSPADSYNEGVKLQPQEISPPPTANLDRSNDKVYENVTGLVKAVIEMSSKIQPAPPEEYVPMVKEVGLALRTLLATVDETIPLLPASTHREIEMAQKLLNSDLGELINKMKLAQQYVMTSLQQEYKKQMLTAAHALAVDAKNLLDVIDQARLKMLGQTRPH

SEQ ID NO: 36327 - protein, 22 aa, Artificial Sequence
  Synthetic polypeptide
DQRGQHGKTSSLQKKQMIMLRL

SEQ ID NO: 36328 - protein, 650 aa, Artificial Sequence
  Synthetic polypeptide
AGCSGSCLYSQHSGITLESRSLRPAWATWQNLISTKETDDYAEIIDEEDTYTMPSTRDYEIQRERIELGRCIGEGQFGDVHQGIYMSPENPALAVAIKTCKNCTSDSVREKFLQEALTMRQFDHPHIVKLIGVITENPVWIIMELCTLGELRSFLQVRKYSLDLASLILYAYQLSTALAYLESKRFVHRDIAARNVLVSSNDCVKLGDFGLSRYMEDSTYYKASKGKLPIKWMAPESINFRRFTSASDVWMFGVCMWEILMHGVKPFQGVKNNDVIGRIENGERLPMPPNCPPTLYSLMTKCWAYDPSRRPRFTELKAQLSTILEEEKAQQEERMRMESRRQATVSWDSGGSDEAPPKPSRPGYPSPRSSEGFYPSPQHMVQTNHYQDSTVLDLRGIGQVLPTHLMEERLIRQQQEMEEDQRWLEKEERFLKPDVRLSRGSIDREDGSLQGPIGNQHIYQPVGKPDPAAPPKKPPRPGAPGHLGSLASLSSPADSYNEGVKLQPQEISPPPTANLDRSNDKVYENVTGLVKAVIEMSSKIQPAPPEEYVPMVKEVGLALRTLLATVDETIPLLPASTHREIEMAQKLLNSDLGELINKMKLAQQYVMTSLQQEYKKQMLTAAHALAVDAKNLLDVIDQARLKMLGQTRPH

SEQ ID NO: 36329 - protein, 709 aa, Artificial Sequence
  Synthetic polypeptide
AGCSGSCLYSQHSGITLESRSLRPAWATWQNLISTKETDDYAEIIDEEDTYTMPSTRDYEIQRERIELGRCIGEGQFGDVHQGIYMSPENPALAVAIKTCKNCTSDSVREKFLQEALTMRQFDHPHIVKLIGVITENPVWIIMELCTLGELRSFLQVRKYSLDLASLILYAYQLSTALAYLESKRFVHRDIAARNVLVSSNDCVKLGDFGLSRYMEDSTYYKASKGKLPIKWMAPESINFRRFTSASDVWMFGVCMWEILMHGVKPFQGVKNNDVIGRIENGERLPMPPNCPPTLYSLMTKCWAYDPSRRPRFTELKAQLSTILEEEKAQQEERMRMESRRQATVSWDSGGSDEAPPKPSRPGYPSPRSSEGFYPSPQHMVQTNHYQVSGYPGSHGITAMAGSIYPGQASLLDQTDSWNHRPQEIAMWQPNVEDSTVLDLRGIGQVLPTHLMEERLIRQQQEMEEDQRWLEKEERFLKPDVRLSRGSIDREDGSLQGPIGNQHIYQPVGKPGKEEKNWAERNPAAPPKKPPRPGAPGHLGSLASLSSPADSYNEGVKPNQLQPQEISPPPTANLDRSNDKVYENVTGLVKAVIEMSSKIQPAPPEEYVPMVKEVGLALRTLLATVDETIPLLPASTHREIEMAQKLLNSDLGELINKMKLAQQYVMTSLQQEYKKQMLTAAHALAVDAKNLLDVIDQARLKMLGQTRPH

SEQ ID NO: 36330 - protein, 703 aa, Artificial Sequence
  Synthetic polypeptide
AGCSGSCLYSQHSGITLESRSLRPAWATWQNLISTKETDDYAEIIDEEDTYTMPSKSYGIDEARDYEIQRERIELGRCIGEGQFGDVHQGIYMSPENPALAVAIKTCKNCTSDSVREKFLQEALTMRQFDHPHIVKLIGVITENPVWIIMELCTLGELRSFLQVRKYSLDLASLILYAYQLSTALAYLESKRFVHRDIAARNVLVSSNDCVKLGDFGLSRYMEDSTYYKASKGKLPIKWMAPESINFRRFTSASDVWMFGVCMWEILMHGVKPFQGVKNNDVIGRIENGERLPMPPNCPPTLYSLMTKCWAYDPSRRPRFTELKAQLSTILEEEKAQQEERMRMESRRQATVSWDSGGSDEAPPKPSRPGYPSPRSSEGFYPSPQHMVQTNHYQVSGYPGSHGITAMAGSIYPGQASLLDQTDSWNHRPQEIAMWQPNVEDSTVLDLRGIGQVLPTHLMEERLIRQQQEMEEDQRWLEKEERFLKPDVRLSRGSIDREDGSLQGPIGNQHIYQPVGKPDPAAPPKKPPRPGAPGHLGSLASLSSPADSYNEGVKLQPQEISPPPTANLDRSNDKVYENVTGLVKAVIEMSSKIQPAPPEEYVPMVKEVGLALRTLLATVDETIPLLPASTHREIEMAQKLLNSDLGELINKMKLAQQYVMTSLQQEYKKQMLTAAHALAVDAKNLLDVIDQARLKMLGQTRPH

SEQ ID NO: 36331 - protein, 709 aa, Artificial Sequence
  Synthetic polypeptide
AGCSGSCLYSQHSGITLESRSLRPAWATWQNLISTKETDDYAEIIDEEDTYTMPSTRDYEIQRERIELGRCIGEGQFGDVHQGIYMSPENPALAVAIKTCKNCTSDSVREKFLQEALTMRQFDHPHIVKLIGVITENPVWIIMELCTLGELRSFLQVRKYSLDLASLILYAYQLSTALAYLESKRFVHRDIAARNVLVSSNDCVKLGDFGLSRYMEDSTYYKASKGKLPIKWMAPESINFRRFTSASDVWMFGVCMWEILMHGVKPFQGVKNNDVIGRIENGERLPMPPNCPPTLYSLMTKCWAYDPSRRPRFTELKAQLSTILEEEKAQQEERMRMESRRQATVSWDSGGSDEAPPKPSRPGYPSPRSSEGFYPSPQHMVQTNHYQVSGYPGSHGITAMAGSIYPGQASLLDQTDSWNHRPQEIAMWQPNVEDSTVLDLRGIGQVLPTHLMEERLIRQQQEMEEDQRWLEKEERFLKPDVRLSRGSIDREDGSLQGPIGNQHIYQPVGKPGKEEKNWAERNPAAPPKKPPRPGAPGHLGSLASLSSPADSYNEGVKPWRLQPQEISPPPTANLDRSNDKVYENVTGLVKAVIEMSSKIQPAPPEEYVPMVKEVGLALRTLLATVDETIPLLPASTHREIEMAQKLLNSDLGELINKMKLAQQYVMTSLQQEYKKQMLTAAHALAVDAKNLLDVIDQARLKMLGQTRPH

SEQ ID NO: 36332 - protein, 150 aa, Artificial Sequence
  Synthetic polypeptide
AGCSGSCLYSQHSGITLESRSLRPAWATWQNLISTKETDDYAEIIDEEDTYTMPSTRDYEIQRERIELGRCIGEGQFGDVHQGIYMSPENPALAVAIKTCKNCTSDSVREKFLQEACHYTSLHWNWCRYISDPNVDAAQTPGMQSNNASV

SEQ ID NO: 36333 - protein, 699 aa, Artificial Sequence
  Synthetic polypeptide
AGCSGSCLYSQHSGITLESRSLRPAWATWQNLISTKETDDYAEIIDEEDTYTMPSTRDYEIQRERIELGRCIGEGQFGDVHQGIYMSPENPALAVAIKTCKNCTSDSVREKFLQEALTMRQFDHPHIVKLIGVITENPVWIIMELCTLGELRSFLQVRKYSLDLASLILYAYQLSTALAYLESKRFVHRDIAARNVLVSSNDCVKLGDFGLSRYMEDSTYYKASKGKLPIKWMAPESINFRRFTSASDVWMFGVCMWEILMHGVKPFQGVKNNDVIGRIENGERLPMPPNCPPTLYSLMTKCWAYDPSRRPRFTELKAQLSTILEEEKAQQEERMRMESRRQATVSWDSGGSDEAPPKPSRPGYPSPRSSEGFYPSPQHMVQTNHYQVSGYPGSHGITAMAGSIYPGQASLLDQTDSWNHRPQEIAMWQPNVEDSTVLDLRGIGQVLPTHLMEERLIRQQQEMEEDQRWLEKEERFLKPDVRLSRGSIDREDGSLQGPIGNQHIYQPVGKPDPAAPPKKPPRPGAPGHLGSLASLSSPADSYNEGVKPWRLQPQEISPPPTANLDRSNDKVYENVTGLVKAVIEMSSKIQPAPPEEYVPMVKEVGLALRTLLATVDETIPLLPASTHREIEMAQKLLNSDLGELINKMKLAQQYVMTSLQQEYKKQMLTAAHALAVDAKNLLDVIDQARLKMLGQTRPH

SEQ ID NO: 36334 - protein, 108 aa, Artificial Sequence
  Synthetic polypeptide
AGCSGSCLYSQHSGITLESRSLRPAWATWQNLISTKETDDYAEIIDEEDTYTMPSTRDYEIQRERIELGRCIGEGQFGDVHQGGPGLLNLKLSSAQSWRKRRLSKKSA

SEQ ID NO: 36335 - protein, 95 aa, Artificial Sequence
  Synthetic polypeptide
AGCSGSCLYSQHSGITLESRSLRPAWATWQNLISTKETDDYAEIIDEEDTYTMPSTRDYEIQRERIELGRCIGEGQFGDVHQGIYMSPVCVCGRY

SEQ ID NO: 36336 - protein, 140 aa, Artificial Sequence
  Synthetic polypeptide
AGCSGSCLYSQHSGITLESRSLRPAWATWQNLISTKETDDYAEIIDEEDTYTMPSTRDYEIQRERIELGRCIGEGQFGDVHQGIYMSPENPALAVAIKTCKNCTSDSVREKFLQEASEVIFASKEIQFGSSIFDPVCLSA

SEQ ID NO: 36337 - protein, 88 aa, Artificial Sequence
  Synthetic polypeptide
AGCSGSCLYSQHSGITLESRSLRPAWATWQNLISTKETDDYAEIIDEEDTYTMPSTRDYEIQRERIELGRCIGEGQFGDVHQGIYMSP

SEQ ID NO: 36338 - protein, 184 aa, Artificial Sequence
  Synthetic polypeptide
AGCSGSCLYSQHSGITLESRSLRPAWATWQNLISTKETDDYAEIIDEEDTYTMPSKSYGIDEARDYEIQRERIELGRCIGEGQFGDVHQGIYMSPENPALAVAIKTCKNCTSDSVREKFLQEALTMRQFDHPHIVKLIGVITENPVWIIMELCTLGELRSFLQVRKYSLDLASLILYAYQLSTA

SEQ ID NO: 36339 - protein, 11 aa, Artificial Sequence
  Synthetic polypeptide
RNRMITEKMLV

SEQ ID NO: 36340 - protein, 12 aa, Artificial Sequence
  Synthetic polypeptide
LQKRCWFKAIFS

SEQ ID NO: 36341 - protein, 887 aa, Artificial Sequence
  Synthetic polypeptide
PVLLKTVKVMKETVEVRETHISRSCLKKQDDYRKDVGLKRFFPKSLLDSVKAKTLRKLIQQTFRQFANLNREESILKFFEILSPVYRFDKECFKCALGSSWIISVELAIGPEEGISYLTDKGCNPTHLADFTQVQTIQYSNSEDKDRKGMLQLKIAGAPEPLTVTAPSLTIAENMADLIDGYCRLVNGTSQSFIIRPQKEGERALPSIPKLANSEKQGMRTHAVSVSETDDYAEIIDEEDTYTMPSTRDYEIQRERIELGRCIGEGQFGDVHQGIYMSPENPALAVAIKTCKNCTSDSVREKFLQEALTMRQFDHPHIVKLIGVITENPVWIIMELCTLGELRSFLQVRKYSLDLASLILYAYQLSTALAYLESKRFVHRDIAARNVLVSSNDCVKLGDFGLSRYMEDSTYYKASKGKLPIKWMAPESINFRRFTSASDVWMFGVCMWEILMHGVKPFQGVKNNDVIGRIENGERLPMPPNCPPTLYSLMTKCWAYDPSRRPRFTELKAQLSTILEEEKAQQEERMRMESRRQATVSWDSGGSDEAPPKPSRPGYPSPRSSEGFYPSPQHMVQTNHYQVSGYPGSHGITAMAGSIYPGQASLLDQTDSWNHRPQEIAMWQPNVEDSTVLDLRGIGQVLPTHLMEERLIRQQQEMEEDQRWLEKEERFLKPDVRLSRGSIDREDGSLQGPIGNQHIYQPVGKPDPAAPPKKPPRPGAPGHLGSLASLSSPADSYNEGVKLQPQEISPPPTANLDRSNDKVYENVTGLVKAVIEMSSKIQPAPPEEYVPMVKEVGLALRTLLATVDETIPLLPASTHREIEMAQKLLNSDLGELINKMKLAQQYVMTSLQQEYKKQMLTAAHALAVDAKNLLDVIDQARLKMLGQTRPH

SEQ ID NO: 36342 - protein, 841 aa, Artificial Sequence
  Synthetic polypeptide
PVLLKTVKVMKETVEVRETHISRSCLKKQDDYRKDVGLKRFFPKSLLDSVKAKTLRKLIQQTFRQFANLNREESILKFFEILSPVYRFDKECFKCALGSSWIISVELAIGPEEGISYLTDKGCNPTHLADFTQVQTIQYSNSEDKDRKGMLQLKIAGAPEPLTVTAPSLTIAENMADLIDGYCRLVNGTSQSFIIRPQKEGERALPSIPKLANSEKQGMRTHAVSVSETDDYAEIIDEEDTYTMPSTRDYEIQRERIELGRCIGEGQFGDVHQGIYMSPENPALAVAIKTCKNCTSDSVREKFLQEALTMRQFDHPHIVKLIGVITENPVWIIMELCTLGELRSFLQVRKYSLDLASLILYAYQLSTALAYLESKRFVHRDIAARNVLVSSNDCVKLGDFGLSRYMEDSTYYKASKGKLPIKWMAPESINFRRFTSASDVWMFGVCMWEILMHGVKPFQGVKNNDVIGRIENGERLPMPPNCPPTLYSLMTKCWAYDPSRRPRFTELKAQLSTILEEEKAQQEERMRMESRRQATVSWDSGGSDEAPPKPSRPGYPSPRSSEGFYPSPQHMVQTNHYQDSTVLDLRGIGQVLPTHLMEERLIRQQQEMEEDQRWLEKEERFLKPDVRLSRGSIDREDGSLQGPIGNQHIYQPVGKPDPAAPPKKPPRPGAPGHLGSLASLSSPADSYNEGVKLQPQEISPPPTANLDRSNDKVYENVTGLVKAVIEMSSKIQPAPPEEYVPMVKEVGLALRTLLATVDETIPLLPASTHREIEMAQKLLNSDLGELINKMKLAQQYVMTSLQQEYKKQMLTAAHALAVDAKNLLDVIDQARLKMLGQTRPH

SEQ ID NO: 36343 - protein, 900 aa, Artificial Sequence
  Synthetic polypeptide
PVLLKTVKVMKETVEVRETHISRSCLKKQDDYRKDVGLKRFFPKSLLDSVKAKTLRKLIQQTFRQFANLNREESILKFFEILSPVYRFDKECFKCALGSSWIISVELAIGPEEGISYLTDKGCNPTHLADFTQVQTIQYSNSEDKDRKGMLQLKIAGAPEPLTVTAPSLTIAENMADLIDGYCRLVNGTSQSFIIRPQKEGERALPSIPKLANSEKQGMRTHAVSVSETDDYAEIIDEEDTYTMPSTRDYEIQRERIELGRCIGEGQFGDVHQGIYMSPENPALAVAIKTCKNCTSDSVREKFLQEALTMRQFDHPHIVKLIGVITENPVWIIMELCTLGELRSFLQVRKYSLDLASLILYAYQLSTALAYLESKRFVHRDIAARNVLVSSNDCVKLGDFGLSRYMEDSTYYKASKGKLPIKWMAPESINFRRFTSASDVWMFGVCMWEILMHGVKPFQGVKNNDVIGRIENGERLPMPPNCPPTLYSLMTKCWAYDPSRRPRFTELKAQLSTILEEEKAQQEERMRMESRRQATVSWDSGGSDEAPPKPSRPGYPSPRSSEGFYPSPQHMVQTNHYQVSGYPGSHGITAMAGSIYPGQASLLDQTDSWNHRPQEIAMWQPNVEDSTVLDLRGIGQVLPTHLMEERLIRQQQEMEEDQRWLEKEERFLKPDVRLSRGSIDREDGSLQGPIGNQHIYQPVGKPGKEEKNWAERNPAAPPKKPPRPGAPGHLGSLASLSSPADSYNEGVKPNQLQPQEISPPPTANLDRSNDKVYENVTGLVKAVIEMSSKIQPAPPEEYVPMVKEVGLALRTLLATVDETIPLLPASTHREIEMAQKLLNSDLGELINKMKLAQQYVMTSLQQEYKKQMLTAAHALAVDAKNLLDVIDQARLKMLGQTRPH

SEQ ID NO: 36344 - protein, 900 aa, Artificial Sequence
  Synthetic polypeptide
PVLLKTVKVMKETVEVRETHISRSCLKKQDDYRKDVGLKRFFPKSLLDSVKAKTLRKLIQQTFRQFANLNREESILKFFEILSPVYRFDKECFKCALGSSWIISVELAIGPEEGISYLTDKGCNPTHLADFTQVQTIQYSNSEDKDRKGMLQLKIAGAPEPLTVTAPSLTIAENMADLIDGYCRLVNGTSQSFIIRPQKEGERALPSIPKLANSEKQGMRTHAVSVSETDDYAEIIDEEDTYTMPSTRDYEIQRERIELGRCIGEGQFGDVHQGIYMSPENPALAVAIKTCKNCTSDSVREKFLQEALTMRQFDHPHIVKLIGVITENPVWIIMELCTLGELRSFLQVRKYSLDLASLILYAYQLSTALAYLESKRFVHRDIAARNVLVSSNDCVKLGDFGLSRYMEDSTYYKASKGKLPIKWMAPESINFRRFTSASDVWMFGVCMWEILMHGVKPFQGVKNNDVIGRIENGERLPMPPNCPPTLYSLMTKCWAYDPSRRPRFTELKAQLSTILEEEKAQQEERMRMESRRQATVSWDSGGSDEAPPKPSRPGYPSPRSSEGFYPSPQHMVQTNHYQVSGYPGSHGITAMAGSIYPGQASLLDQTDSWNHRPQEIAMWQPNVEDSTVLDLRGIGQVLPTHLMEERLIRQQQEMEEDQRWLEKEERFLKPDVRLSRGSIDREDGSLQGPIGNQHIYQPVGKPGKEEKNWAERNPAAPPKKPPRPGAPGHLGSLASLSSPADSYNEGVKPWRLQPQEISPPPTANLDRSNDKVYENVTGLVKAVIEMSSKIQPAPPEEYVPMVKEVGLALRTLLATVDETIPLLPASTHREIEMAQKLLNSDLGELINKMKLAQQYVMTSLQQEYKKQMLTAAHALAVDAKNLLDVIDQARLKMLGQTRPH

SEQ ID NO: 36345 - protein, 341 aa, Artificial Sequence
  Synthetic polypeptide
PVLLKTVKVMKETVEVRETHISRSCLKKQDDYRKDVGLKRFFPKSLLDSVKAKTLRKLIQQTFRQFANLNREESILKFFEILSPVYRFDKECFKCALGSSWIISVELAIGPEEGISYLTDKGCNPTHLADFTQVQTIQYSNSEDKDRKGMLQLKIAGAPEPLTVTAPSLTIAENMADLIDGYCRLVNGTSQSFIIRPQKEGERALPSIPKLANSEKQGMRTHAVSVSETDDYAEIIDEEDTYTMPSTRDYEIQRERIELGRCIGEGQFGDVHQGIYMSPENPALAVAIKTCKNCTSDSVREKFLQEACHYTSLHWNWCRYISDPNVDAAQTPGMQSNNASV

SEQ ID NO: 36346 - protein, 63 aa, Artificial Sequence
  Synthetic polypeptide
PVLLKTVKVMKETVEVRETHISRSCLKKQDDYRKDVGLKRFFPKSLLDSVKAKTLRKLIQQTF

SEQ ID NO: 36347 - protein, 934 aa, Artificial Sequence
  Synthetic polypeptide
VHRYELRIRYLPKGFLNQFTEDKPTLNFFYQQVKSDYMLEIADQVDQEIALKLGCLEIRRSYWEMRGNALEKKSNYEVLEKDVGLKRFFPKSLLDSVKAKTLRKLIQQTFRQFANLNREESILKFFEILSPVYRFDKECFKCALGSSWIISVELAIGPEEGISYLTDKGCNPTHLADFTQVQTIQYSNSEDKDRKGMLQLKIAGAPEPLTVTAPSLTIAENMADLIDGYCRLVNGTSQSFIIRPQKEGERALPSIPKLANSEKQGMRTHAVSVSETDDYAEIIDEEDTYTMPSTRDYEIQRERIELGRCIGEGQFGDVHQGIYMSPENPALAVAIKTCKNCTSDSVREKFLQEALTMRQFDHPHIVKLIGVITENPVWIIMELCTLGELRSFLQVRKYSLDLASLILYAYQLSTALAYLESKRFVHRDIAARNVLVSSNDCVKLGDFGLSRYMEDSTYYKASKGKLPIKWMAPESINFRRFTSASDVWMFGVCMWEILMHGVKPFQGVKNNDVIGRIENGERLPMPPNCPPTLYSLMTKCWAYDPSRRPRFTELKAQLSTILEEEKAQQEERMRMESRRQATVSWDSGGSDEAPPKPSRPGYPSPRSSEGFYPSPQHMVQTNHYQVSGYPGSHGITAMAGSIYPGQASLLDQTDSWNHRPQEIAMWQPNVEDSTVLDLRGIGQVLPTHLMEERLIRQQQEMEEDQRWLEKEERFLKPDVRLSRGSIDREDGSLQGPIGNQHIYQPVGKPDPAAPPKKPPRPGAPGHLGSLASLSSPADSYNEGVKLQPQEISPPPTANLDRSNDKVYENVTGLVKAVIEMSSKIQPAPPEEYVPMVKEVGLALRTLLATVDETIPLLPASTHREIEMAQKLLNSDLGELINKMKLAQQYVMTSLQQEYKKQMLTAAHALAVDAKNLLDVIDQARLKMLGQTRPH

SEQ ID NO: 36348 - protein, 16 aa, Artificial Sequence
  Synthetic polypeptide
QIFFCHLQTSKFIDMN

SEQ ID NO: 36349 - protein, 888 aa, Artificial Sequence
  Synthetic polypeptide
VHRYELRIRYLPKGFLNQFTEDKPTLNFFYQQVKSDYMLEIADQVDQEIALKLGCLEIRRSYWEMRGNALEKKSNYEVLEKDVGLKRFFPKSLLDSVKAKTLRKLIQQTFRQFANLNREESILKFFEILSPVYRFDKECFKCALGSSWIISVELAIGPEEGISYLTDKGCNPTHLADFTQVQTIQYSNSEDKDRKGMLQLKIAGAPEPLTVTAPSLTIAENMADLIDGYCRLVNGTSQSFIIRPQKEGERALPSIPKLANSEKQGMRTHAVSVSETDDYAEIIDEEDTYTMPSTRDYEIQRERIELGRCIGEGQFGDVHQGIYMSPENPALAVAIKTCKNCTSDSVREKFLQEALTMRQFDHPHIVKLIGVITENPVWIIMELCTLGELRSFLQVRKYSLDLASLILYAYQLSTALAYLESKRFVHRDIAARNVLVSSNDCVKLGDFGLSRYMEDSTYYKASKGKLPIKWMAPESINFRRFTSASDVWMFGVCMWEILMHGVKPFQGVKNNDVIGRIENGERLPMPPNCPPTLYSLMTKCWAYDPSRRPRFTELKAQLSTILEEEKAQQEERMRMESRRQATVSWDSGGSDEAPPKPSRPGYPSPRSSEGFYPSPQHMVQTNHYQDSTVLDLRGIGQVLPTHLMEERLIRQQQEMEEDQRWLEKEERFLKPDVRLSRGSIDREDGSLQGPIGNQHIYQPVGKPDPAAPPKKPPRPGAPGHLGSLASLSSPADSYNEGVKLQPQEISPPPTANLDRSNDKVYENVTGLVKAVIEMSSKIQPAPPEEYVPMVKEVGLALRTLLATVDETIPLLPASTHREIEMAQKLLNSDLGELINKMKLAQQYVMTSLQQEYKKQMLTAAHALAVDAKNLLDVIDQARLKMLGQTRPH

SEQ ID NO: 36350 - protein, 947 aa, Artificial Sequence
  Synthetic polypeptide
VHRYELRIRYLPKGFLNQFTEDKPTLNFFYQQVKSDYMLEIADQVDQEIALKLGCLEIRRSYWEMRGNALEKKSNYEVLEKDVGLKRFFPKSLLDSVKAKTLRKLIQQTFRQFANLNREESILKFFEILSPVYRFDKECFKCALGSSWIISVELAIGPEEGISYLTDKGCNPTHLADFTQVQTIQYSNSEDKDRKGMLQLKIAGAPEPLTVTAPSLTIAENMADLIDGYCRLVNGTSQSFIIRPQKEGERALPSIPKLANSEKQGMRTHAVSVSETDDYAEIIDEEDTYTMPSTRDYEIQRERIELGRCIGEGQFGDVHQGIYMSPENPALAVAIKTCKNCTSDSVREKFLQEALTMRQFDHPHIVKLIGVITENPVWIIMELCTLGELRSFLQVRKYSLDLASLILYAYQLSTALAYLESKRFVHRDIAARNVLVSSNDCVKLGDFGLSRYMEDSTYYKASKGKLPIKWMAPESINFRRFTSASDVWMFGVCMWEILMHGVKPFQGVKNNDVIGRIENGERLPMPPNCPPTLYSLMTKCWAYDPSRRPRFTELKAQLSTILEEEKAQQEERMRMESRRQATVSWDSGGSDEAPPKPSRPGYPSPRSSEGFYPSPQHMVQTNHYQVSGYPGSHGITAMAGSIYPGQASLLDQTDSWNHRPQEIAMWQPNVEDSTVLDLRGIGQVLPTHLMEERLIRQQQEMEEDQRWLEKEERFLKPDVRLSRGSIDREDGSLQGPIGNQHIYQPVGKPGKEEKNWAERNPAAPPKKPPRPGAPGHLGSLASLSSPADSYNEGVKPNQLQPQEISPPPTANLDRSNDKVYENVTGLVKAVIEMSSKIQPAPPEEYVPMVKEVGLALRTLLATVDETIPLLPASTHREIEMAQKLLNSDLGELINKMKLAQQYVMTSLQQEYKKQMLTAAHALAVDAKNLLDVIDQARLKMLGQTRPH

SEQ ID NO: 36351 - protein, 947 aa, Artificial Sequence
  Synthetic polypeptide
VHRYELRIRYLPKGFLNQFTEDKPTLNFFYQQVKSDYMLEIADQVDQEIALKLGCLEIRRSYWEMRGNALEKKSNYEVLEKDVGLKRFFPKSLLDSVKAKTLRKLIQQTFRQFANLNREESILKFFEILSPVYRFDKECFKCALGSSWIISVELAIGPEEGISYLTDKGCNPTHLADFTQVQTIQYSNSEDKDRKGMLQLKIAGAPEPLTVTAPSLTIAENMADLIDGYCRLVNGTSQSFIIRPQKEGERALPSIPKLANSEKQGMRTHAVSVSETDDYAEIIDEEDTYTMPSTRDYEIQRERIELGRCIGEGQFGDVHQGIYMSPENPALAVAIKTCKNCTSDSVREKFLQEALTMRQFDHPHIVKLIGVITENPVWIIMELCTLGELRSFLQVRKYSLDLASLILYAYQLSTALAYLESKRFVHRDIAARNVLVSSNDCVKLGDFGLSRYMEDSTYYKASKGKLPIKWMAPESINFRRFTSASDVWMFGVCMWEILMHGVKPFQGVKNNDVIGRIENGERLPMPPNCPPTLYSLMTKCWAYDPSRRPRFTELKAQLSTILEEEKAQQEERMRMESRRQATVSWDSGGSDEAPPKPSRPGYPSPRSSEGFYPSPQHMVQTNHYQVSGYPGSHGITAMAGSIYPGQASLLDQTDSWNHRPQEIAMWQPNVEDSTVLDLRGIGQVLPTHLMEERLIRQQQEMEEDQRWLEKEERFLKPDVRLSRGSIDREDGSLQGPIGNQHIYQPVGKPGKEEKNWAERNPAAPPKKPPRPGAPGHLGSLASLSSPADSYNEGVKPWRLQPQEISPPPTANLDRSNDKVYENVTGLVKAVIEMSSKIQPAPPEEYVPMVKEVGLALRTLLATVDETIPLLPASTHREIEMAQKLLNSDLGELINKMKLAQQYVMTSLQQEYKKQMLTAAHALAVDAKNLLDVIDQARLKMLGQTRPH

SEQ ID NO: 36352 - protein, 4 aa, Artificial Sequence
  Synthetic polypeptide
VHRY

SEQ ID NO: 36353 - protein, 15 aa, Artificial Sequence
  Synthetic polypeptide
QIFFCHLQTSKFIDM

SEQ ID NO: 36354 - protein, 42 aa, Artificial Sequence
  Synthetic polypeptide
VHRYELRIRYLPKGFLNQFTEDKPTLNFFYQQVKSDYMLEIA

SEQ ID NO: 36355 - protein, 38 aa, Artificial Sequence
  Synthetic polypeptide
VHRYELRIRYLPKGFLNQFTEDKPTLNFFYQQVKSDYM

SEQ ID NO: 36356 - protein, 1069 aa, Artificial Sequence
  Synthetic polypeptide
LDPLLAKGTPEKPKKQNDWPEWKGGQTRLVIPSPSCVFNMKSLQIVLPARADPESPILDLDLHLPLLCFRPEKVLQILTCILTEQRIVFFSSDWALLTLVTECFMAYLYPLQWQHPFVPILSDQMLDFVMAPTSFLMGCHLDHFEEVSKEADGLVLINIDHGSITYSKSTDDNVDIPDVPLLAAQTFIQRVQSLQLHHELHAAHLLSSTDLKEGRAHRRSWQQKLNCQIQQTTLQLLVSIFRDVKNHLNYEHRVFNSEEFLKTRAPGDHQFYKQVLDTYMFHSFLKARLNRRMDAFAQMDLDTQSEEDRINGMLLSPRRPTVEKRASRKSSHLHVTHRRMVVSMPNLQDIAMPELAPRNSSLRLTDTAGCRGSSAVLNVTPKSPYTFKIPEIHFPLESKCVQAYHAHFVSMLSEAMCFLAPDNSLLLARYLYLRGLVYLMQGQLLNALLDFQNLYKTDIRIFPTDLVKRTVESMSAPEWEGAEQAPELMRLISEILDKPHEASKLDDHVKKFKLPKKHMQLGDFMKRVQESGIVKDASIIHRLFEALTVGQEKQIDPETFKDFYNCWKETEAEAQEVSLPWLVMEHLDKNECVCKLSSSVKTNLGVGKIAMTQKRLFLLTEGRPGYLEISTFRNIEEVRRTTTTFLLRRIPTLKIRVASKKEVFEANLKTECDLWHLMVKEMWAGKKLADDHKDPHYVQQALTNVLLMDAVVGTLQSPGAIYAASKLSYFDKMSNEMPMTLPETTLETLKHKINPSAGEAFPQAVDVLLYTPGHLDPAEKVEDAHPKLWCALSEGKVTVFNASSWTIHQHSFKVGTAKVNCMVMADQNQVWVGSEDSVIYIINVHSMSCNKQLTAHCSSVTDLIVQDGQEAPSNVYSCSMDGMVLVWNVSTLQVTSRFQLPRGGLTSIRLHGGRLWCCTGNSIMVMKMNGSLHQELKIEENFKDTSTSFLAFQLLPEEEQLWAACAGRSEVYIWSLKDLAQPPQRVPLEDCSEINCMIRVKKQVWVGSRGLGQGTPKGKIYVIDAERKTVEKELVAHMDTVRTLCSAEDRYVLSGSGREEGKVAIWKGE

SEQ ID NO: 36357 - protein, 51 aa, Artificial Sequence
  Synthetic polypeptide
HPNPPASPQLTDWTPFWPRGPQRNPKNRMTGQNGREVRHAWLYPLPLAYLT

SEQ ID NO: 36358 - protein, 20 aa, Artificial Sequence
  Synthetic polypeptide
LARMEGRSDTPGYTLSLLRI

SEQ ID NO: 36359 - protein, 1017 aa, Artificial Sequence
  Synthetic polypeptide
LDPLLAKGTPEKPKKQNDWPEWKGGQTRLVIPSPSCVFNMKSLQIVLPARADPESPILDLDLHLPLLCFRPEKVLQILTCILTEQRIVFFSSDWALLTLVTECFMAYLYPLQWQHPFVPILSDQMLDFVMAPTSFLMGCHLDHFEEVSKEADGLVLINIDHGSITYSKSTDDNVDIPDVPLLAAQTFIQRDVKNHLNYEHRVFNSEEFLKTRAPGDHQFYKQVLDTYMFHSFLKARLNRRMDAFAQMDLDTQSEEDRINGMLLSPRRPTVEKRASRKSSHLHVTHRRMVVSMPNLQDIAMPELAPRNSSLRLTDTAGCRGSSAVLNVTPKSPYTFKIPEIHFPLESKCVQAYHAHFVSMLSEAMCFLAPDNSLLLARYLYLRGLVYLMQGQLLNALLDFQNLYKTDIRIFPTDLVKRTVESMSAPEWEGAEQAPELMRLISEILDKPHEASKLDDHVKKFKLPKKHMQLGDFMKRVQESGIVKDASIIHRLFEALTVGQEKQIDPETFKDFYNCWKETEAEAQEVSLPWLVMEHLDKNECVCKLSSSVKTNLGVGKIAMTQKRLFLLTEGRPGYLEISTFRNIEEVRRTTTTFLLRRIPTLKIRVASKKEVFEANLKTECDLWHLMVKEMWAGKKLADDHKDPHYVQQALTNVLLMDAVVGTLQSPGAIYAASKLSYFDKMSNEMPMTLPETTLETLKHKINPSAGEAFPQAVDVLLYTPGHLDPAEKVEDAHPKLWCALSEGKVTVFNASSWTIHQHSFKVGTAKVNCMVMADQNQVWVGSEDSVIYIINVHSMSCNKQLTAHCSSVTDLIVQDGQEAPSNVYSCSMDGMVLVWNVSTLQVTSRFQLPRGGLTSIRLHGGRLWCCTGNSIMVMKMNGSLHQELKIEENFKDTSTSFLAFQLLPEEEQLWAACAGRSEVYIWSLKDLAQPPQRVPLEDCSEINCMIRVKKQVWVGSRGLGQGTPKGKIYVIDAERKTVEKELVAHMDTVRTLCSAEDRYVLSGSGREEGKVAIWKGE

SEQ ID NO: 36360 - protein, 149 aa, Artificial Sequence
  Synthetic polypeptide
LDPLLAKGTPEKPKKQNDWPEWKGGQTRLVIPSPSCVFNMKSLQIVLPARADPESPILDLDLHLPLLCFRPEKVLQILTCILTEQRIVFFSSDWALLTLVTECFMAYLYPLQWQHPFVPILSDQMLDFVMAPTSFLMGCHLDHFEEVSK

SEQ ID NO: 36361 - protein, 61 aa, Artificial Sequence
  Synthetic polypeptide
LDPLLAKGTPEKPKKQNDWPEWKGGQTRLVIPSPSCVFNMKSLQIVLPARADPESPILDLD

SEQ ID NO: 36362 - protein, 11 aa, Artificial Sequence
  Synthetic polypeptide
MGSRRFSSDKY

SEQ ID NO: 36363 - protein, 921 aa, Artificial Sequence
  Synthetic polypeptide
WEADGLVLINIDHGSITYSKSTDDNVDIPDVPLLAAQTFIQRVQSLQLHHELHAAHLLSSTDLKEGRAHRRSWQQKLNCQIQQTTLQLLVSIFRDVKNHLNYEHRVFNSEEFLKTRAPGDHQFYKQVLDTYMFHSFLKARLNRRMDAFAQMDLDTQSEEDRINGMLLSPRRPTVEKRASRKSSHLHVTHRRMVVSMPNLQDIAMPELAPRNSSLRLTDTAGCRGSSAVLNVTPKSPYTFKIPEIHFPLESKCVQAYHAHFVSMLSEAMCFLAPDNSLLLARYLYLRGLVYLMQGQLLNALLDFQNLYKTDIRIFPTDLVKRTVESMSAPEWEGAEQAPELMRLISEILDKPHEASKLDDHVKKFKLPKKHMQLGDFMKRVQESGIVKDASIIHRLFEALTVGQEKQIDPETFKDFYNCWKETEAEAQEVSLPWLVMEHLDKNECVCKLSSSVKTNLGVGKIAMTQKRLFLLTEGRPGYLEISTFRNIEEVRRTTTTFLLRRIPTLKIRVASKKEVFEANLKTECDLWHLMVKEMWAGKKLADDHKDPHYVQQALTNVLLMDAVVGTLQSPGAIYAASKLSYFDKMSNEMPMTLPETTLETLKHKINPSAGEAFPQAVDVLLYTPGHLDPAEKVEDAHPKLWCALSEGKVTVFNASSWTIHQHSFKVGTAKVNCMVMADQNQVWVGSEDSVIYIINVHSMSCNKQLTAHCSSVTDLIVQDGQEAPSNVYSCSMDGMVLVWNVSTLQVTSRFQLPRGGLTSIRLHGGRLWCCTGNSIMVMKMNGSLHQELKIEENFKDTSTSFLAFQLLPEEEQLWAACAGRSEVYIWSLKDLAQPPQRVPLEDCSEINCMIRVKKQVWVGSRGLGQGTPKGKIYVIDAERKTVEKELVAHMDTVRTLCSAEDRYVLSGSGREEGKVAIWKGE

SEQ ID NO: 36364 - protein, 869 aa, Artificial Sequence
  Synthetic polypeptide
WEADGLVLINIDHGSITYSKSTDDNVDIPDVPLLAAQTFIQRDVKNHLNYEHRVFNSEEFLKTRAPGDHQFYKQVLDTYMFHSFLKARLNRRMDAFAQMDLDTQSEEDRINGMLLSPRRPTVEKRASRKSSHLHVTHRRMVVSMPNLQDIAMPELAPRNSSLRLTDTAGCRGSSAVLNVTPKSPYTFKIPEIHFPLESKCVQAYHAHFVSMLSEAMCFLAPDNSLLLARYLYLRGLVYLMQGQLLNALLDFQNLYKTDIRIFPTDLVKRTVESMSAPEWEGAEQAPELMRLISEILDKPHEASKLDDHVKKFKLPKKHMQLGDFMKRVQESGIVKDASIIHRLFEALTVGQEKQIDPETFKDFYNCWKETEAEAQEVSLPWLVMEHLDKNECVCKLSSSVKTNLGVGKIAMTQKRLFLLTEGRPGYLEISTFRNIEEVRRTTTTFLLRRIPTLKIRVASKKEVFEANLKTECDLWHLMVKEMWAGKKLADDHKDPHYVQQALTNVLLMDAVVGTLQSPGAIYAASKLSYFDKMSNEMPMTLPETTLETLKHKINPSAGEAFPQAVDVLLYTPGHLDPAEKVEDAHPKLWCALSEGKVTVFNASSWTIHQHSFKVGTAKVNCMVMADQNQVWVGSEDSVIYIINVHSMSCNKQLTAHCSSVTDLIVQDGQEAPSNVYSCSMDGMVLVWNVSTLQVTSRFQLPRGGLTSIRLHGGRLWCCTGNSIMVMKMNGSLHQELKIEENFKDTSTSFLAFQLLPEEEQLWAACAGRSEVYIWSLKDLAQPPQRVPLEDCSEINCMIRVKKQVWVGSRGLGQGTPKGKIYVIDAERKTVEKELVAHMDTVRTLCSAEDRYVLSGSGREEGKVAIWKGE

SEQ ID NO: 36365 - protein, 30 aa, Artificial Sequence
  Synthetic polypeptide
KMGKDHERGTHRKGTVHQVMKRTLTTSSRR

SEQ ID NO: 36366 - protein, 38 aa, Artificial Sequence
  Synthetic polypeptide
RGPSLRPAGADQRLADGRRRGHTAVTRRHLRCLQVILL

SEQ ID NO: 36367 - protein, 391 aa, Artificial Sequence
  Synthetic polypeptide
TRNSQKGNSSPGYEEDPHYVQQALTNVLLMDAVVGTLQSPGAIYAASKLSYFDKMSNEMPMTLPETTLETLKHKINPSAGEAFPQAVDVLLYTPGHLDPAEKVEDAHPKLWCALSEGKVTVFNASSWTIHQHSFKVGTAKVNCMVMADQNQVWVGSEDSVIYIINVHSMSCNKQLTAHCSSVTDLIVQDGQEAPSNVYSCSMDGMVLVWNVSTLQVTSRFQLPRGGLTSIRLHGGRLWCCTGNSIMVMKMNGSLHQELKIEENFKDTSTSFLAFQLLPEEEQLWAACAGRSEVYIWSLKDLAQPPQRVPLEDCSEINCMIRVKKQVWVGSRGLGQGTPKGKIYVIDAERKTVEKELVAHMDTVRTLCSAEDRYVLSGSGREEGKVAIWKGE

SEQ ID NO: 36368 - protein, 96 aa, Artificial Sequence
  Synthetic polypeptide
QNKFQKRRPETSRCCLHSAPLSHSPDGEGGSLARGPQEGEDSAVQEVLEGSRAPGSYVPALPYIFFHAAAETRMPTNSLRTKGSSGATYVFASYVP

SEQ ID NO: 36369 - protein, 78 aa, Artificial Sequence
  Synthetic polypeptide
KTSSKRGDQKPRGAVFTRLLSHTALMEKVGPWHVGPRREKTPLYRRFWKEAVRLALTSQLFPTSSFTLQRKPECLLIP

SEQ ID NO: 36370 - protein, 24 aa, Artificial Sequence
  Synthetic polypeptide
KQVPKEETRNLEVLSSLGSSLTQP

SEQ ID NO: 36371 - protein, 64 aa, Artificial Sequence
  Synthetic polypeptide
RERDLDLRSATHCEAWEGLFTFLSFSVLAKNTAPETQDQVLLPISWSHCPACHHHHHRHLCPKV

SEQ ID NO: 36372 - protein, 40 aa, Artificial Sequence
  Synthetic polypeptide
ASVSWPRTQLQRHKIKCCFLSAGVTALLVIIIIIATSVRK

SEQ ID NO: 36373 - protein, 50 aa, Artificial Sequence
  Synthetic polypeptide
SLGRSLYLFELQCPGQEHSSRDTRSSAASYQLESLPCLSSSSSSPPLSES

SEQ ID NO: 36374 - protein, 214 aa, Artificial Sequence
  Synthetic polypeptide
HLLPLSTSCSSPLSRPAQPREVPRLPFAFCHDWKLPEASPEADAAMLPVQPVNLQEETHAAVPRLCPQGGVSPRRPVPAAPPYPETPQSAGSHVPRPRAQRRNRQEQGLGQPRAQEAFSIPAPHQADAQLGCPHCGCRGCTSPLPRGVSLSLILEGFLLLLLLLIPSRFLGPRGTISPGGCLSSSVLQQALQAAFLHLPAVLAEPRSPAQGPGP

SEQ ID NO: 36375 - protein, 180 aa, Artificial Sequence
  Synthetic polypeptide
TCKKKHTLLCPDFARRGACPRGAQCQLLHRTQKRHSRRAATSPAPGPSDATARSRVSASHGPRKPSASQRPTRQTPSSAALTAAAVAAPPHCPGGSASPSSSKASSSSSSSSSPPASLDHEAPSLQEAALAAACSNRLCKLPSFISLQSSPSPGAQPRVRAPRAPLTKDSGKPLHIKPRL

SEQ ID NO: 36376 - protein, 145 aa, Artificial Sequence
  Synthetic polypeptide
GLSRSRCCHASCTACELARRNTRCCAPTLPAGGRVPAAPSASCSTVPRNATVGGQPRPPPQGPATQPPGAGSRPATGPGSLQHPSAPPGRRPARLPSLRLPWLHLPTAQGGQPLPHPRRLPPPPPPPHPLPLPWTTRHHLSRRLP

SEQ ID NO: 36377 - protein, 190 aa, Artificial Sequence
  Synthetic polypeptide
GQEIETILANTCKKKHTLLCPDFARRGACPRGAQCQLLHRTQKRHSRRAATSPAPGPSDATARSRVSASHGPRKPSASQRPTRQTPSSAALTAAAVAAPPHCPGGSASPSSSKASSSSSSSSSPPASLDHEAPSLQEAALAAACSNRLCKLPSFISLQSSPSPGAQPRVRAPRAPLTKDSGKPLHIKPRL

SEQ ID NO: 36378 - protein, 152 aa, Artificial Sequence
  Synthetic polypeptide
SQHFGRPRQVDHEVKRSRPSWLTRARRNTRCCAPTLPAGGRVPAAPSASCSTVPRNATVGGQPRPPPQGPATQPPGAGSRPATGPGSLQHPSAPPGRRPARLPSLRLPWLHLPTAQGGQPLPHPRRLPPPPPPPHPLPLPWTTRHHLSRRLP

SEQ ID NO: 36379 - protein, 162 aa, Artificial Sequence
  Synthetic polypeptide
HVQEETHAAVPRLCPQGGVSPRRPVPAAPPYPETPQSAGSHVPRPRAQRRNRQEQGLGQPRAQEAFSIPAPHQADAQLGCPHCGCRGCTSPLPRGVSLSLILEGFLLLLLLLIPSRFLGPRGTISPGGCLSSSVLQQALQAAFLHLPAVLAEPRSPAQGPGP

SEQ ID NO: 36380 - protein, 28 aa, Artificial Sequence
  Synthetic polypeptide
SQLLGRLRQENRLNPGGGRCAEKWLQTS

SEQ ID NO: 36381 - protein, 17 aa, Artificial Sequence
  Synthetic polypeptide
TQEADVAQKNGYKLPST

SEQ ID NO: 36382 - protein, 335 aa, Artificial Sequence
  Synthetic polypeptide
DQEFKTSLANMVKPCLLKIQKISQAQWCALVVPVTREAEAGKSLEPRRRTLRRKMATNFLAHEKIWFDKFKYDDAERRFYEQMNGPVAGASRQENGASVILRDIARARENIQKSLAGSSGPGASSGTSGDHGELVVRIASLEVENQSLRGVVQELQQAISKLEARLNVLEKSSPGHRATAPQTQHVSPMRQVEPPAKKPATPAEDDEDDDIDLFGSDNEEEDKEAAQLREERLRQYAEKKAKKPALVAKSSILLDVKPWDDETDMAQLEACVRSIQLDGLVWGASKLVPVGYGIRKLQIQCVVEDDKVGTDLLEEEITKFEEHVQSVDIAAFNKI

SEQ ID NO: 36383 - protein, 184 aa, Artificial Sequence
  Synthetic polypeptide
DQEFKTSLANMVKPCLLKIQKISQAQWCALVVPVTREAEAGKSLEPRRRTLRRKMATNFLAHEKIWFDKFKYDDAERRFYEQMNGPVAGASRQENGASVILRDIARARENIQKSLAGSSGPGASSGTSGDHGELVVRIASLEVENQSLRGVVQELQQAISKLEARLNVLEKSSPGHRATAPQTQ

SEQ ID NO: 36384 - protein, 175 aa, Artificial Sequence
  Synthetic polypeptide
DQEFKTSLANMVKPCLLKIQKISQAQWCALVVPVTREAEAGKSLEPRRRTLRRKMATNFLAHEKIWFDKFKYDDAERRFYEQMNGPVAGASRQENGASVILRDIARARENIQKSLAGSSGPGASSGTSGDHGELVVRIASLEVENQSLRGVVQELQQAISKLEARLNVLEKSSPG

SEQ ID NO: 36385 - protein, 50 aa, Artificial Sequence
  Synthetic polypeptide
VEGRVLRWSLRFLAPNVHTPSSSYSFRHSSGTVMKRLADVGRSQVSEILM

SEQ ID NO: 36386 - protein, 14 aa, Artificial Sequence
  Synthetic polypeptide
RDLQMSGGPRSVRF

SEQ ID NO: 36387 - protein, 22 aa, Artificial Sequence
  Synthetic polypeptide
PCVEIPAGLAWMCDLQNCRILM

SEQ ID NO: 36388 - protein, 28 aa, Artificial Sequence
  Synthetic polypeptide
HTVAALRDPAWRSQLAWPGCVTCRTVGF

SEQ ID NO: 36389 - protein, 7 aa, Artificial Sequence
  Synthetic polypeptide
SFFKILM

SEQ ID NO: 36390 - protein, 7 aa, Artificial Sequence
  Synthetic polypeptide
VNLSLRF

SEQ ID NO: 36391 - protein, 83 aa, Artificial Sequence
  Synthetic polypeptide
GAVSGGGGRAVSPLGPGRARSPKLGPSACHLGALKQLIWSGPWSQFPTPSEAPPSTSYSLHQEGLEPSACTSSTLRKLSGGQS

SEQ ID NO: 36392 - protein, 12 aa, Artificial Sequence
  Synthetic polypeptide
APPLATWVPLSS

SEQ ID NO: 36393 - protein, 321 aa, Artificial Sequence
  Synthetic polypeptide
AVNLEWPLESVSYTIRGPTQHELQPPPGGPGTLSLHFLNPQEAQRWAVLVRGATVEGQNGSKSNSPPALGPEACPVSLPSPPEASTLKGPPPEADLPRSPGNLTEREELAGSLARAIAGGDEKGAAQVAAVLAQHRVALSVQLQEACFPPGPIRLQVTLEDAASAASAASSAHVALQVHPHCTVAALQEQVFSELGFPPAVQRWVIGRCLCVPERSLASYGVRQDGDPAFLYLLSAPREAPATGPSPQHPQKMDGELGRLFPPSLGLPPGPQPAASSLPSPLQPSWSCPSCTFINAPDRPGCEMCSTQRPCTWDPLAAAST

SEQ ID NO: 36394 - protein, 260 aa, Artificial Sequence
  Synthetic polypeptide
AVNLEWPLESVSYTIRGPTQHELQPPPGGPGTLSLHFLNPQEAQRWAVLVRGATVEGQNGSKSNSPPALGPEACPVSLPSPPEASTLKGPPPEADLPRSPGNLTEREELAGSLARAIAGGDEKGAAQVAAVLAQHRVALSVQLQEACFPPGPIRLQVTLEDAASAASAASSAHVALQVHPHCTVAALQEQVFSELGFPPAVQRWVIGRCLCVPERSLASYGVRQDGDPAFLYLLSAPREAPAQLVLSFLHLHQCPRPPWL

SEQ ID NO: 36395 - protein, 10 aa, Artificial Sequence
  Synthetic polypeptide
ATDRIPGFQA

SEQ ID NO: 36396 - protein, 219 aa, Artificial Sequence
  Synthetic polypeptide
AWKVKVGVSYDCATAVQPRQQTGFLVFKPELISRLEQGEEPWVLDLQGAEGTEAPRTSKTDSTIRTENEQACEDMDILKSESYGTVVRISPQDFPQNPGFGDVSDSEVWLDSHLGSPGLKVTGFTFQNNCLNEETVVPKTFTKDAPQGCKELGSSGLDCQPLESQGESAEGMSQRCEECGKGIRATSDIALHWEINTQKISRCQECQKKLSDCLQGKHT

SEQ ID NO: 36397 - protein, 53 aa, Artificial Sequence
  Synthetic polypeptide
SRTWCCMPVVPATGESEEGGLPEPGRSRLESAMIVPLQSSLGNRQDSWFSSLS

SEQ ID NO: 36398 - protein, 664 aa, Artificial Sequence
  Synthetic polypeptide
AWKVKVGVSYDCATAVQPRQQTGFLVFKPELISRLEQGEEPWVLDLQGAEGTEAPRTSKTDSTIRTENEQACEDMDILKSESYGTVVRISPQDFPQNPGFGDVSDSEVWLDSHLGSPGLKVTGFTFQNNCLNEETVVPKTFTKDAPQGCKELGSSGLDCQPLESQGESAEGMSQRCEECGKGIRATSDIALHWEINTQKISRCQECQKKLSDCLQGKHTNNCHGEKPYECAECGKVFRLCSQLNQHQRIHTGEKPFKCTECGKAFRLSSKLIQHQRIHTGEKPYRCEECGKAFGQSSSLIHHQRIHTGERPYGCRECGKAFSQQSQLVRHQRTHTGERPYPCKECGKAFSQSSTLAQHQRMHTGEKAQILKASDSPSLVAHQRIHAVEKPFKCDECGKAFRWISRLSQHQLIHTGEKPYKCNKCTKAFGCSSRLIRHQRTHTGEKPFKCDECGKGFVQGSHLIQHQRIHTGEKPYVCNDCGKAFSQSSSLIYHQRIHKGEKPYECLQCGKAFSMSTQLTIHQRVHTGERPYKCNECGKAFSQNSTLFQHQIIHAGVKPYECSECGKAFSRSSYLIEHQRIHTRAQWFYEYGNALEGSTFVSRKKVNTIKKLHQCEDCEKIFRWRSHLIIHQRIHTGEKPYKCNDCGKAFNRSSRLTQHQKIHMG

SEQ ID NO: 36399 - protein, 126 aa, Artificial Sequence
  Synthetic polypeptide
AWKVKVGVSYDCATAVQPRQQTGFLVFKPELISRLEQGEEPWVLDLQGAEGTEAPRTSKTGFLGRPTMGQEPRHPHAPPATPVPGLPKHCSQRLTLPPPGLSSSPLGHFLVHDQDRRRGTSAIWMV

SEQ ID NO: 36400 - protein, 91 aa, Artificial Sequence
  Synthetic polypeptide
AWKVKVGVSYDCATAVQPRQQTGFLVFKPELISRLEQGEEPWVLDLQGAEGTEAPRTSKTDSTIRTENEQACEDMDILKSESYGTVVRISP

SEQ ID NO: 36401 - protein, 112 aa, Artificial Sequence
  Synthetic polypeptide
AWKVKVGVSYDCATAVQPRQQTGFLVFKPELISRLEQGEEPWVLDLQGAEGTEAPRTSKTAVEAGNLKPGGQQAGPCPPVKALGKDPVLPLRAAGGFLAVLGFLGLWMRPSL

SEQ ID NO: 36402 - protein, 25 aa, Artificial Sequence
  Synthetic polypeptide
AELVPLHSSLGDRNVKPRERVKIQT

SEQ ID NO: 36403 - protein, 36 aa, Artificial Sequence
  Synthetic polypeptide
SQPLGRLRQENHFNPGGRGCSEPSSSHCTPAWATGM

SEQ ID NO: 36404 - protein, 467 aa, Artificial Sequence
  Synthetic polypeptide
GRRITSTREAEVAVSRARPIALQPGRQECETKGESQNTDLSPKPLISEQTVILGKTPLGRIDQENNETKQSFCLSPNSVDHREVQVLSQSMPLTPHQAVPSGERPYMCVECGKCFGRSSHLLQHQRIHTGEKPYVCSVCGKAFSQSSVLSKHRRIHTGEKPYECNECGKAFRVSSDLAQHHKIHTGEKPHECLECRKAFTQLSHLIQHQRIHTGERPYVCPLCGKAFNHSTVLRSHQRVHTGEKPHRCNECGKTFSVKRTLLQHQRIHTGEKPYTCSECGKAFSDRSVLIQHHNVHTGEKPYECSECGKTFSHRSTLMNHERIHTEEKPYACYECGKAFVQHSHLIQHQRVHTGEKPYVCGECGHAFSARRSLIQHERIHTGEKPFQCTECGKAFSLKATLIVHLRTHTGEKPYECNSCGKAFSQYSVLIQHQRIHTGEKPYECGECGRAFNQHGHLIQHQKVHRKL

SEQ ID NO: 36405 - protein, 104 aa, Artificial Sequence
  Synthetic polypeptide
GRRITSTREAEVAVSRARPIALQPGRQECETKGESQNTDLSPKPLISEQTVILGKTPLGRIDQENNETKQSFCLSPNSVDHREVQVLSQSMPLTPHQAVPSGER

SEQ ID NO: 36406 - protein, 88 aa, Artificial Sequence
  Synthetic polypeptide
GRRITSTREAEVAVSRARPIALQPGRQECETKGESQNTDLSPKPLISEQTVILGKTPLGRIDQENNETKQSFCLSPNSVDHREVQVLS

SEQ ID NO: 36407 - protein, 53 aa, Artificial Sequence
  Synthetic polypeptide
GRRITSTREAEVAVSRARPIALQPGRQECETKGESQNTDLSPKPLISEQTVIL

SEQ ID NO: 36408 - protein, 4 aa, Artificial Sequence
  Synthetic polypeptide
LHRL

SEQ ID NO: 36409 - protein, 635 aa, Artificial Sequence
  Synthetic polypeptide
TGTQSHTKIKTSSKSNYIDCDTRTEDKEFLHKEDIHEDLESQAEISENYAGDVSQVPELGDLCDDVSERDWGVPEGRRLPQSLSQEGDFTPAAMGLLRGPLGEKDLDCNGFDSRFSLSPNLMACQEIPTEERPHPYDMGGQSFQHSVDLTGHEGVPTAESPLICNECGKTFQGNPDLIQRQIVHTGEASFMCDDCGKTFSQNSVLKNRHRSHMSEKAYQCSECGKAFRGHSDFSRHQSHHSSERPYMCNECGKAFSQNSSLKKHQKSHMSEKPYECNECGKAFRRSSNLIQHQRIHSGEKPYVCSECGKAFRRSSNLIKHHRTHTGEKPFECGECGKAFSQSAHLRKHQRVHTGEKPYECNDCGKPFSRVSNLIKHHRVHTGEKPYKCSDCGKAFSQSSSLIQHRRIHTGEKPHVCNVCGKAFSYSSVLRKHQIIHTGEKPYRCSVCGKAFSHSSALIQHQGVHTGDKPYACHECGKTFGRSSNLILHQRVHTGEKPYECTECGKTFSQSSTLIQHQRIHNGLKPHECNQCGKAFNRSSNLIHHQKVHTGEKPYTCVECGKGFSQSSHLIQHQIIHTGERPYKCSECGKAFSQRSVLIQHQRIHTGVKPYDCAACGKAFSQRSKLIKHQLIHTRE

SEQ ID NO: 36410 - protein, 174 aa, Artificial Sequence
  Synthetic polypeptide
TGTQSHTKIKTSSKSNYIDCDTRTEDKEFLHKEDIHEDLESQAEISENYAGDVSQVPELGDLCDDVSERDWGVPEGRRLPQSLSQEGDFTPAAMGLLRGPLGEKDLDCNGFDSRFSLSPNLMACQEIPTEERPHPYDMGGQSFQHSVDLTGHEGVPTAESPLICNECGKTFQGN

SEQ ID NO: 36411 - protein, 77 aa, Artificial Sequence
  Synthetic polypeptide
TGTQSHTKIKTSSKSNYIDCDTRTEDKEFLHKEDIHEDLESQAEISENYAGDVSQVPELGDLCDDVSERDWGVPEGR

SEQ ID NO: 36412 - protein, 370 aa, Artificial Sequence
  Synthetic polypeptide
NCNFQFGEKAWWEVNWSRGQISPCCSQDSECVLARSVCLKVCSTSLFTIFLLLWLCEDLPPSSSASCMINLLAEKVEQLMEWSSRRSIFRMNGDKFRKFIKAPPRNYSMIVMFTALQPQRQCSVCRQANEEYQILANSWRYSSAFCNKLFFSMVDYDEGTDVFQQLNMNSAPTFMHFPPKGRPKRADTFDLQRIGFAAEQLAKWIADRTDVHIRVFRPPNYSGTIALALLVSLVGGLLYLRRNNLEFIYNKTGWAMVSLCIVFAMTSGQMWNHIRGPPYAHKNPHNGQVSYIHGSSQAQFVAESHIILVLNAAITMGMVLLNEAATSKGDVGKRRIICLVGLGLVVFFFSFLLSIFRSKYHGYPYSFLIK

SEQ ID NO: 36413 - protein, 16 aa, Artificial Sequence
  Synthetic polypeptide
RSASFLFGFMHDQSFS

SEQ ID NO: 36414 - protein, 299 aa, Artificial Sequence
  Synthetic polypeptide
NCNFQFGEKAWWEVNWSRGQISPCCSQDSECVLARSVCLKVCSTSLFTIFLLLWLCEDLPPSSSASCMINLLAEKVEQLMEWSSRRSIFRMNGDKFRKFIKAPPRNYSMIVMFTALQPQRQCSVCRQANEEYQILANSWRYSSAFCNKLFFSMVDYDEGTDVFQQLNMNSAPTFMHFPPKGRPKRADTFDLQRIGFAAEQLAKWIADRTDVHIRVFRPPNYSGTIALALLVSLVGGLLYLRRNNLEFIYNKTGWAMVSLCIVFAMTSGQMWNHIRGPPYAHKNPHNGQVMPLSPWGWFF

SEQ ID NO: 36415 - protein, 337 aa, Artificial Sequence
  Synthetic polypeptide
NCNFQFGEKAWWEVNWSRGQISPCCSQDSECVLARSVCLKVCSTSLFTIFLLLWLCEDLPPSSSASCMINLLAEKVEQLMEWSSRRSIFRMNGDKFRKFIKAPPRNYSMIVMFTALQPQRQCSVCRQANEEYQILANSWRYSSAFCNKLFFSMVDYDEGTDVFQQLNMNSAPTFMHFPPKGRPKRADTFDLQRIGFAAEQLAKWIADRTDVHIRVFRPPNYSGTIALALLVSLVGGLLYLRRNNLEFIYNKTGWAMVSLCIVFAMTSGQMWNHIRGPPYAHKNPHNGQVSYIHGSSQAQFVAESHIILVLNAAITMGMVLLNEAATSKGDVGKRRTF

SEQ ID NO: 36416 - protein, 312 aa, Artificial Sequence
  Synthetic polypeptide
NCNFQFGEKAWWEVNWSRGQISPCCSQDSECVLARSVCLKVCSTSLFTIFLLLWLCEDLPPSSSASCMINLLAEKVEQLMEWSSRRSIFRMNGDKFRKFIKAPPRNYSMIVMFTALQPQRQCSVCRQANEEYQILANSWRYSSAFCNKLFFSMVDYDEGTDVFQQLNMNSAPTFMHFPPKGRPKRADTFDLQRIGFAAEQLAKWIADRTDVHIRVFRPPNYSGTIALALLVSLVGGLLYLRRNNLEFIYNKTGWAMVSLCIVFAMTSGQMWNHIRGPPYAHKNPHNGQVSYIHGSSQAQFVAESHIILVLTS

SEQ ID NO: 36417 - protein, 371 aa, Artificial Sequence
  Synthetic polypeptide
NCNFQFGEKAWWEVNWSRGQISPCCSQDSECVLARSVCLKVCSTSLFTIFLLLWLCEDLPPSSSASCMINLLAEKVEQLMEWSSRRSIFRMNGDKFRKFIKAPPRNYSMIVMFTALQPQRQCSVCRQANEEYQILANSWRYSSAFCNKLFFSMVDYDEGTDVFQQLNMNSAPTFMHFPPKGRPKRADTFDLQRIGFAAEQLAKWIADRTDVHIRVFRPPNYSGTIALALLVSLVGGLLYLRRNNLEFIYNKTGWAMVSLCIVFAMTSGQMWNHIRGPPYAHKNPHNGQVSYIHGSSQAQFVAESHIILVLNAAITMGMVLLNEAATSKGDVGKRRIICLVGLGLVVFFFSFLLSIFRSKYHGYPYSDLDFE

SEQ ID NO: 36418 - protein, 128 aa, Artificial Sequence
  Synthetic polypeptide
NCNFQFGEKAWWEVNWSRGQISPCCSQDSECVLARSVCLKVCSTSLFTIFLLLWLCEDLPPSSSASCMIVSFLRPPQPCFLHSLQKCKLMKNIKYWRTPGAIHLLFVTSSSSVWWTMMRGQTFFSSST

SEQ ID NO: 36419 - protein, 15 aa, Artificial Sequence
  Synthetic polypeptide
GLLSHASCIACRNAS

SEQ ID NO: 36420 - protein, 248 aa, Artificial Sequence
  Synthetic polypeptide
PAEMQANEEYQILANSWRYSSAFCNKLFFSMVDYDEGTDVFQQLNMNSAPTFMHFPPKGRPKRADTFDLQRIGFAAEQLAKWIADRTDVHIRVFRPPNYSGTIALALLVSLVGGLLYLRRNNLEFIYNKTGWAMVSLCIVFAMTSGQMWNHIRGPPYAHKNPHNGQVSYIHGSSQAQFVAESHIILVLNAAITMGMVLLNEAATSKGDVGKRRIICLVGLGLVVFFFSFLLSIFRSKYHGYPYSFLIK

SEQ ID NO: 36421 - protein, 177 aa, Artificial Sequence
  Synthetic polypeptide
PAEMQANEEYQILANSWRYSSAFCNKLFFSMVDYDEGTDVFQQLNMNSAPTFMHFPPKGRPKRADTFDLQRIGFAAEQLAKWIADRTDVHIRVFRPPNYSGTIALALLVSLVGGLLYLRRNNLEFIYNKTGWAMVSLCIVFAMTSGQMWNHIRGPPYAHKNPHNGQVMPLSPWGWFF

SEQ ID NO: 36422 - protein, 215 aa, Artificial Sequence
  Synthetic polypeptide
PAEMQANEEYQILANSWRYSSAFCNKLFFSMVDYDEGTDVFQQLNMNSAPTFMHFPPKGRPKRADTFDLQRIGFAAEQLAKWIADRTDVHIRVFRPPNYSGTIALALLVSLVGGLLYLRRNNLEFIYNKTGWAMVSLCIVFAMTSGQMWNHIRGPPYAHKNPHNGQVSYIHGSSQAQFVAESHIILVLNAAITMGMVLLNEAATSKGDVGKRRTF

SEQ ID NO: 36423 - protein, 190 aa, Artificial Sequence
  Synthetic polypeptide
PAEMQANEEYQILANSWRYSSAFCNKLFFSMVDYDEGTDVFQQLNMNSAPTFMHFPPKGRPKRADTFDLQRIGFAAEQLAKWIADRTDVHIRVFRPPNYSGTIALALLVSLVGGLLYLRRNNLEFIYNKTGWAMVSLCIVFAMTSGQMWNHIRGPPYAHKNPHNGQVSYIHGSSQAQFVAESHIILVLTS

SEQ ID NO: 36424 - protein, 249 aa, Artificial Sequence
  Synthetic polypeptide
PAEMQANEEYQILANSWRYSSAFCNKLFFSMVDYDEGTDVFQQLNMNSAPTFMHFPPKGRPKRADTFDLQRIGFAAEQLAKWIADRTDVHIRVFRPPNYSGTIALALLVSLVGGLLYLRRNNLEFIYNKTGWAMVSLCIVFAMTSGQMWNHIRGPPYAHKNPHNGQVSYIHGSSQAQFVAESHIILVLNAAITMGMVLLNEAATSKGDVGKRRIICLVGLGLVVFFFSFLLSIFRSKYHGYPYSDLDFE

SEQ ID NO: 36425 - protein, 10 aa, Artificial Sequence
  Synthetic polypeptide
GLPSHVELIF

SEQ ID NO: 36426 - protein, 338 aa, Artificial Sequence
  Synthetic polypeptide
RGSSLYMLSLACCHVKMSLCCSSSSAMIVRPPQPCGTNLLAEKVEQLMEWSSRRSIFRMNGDKFRKFIKAPPRNYSMIVMFTALQPQRQCSVCRQANEEYQILANSWRYSSAFCNKLFFSMVDYDEGTDVFQQLNMNSAPTFMHFPPKGRPKRADTFDLQRIGFAAEQLAKWIADRTDVHIRVFRPPNYSGTIALALLVSLVGGLLYLRRNNLEFIYNKTGWAMVSLCIVFAMTSGQMWNHIRGPPYAHKNPHNGQVSYIHGSSQAQFVAESHIILVLNAAITMGMVLLNEAATSKGDVGKRRIICLVGLGLVVFFFSFLLSIFRSKYHGYPYSFLIK

SEQ ID NO: 36427 - protein, 267 aa, Artificial Sequence
  Synthetic polypeptide
RGSSLYMLSLACCHVKMSLCCSSSSAMIVRPPQPCGTNLLAEKVEQLMEWSSRRSIFRMNGDKFRKFIKAPPRNYSMIVMFTALQPQRQCSVCRQANEEYQILANSWRYSSAFCNKLFFSMVDYDEGTDVFQQLNMNSAPTFMHFPPKGRPKRADTFDLQRIGFAAEQLAKWIADRTDVHIRVFRPPNYSGTIALALLVSLVGGLLYLRRNNLEFIYNKTGWAMVSLCIVFAMTSGQMWNHIRGPPYAHKNPHNGQVMPLSPWGWFF

SEQ ID NO: 36428 - protein, 305 aa, Artificial Sequence
  Synthetic polypeptide
RGSSLYMLSLACCHVKMSLCCSSSSAMIVRPPQPCGTNLLAEKVEQLMEWSSRRSIFRMNGDKFRKFIKAPPRNYSMIVMFTALQPQRQCSVCRQANEEYQILANSWRYSSAFCNKLFFSMVDYDEGTDVFQQLNMNSAPTFMHFPPKGRPKRADTFDLQRIGFAAEQLAKWIADRTDVHIRVFRPPNYSGTIALALLVSLVGGLLYLRRNNLEFIYNKTGWAMVSLCIVFAMTSGQMWNHIRGPPYAHKNPHNGQVSYIHGSSQAQFVAESHIILVLNAAITMGMVLLNEAATSKGDVGKRRTF

SEQ ID NO: 36429 - protein, 280 aa, Artificial Sequence
  Synthetic polypeptide
RGSSLYMLSLACCHVKMSLCCSSSSAMIVRPPQPCGTNLLAEKVEQLMEWSSRRSIFRMNGDKFRKFIKAPPRNYSMIVMFTALQPQRQCSVCRQANEEYQILANSWRYSSAFCNKLFFSMVDYDEGTDVFQQLNMNSAPTFMHFPPKGRPKRADTFDLQRIGFAAEQLAKWIADRTDVHIRVFRPPNYSGTIALALLVSLVGGLLYLRRNNLEFIYNKTGWAMVSLCIVFAMTSGQMWNHIRGPPYAHKNPHNGQVSYIHGSSQAQFVAESHIILVLTS

SEQ ID NO: 36430 - protein, 339 aa, Artificial Sequence
  Synthetic polypeptide
RGSSLYMLSLACCHVKMSLCCSSSSAMIVRPPQPCGTNLLAEKVEQLMEWSSRRSIFRMNGDKFRKFIKAPPRNYSMIVMFTALQPQRQCSVCRQANEEYQILANSWRYSSAFCNKLFFSMVDYDEGTDVFQQLNMNSAPTFMHFPPKGRPKRADTFDLQRIGFAAEQLAKWIADRTDVHIRVFRPPNYSGTIALALLVSLVGGLLYLRRNNLEFIYNKTGWAMVSLCIVFAMTSGQMWNHIRGPPYAHKNPHNGQVSYIHGSSQAQFVAESHIILVLNAAITMGMVLLNEAATSKGDVGKRRIICLVGLGLVVFFFSFLLSIFRSKYHGYPYSDLDFE

SEQ ID NO: 36431 - protein, 91 aa, Artificial Sequence
  Synthetic polypeptide
RGIPLHMLSLSCFHLRCAFHHDCEASTAIWNYAAITMGMVLLNEAATSKGDVGKRRIICLVGLGLVVFFFSFLLSIFRSKYHGYPYSFLIK

SEQ ID NO: 36432 - protein, 26 aa, Artificial Sequence
  Synthetic polypeptide
DVPFTMIVRLPQPYGTMPLSPWGWFF

SEQ ID NO: 36433 - protein, 19 aa, Artificial Sequence
  Synthetic polypeptide
GFHSHMELCRYHHGDGSSK

SEQ ID NO: 36434 - protein, 42 aa, Artificial Sequence
  Synthetic polypeptide
RGIPLHMLSLSCFHLRCAFHHDCEASTAIWNYAAITMGMVLL

SEQ ID NO: 36435 - protein, 18 aa, Artificial Sequence
  Synthetic polypeptide
GFHSHMELCRYHHGDGSS

SEQ ID NO: 36436 - protein, 58 aa, Artificial Sequence
  Synthetic polypeptide
RGIPLHMLSLSCFHLRCAFHHDCEASTAIWNYAAITMGMVLLNEAATSKGDVGKRRTF

SEQ ID NO: 36437 - protein, 92 aa, Artificial Sequence
  Synthetic polypeptide
RGIPLHMLSLSCFHLRCAFHHDCEASTAIWNYAAITMGMVLLNEAATSKGDVGKRRIICLVGLGLVVFFFSFLLSIFRSKYHGYPYSDLDFE

SEQ ID NO: 36438 - protein, 70 aa, Artificial Sequence
  Synthetic polypeptide
MGLMRSDGLKNGNFSAEALSLPAAIHVRCDLLLFAFCHDCEASPAMWNKVWSSGITFTINRRTLIAAPNL

SEQ ID NO: 36439 - protein, 36 aa, Artificial Sequence
  Synthetic polypeptide
DVTCSSLPSAMIVRPHQPCGTKYGAVGSLSQSTGGH

SEQ ID NO: 36440 - protein, 460 aa, Artificial Sequence
  Synthetic polypeptide
GLTSHVEQSMEQWDHFHNQQEDTDSCSESVKFDARSMTALLPPNPKNSPSLQEKLKSFKAALIALYLLVFAVLIPLIGIVAAQLLKWETKNCSVSSTNANDITQSLTGKGNDSEEEMRFQEVFMEHMSNMEKRIQHILDMEANLMDTEHFQNFSMTTDQRFNDILLQLSTLFSSVQGHGNAIDEISKSLISLNTTLLDLQLNIENLNGKIQENTFKQQEEISKLEERVYNVSAEIMAMKEEQVHLEQEIKGEVKVLNNITNDLRLKDWEHSQTLRNITLIQGPPGPPGEKGDRGPTGESGPRGFPGPIGPPGLKGDRGAIGFPGSRGLPGYAGRPGNSGPKGQKGEKGSGNTLTPFTKVRLVGGSGPHEGRVEILHSGQWGTICDDRWEVRVGQVVCRSLGYPGVQAVHKAAHFGQGTGPIWLNEVFCFGRESSIEECKIRQWGTRACSHSEDAGVTCTL

SEQ ID NO: 36441 - protein, 56 aa, Artificial Sequence
  Synthetic polypeptide
GLTSHVEQSMEQWDHFHNQQEDTDSCSESVKFDARSMTALLPPNPKNSPSLQEKLK

SEQ ID NO: 36442 - protein, 460 aa, Artificial Sequence
  Synthetic polypeptide
GLPSHAERSMEQWDHFHNQQEDTDSCSESVKFDARSMTALLPPNPKNSPSLQEKLKSFKAALIALYLLVFAVLIPLIGIVAAQLLKWETKNCSVSSTNANDITQSLTGKGNDSEEEMRFQEVFMEHMSNMEKRIQHILDMEANLMDTEHFQNFSMTTDQRFNDILLQLSTLFSSVQGHGNAIDEISKSLISLNTTLLDLQLNIENLNGKIQENTFKQQEEISKLEERVYNVSAEIMAMKEEQVHLEQEIKGEVKVLNNITNDLRLKDWEHSQTLRNITLIQGPPGPPGEKGDRGPTGESGPRGFPGPIGPPGLKGDRGAIGFPGSRGLPGYAGRPGNSGPKGQKGEKGSGNTLTPFTKVRLVGGSGPHEGRVEILHSGQWGTICDDRWEVRVGQVVCRSLGYPGVQAVHKAAHFGQGTGPIWLNEVFCFGRESSIEECKIRQWGTRACSHSEDAGVTCTL

SEQ ID NO: 36443 - protein, 32 aa, Artificial Sequence
  Synthetic polypeptide
VPEASPAMQNEVWSSGITFTINRRTLIAAPNL

SEQ ID NO: 36444 - protein, 34 aa, Artificial Sequence
  Synthetic polypeptide
RGAFRHDFKFLRPPQPCRTKYGAVGSLSQSTGGH

SEQ ID NO: 36445 - protein, 56 aa, Artificial Sequence
  Synthetic polypeptide
GLPSHAERSMEQWDHFHNQQEDTDSCSESVKFDARSMTALLPPNPKNSPSLQEKLK

SEQ ID NO: 36446 - protein, 31 aa, Artificial Sequence
  Synthetic polypeptide
GWAWWLTPVIPALWEAEAGGSQGRTCMPRTL

SEQ ID NO: 36447 - protein, 32 aa, Artificial Sequence
  Synthetic polypeptide
SQHFGRPRRADHKGGHVCPGLYRATNNIWYPV

SEQ ID NO: 36448 - protein, 203 aa, Artificial Sequence
  Synthetic polypeptide
MGVVAHACNPSTLGGRGGRITREDMYAQDSIELLTTSGIQFKKHEEEGIETQYFAELLMTSGVVLCEGVKWLSFHSGYDFGYLIKILTNSNLPEEELDFFEILRLFFPVIYDVKYLMKSCKNLKGGLQEVAEQLELERIGPQHQAGSDSLLTGMAFFKMREMFFEDHIDDAKYCGHLYGLGSGSSYVQNGTGNAYEEEANKQS

SEQ ID NO: 36449 - protein, 162 aa, Artificial Sequence
  Synthetic polypeptide
MGVVAHACNPSTLGGRGGRITREDMYAQDSIELLTTSGIQFKKHEEEGIETQYFAELLMTSGVVLCEGVKWLSFHSGYDFGYLIKILTNSNLPEEELDFFEILRLFFPVIYDVKYLMKSCKNLKGGLQEVAEQLELERIGPQHQAGSDSLLTGMAFFKMREV

SEQ ID NO: 36450 - protein, 146 aa, Artificial Sequence
  Synthetic polypeptide
MGVVAHACNPSTLGGRGGRITREDMYAQDSIELLTTSGIQFKKHEEEGIETQYFAELLMTSGVVLCEGVKWLSFHSGYDFGYLIKILTNSNLPEEELDFFEILRLFFPVIYDVKYLMKSCKNLKVRLRMALSTAAHCSDQVTVMRA

SEQ ID NO: 36451 - protein, 65 aa, Artificial Sequence
  Synthetic polypeptide
MGVVAHACNPSTLGGRGGRITREDMYAQDSIELLTTSGIQFKKHEEEGIETQYFAELLMTSGVVL

SEQ ID NO: 36452 - protein, 18 aa, Artificial Sequence
  Synthetic polypeptide
KGEFHEAGKNSKGPVKLH

SEQ ID NO: 36453 - protein, 130 aa, Artificial Sequence
  Synthetic polypeptide
IVYFKRVSFTRLEKIQKVQLNCTKVKSKQSEPSKHSGFSTSDNSIANTPQDYSGNMKSFPSRSPSQGDEDSALILTQDNLKSSDPDLSANSDQESGVEDLSCRSPSGGEHAPSEDSGKDRDSDEAVFLTA

SEQ ID NO: 36454 - protein, 12 aa, Artificial Sequence
  Synthetic polypeptide
VSRGWKKFKRSS

SEQ ID NO: 36455 - protein, 14 aa, Artificial Sequence
  Synthetic polypeptide
GLPSHAELLKMSAW

SEQ ID NO: 36456 - protein, 50 aa, Artificial Sequence
  Synthetic polypeptide
VLMRADDFIRGSSPFILYFSLLLPCEERCVCFLVCHDCKFPEASPAMQNC

SEQ ID NO: 36457 - protein, 692 aa, Artificial Sequence
  Synthetic polypeptide
GALPLSFCTSLSCSLVKNDVFASSSAMIVSFLRPPQPCRTVENVRLVDRVSPKKAALGTLYLTATHVIFVENSPDPRKETWILHSQISTIEKQATTATGCPLLIRCKNFQIIQLIIPQERDCHDVYISLIRLARPVKYEELYCFSFNPMLDKEEREQGWVLIDLSEEYTRMGLPNHYWQLSDVNRDYRVCDSYPTELYVPKSATAHIIVGSSKFRSRRRFPVLSYYYKDNHASICRSSQPLSGFSARCLEDEQMLQAIRKANPGSDFVYVVDTRPKLNAMANRAAGKGYENEDNYSNIKFQFIGIENIHVMRNSLQKMLEVCELKSPSMSDFLWGLENSGWLRHIKAIMDAGIFIAKAVSEEGASVLVHCSDGWDRTAQVCSVASLLLDPHYRTLKGFMVLIEKDWISFGHKFNHRYGNLDGDPKEISPVIDQFIECVWQLMEQFPCAFEFNERFLIHIQHHIYSCQFGNFLCNSQKERRELKIQERTYSLWAHLWKNRADYLNPLFRADHSQTQGTLHLPTTPCNFMYKFWSGMYNRFEKGMQPRQSVTDYLMAVKEETQQLEEELEALEERLEKIQKVQLNCTKVKSKQSEPSKHSGFSTSDNSIANTPQDYSGNMKSFPSRSPSQGDEDSALILTQDNLKSSDPDLSANSDQESGVEDLSCRSPSGGEHAPSEDSGKDRDSDEAVFLTA

SEQ ID NO: 36458 - protein, 587 aa, Artificial Sequence
  Synthetic polypeptide
GALPLSFCTSLSCSLVKNDVFASSSAMIVSFLRPPQPCRTVENVRLVDRVSPKKAALGTLYLTATHVIFVENSPDPRKETWILHSQISTIEKQATTATGCPLLIRCKNFQIIQLIIPQERDCHDVYISLIRLARPVKYEELYCFSFNPMLDKEEREQGWVLIDLSEEYTRMGLPNHYWQLSDVNRDYRVCDSYPTELYVPKSATAHIIVGSSKFRSRRRFPVLSYYYKDNHASICRSSQPLSGFSARCLEDEQMLQAIRKANPGSDFVYVVDTRPKLNAMANRAAGKGYENEDNYSNIKFQFIGIENIHVMRNSLQKMLEVCELKSPSMSDFLWGLENSGWLRHIKAIMDAGIFIAKAVSEEGASVLVHCSDGWDRTAQVCSVASLLLDPHYRTLKGFMVLIEKDWISFGHKFNHRYGNLDGDPKEISPVIDQFIECVWQLMEQFPCAFEFNERFLIHIQHHIYSCQFGNFLCNSQKERRELKIQERTYSLWAHLWKNRADYLNPLFRADHSQTQGTLHLPTTPCNFMYKFWSGMYNRFEKGMQPRQSVTDYLMAVKEETQQLEEELEALEEVRHTCFVNLFSVLIS

SEQ ID NO: 36459 - protein, 137 aa, Artificial Sequence
  Synthetic polypeptide
GALPLSFCTSLSCSLVKNDVFASSSAMIVSFLRPPQPCRTVENVRLVDRVSPKKAALGTLYLTATHVIFVENSPDPRKETWILHSQISTIEKQATTATGCPLLIRCKNFQIIQLIIPQERDCHDVYISLIRLARPGL

SEQ ID NO: 36460 - protein, 38 aa, Artificial Sequence
  Synthetic polypeptide
VLMRADDFIRGSSPFILYFSLLLPCEERCVCFLVCHDC

SEQ ID NO: 36461 - protein, 680 aa, Artificial Sequence
  Synthetic polypeptide
GALPLSFCTSLSCSLVKNDVFASSSAMIVENVRLVDRVSPKKAALGTLYLTATHVIFVENSPDPRKETWILHSQISTIEKQATTATGCPLLIRCKNFQIIQLIIPQERDCHDVYISLIRLARPVKYEELYCFSFNPMLDKEEREQGWVLIDLSEEYTRMGLPNHYWQLSDVNRDYRVCDSYPTELYVPKSATAHIIVGSSKFRSRRRFPVLSYYYKDNHASICRSSQPLSGFSARCLEDEQMLQAIRKANPGSDFVYVVDTRPKLNAMANRAAGKGYENEDNYSNIKFQFIGIENIHVMRNSLQKMLEVCELKSPSMSDFLWGLENSGWLRHIKAIMDAGIFIAKAVSEEGASVLVHCSDGWDRTAQVCSVASLLLDPHYRTLKGFMVLIEKDWISFGHKFNHRYGNLDGDPKEISPVIDQFIECVWQLMEQFPCAFEFNERFLIHIQHHIYSCQFGNFLCNSQKERRELKIQERTYSLWAHLWKNRADYLNPLFRADHSQTQGTLHLPTTPCNFMYKFWSGMYNRFEKGMQPRQSVTDYLMAVKEETQQLEEELEALEERLEKIQKVQLNCTKVKSKQSEPSKHSGFSTSDNSIANTPQDYSGNMKSFPSRSPSQGDEDSALILTQDNLKSSDPDLSANSDQESGVEDLSCRSPSGGEHAPSEDSGKDRDSDEAVFLTA

SEQ ID NO: 36462 - protein, 575 aa, Artificial Sequence
  Synthetic polypeptide
GALPLSFCTSLSCSLVKNDVFASSSAMIVENVRLVDRVSPKKAALGTLYLTATHVIFVENSPDPRKETWILHSQISTIEKQATTATGCPLLIRCKNFQIIQLIIPQERDCHDVYISLIRLARPVKYEELYCFSFNPMLDKEEREQGWVLIDLSEEYTRMGLPNHYWQLSDVNRDYRVCDSYPTELYVPKSATAHIIVGSSKFRSRRRFPVLSYYYKDNHASICRSSQPLSGFSARCLEDEQMLQAIRKANPGSDFVYVVDTRPKLNAMANRAAGKGYENEDNYSNIKFQFIGIENIHVMRNSLQKMLEVCELKSPSMSDFLWGLENSGWLRHIKAIMDAGIFIAKAVSEEGASVLVHCSDGWDRTAQVCSVASLLLDPHYRTLKGFMVLIEKDWISFGHKFNHRYGNLDGDPKEISPVIDQFIECVWQLMEQFPCAFEFNERFLIHIQHHIYSCQFGNFLCNSQKERRELKIQERTYSLWAHLWKNRADYLNPLFRADHSQTQGTLHLPTTPCNFMYKFWSGMYNRFEKGMQPRQSVTDYLMAVKEETQQLEEELEALEEVRHTCFVNLFSVLIS

SEQ ID NO: 36463 - protein, 125 aa, Artificial Sequence
  Synthetic polypeptide
GALPLSFCTSLSCSLVKNDVFASSSAMIVENVRLVDRVSPKKAALGTLYLTATHVIFVENSPDPRKETWILHSQISTIEKQATTATGCPLLIRCKNFQIIQLIIPQERDCHDVYISLIRLARPGL

SEQ ID NO: 36464 - protein, 37 aa, Artificial Sequence
  Synthetic polypeptide
DIPCSSTRIVRPPQPRGTVNPFNFFPLYITQSQRQAE

SEQ ID NO: 36465 - protein, 271 aa, Artificial Sequence
  Synthetic polypeptide
IHSTSFLYTLLSLSVKQNERYGQLTLVNSTSADTGEFSCWVQLCSGYICRKDEAKTGSTYIFFTEKGELFVPSPSYFDVVYLNPDRQAVVPCRVTVLSAKVTLHREFPAKEIPANGTDIVYDMKRGFVYLQPHSEHQGVVYCRAEAGGRSQISVKYQLLYVAVPSGPPSTTILASSNKVKSGDDISVLCTVLGEPDVEVEFTWIFPGQKDERPVTIQDTWRLIHRGLGHTTRISQSVITVEDFETIDAGYYICTAQNLQGQTTVATTVEFS

SEQ ID NO: 36466 - protein, 60 aa, Artificial Sequence
  Synthetic polypeptide
GETHFSWCSFSLASYHVRHPLLFHQDCETSPATWNCESIQLLSFIHYSVSASSRMSATAS

SEQ ID NO: 36467 - protein, 17 aa, Artificial Sequence
  Synthetic polypeptide
IWIPIEVVYIQGRHSHL

SEQ ID NO: 36468 - protein, 407 aa, Artificial Sequence
  Synthetic polypeptide
KLSTSREDIHTFEKSRQKNPRSLCIQPQTAPDALPPEKTLELTQYKTKCENQSGFILQLKQLLACGNTKFEALTVVIQHLLSEREEALKQHKTLSQELVNLRGELVTASTTCEKLEKARNELQTVYEAFVQQHQAEKTERENRLKEFYTREYEKLRDTYIEEAEKYKMQLQEQFDNLNAAHETSKLEIEASHSEKLELLKKAYEASLSEIKKGHEIEKKSLEDLLSEKQESLEKQINDLKSENDALNEKLKSEEQKRRAREKANLKNPQIMYLEQELESLKAVLEIKNEKLHQQDIKLMKMEKLVDNNTALVDKLKRFQQENEELKARMDKHMAISRQLSTEQAVLQESLEKESKVNKRLSMENEELLWKLHNGDLCSPKRSPTSSAIPLQSPRNSGSFPSPSISPR

SEQ ID NO: 36469 - protein, 62 aa, Artificial Sequence
  Synthetic polypeptide
GNRRGLASEAWVLTLNLDSHRSCLHPGKTFTPLKRAGKRILEAYVSSHRQLPMRCPLRKHLN

SEQ ID NO: 36470 - protein, 3 aa, Artificial Sequence
  Synthetic polypeptide
KLS

SEQ ID NO: 36471 - protein, 32 aa, Artificial Sequence
  Synthetic polypeptide
IKLKRAGKRILEAYVSSHRQLPMRCPLRKHLN

SEQ ID NO: 36472 - protein, 1215 aa, Artificial Sequence
  Synthetic polypeptide
LTPIIPALWEAELWSEMRRHEMLREELRQRRKQLEALMAEHQRRQGLAETASPVAVSLRSDGSENLCTPQQSRTEKTMATWGGSTQCALDEEGDEDGYLSEGIVRTDEEEEEEQDASSNDNFSVCPSNSVNHNSYNGKETKNRWKNNCPFSADENYRPLAKTRQQNISMQRQENLRWVSELSYVEEKEQWQEQINQLKKQLDFSVSICQTLMQDQQTLSCLLQTLLTGPYSVMPSNVASPQVHFIMHQLNQCYTQLTWQQNNVQRLKQMLNELMRQQNQHPEKPGGKERGSSASHPPSPSLFCPFSFPTQPVNLFNIPGFTNFSSFAPGMNFSPLFPSNFGDFSQNISTPSEQQQPLAQNSSGKTEYMAFPKPFESSSSIGAEKPRNKKLPEEEVESSRTPWLYEQEGEVEKPFIKTGFSVSVEKSTSSNRKNQLDTNGRRRQFDEESLESFSSMPDPVDPTTVTKTFKTRKASAQASLASKDKTPKSKSKKRNSTQLKSRVKNIRYESASMSSTCEPCKSRNRHSAQTEEPVQAKVFSRKNHEQLEKIIKCNRSTEISSETGSDFSMFEALRDTIYSEVATLISQNESRPHFLIELFHELQLLNTDYLRQRALYALQDIVSRHISESHEKGENVKSVNSGTWIASNSELTPSESLATTDDETFEKNFERETHKISEQNDADNASVLSVSSNFEPFATDDLGNTVIHLDQALARMREYERMKTEAESNSNMRCTCRIIEDGDGAGAGTTVNNLEETPVIENRSSQQPVSEVSTIPCPRIDTQQLDRQIKAIMKEVIPFLKEHMDEVCSSQLLTSVRRMVLTLTQQNDESKEFVKFFHKQLGSILQDSLAKFAGRKLKDCGEDLLVEISEVLFNELAFFKLMQDLDNNSITVKQRCKRKIEATGVIQSCAKEAKRILEDHGSPAGEIDDEDKDKDETETVKQTQTSEVYDGPKNVRSDISDQEEDEESEGCPVSINLSKAETQALTNYGSGEDENEDEEMEEFEEGPVDVQTSLQANTEATEENEHDEQVLQRDFKKTAESKNVPLEREATSKNDQNNCPVKPCYLNILEDEQPLNSAAHKESPPTVDSTQQPNPLPLRLPEMEPLVPRVKEVKSAQETPESSLAGSPDTESPVLVNDYEAESGNISQKSDEEDFVKVEDLPLKLTIYSEADLRKKMVEEEQKNHLSGEICEMQTEELAGNSETLKEPETVGAQSI

SEQ ID NO: 36473 - protein, 12 aa, Artificial Sequence
  Synthetic polypeptide
SQHFGRLSCGQK

SEQ ID NO: 36474 - protein, 1207 aa, Artificial Sequence
  Synthetic polypeptide
LTPIIPALWEAELWSEMRRHEMLREELRQRRKQLEALMAEHQRRQGLAETASPVAVSLRSDGSENLCTPQQSRTEKTMATWGGSTQCALDEEGDEDGYLSEGIVRTDEEEEEEQDASSNDNFSVCPSNSVNHNSYNGKETKNRWKNNCPFSADENYRPLAKTRQQNISMQRQENLRWVSELSYVEEKEQWQEQINQLKKQLDFSVSICQTLMQDQQTLSCLLQTLLTGPYSVMPSNVASPQVHFIMHQLNQCYTQLTWQQNNVQRLKQMLNELMRQQNQHPEKPGGKERGSSASHPPSPSLFCPFSFPTQPVNLFNIPGFTNFSSFAPGMNFSPLFPSNFGDFSQNISTPSEQQQPLAQNSSGKTEYMAFPKPFESSSSIGAEKPRNKKLPEEEVESSRTPWLYEQEGEVEKPFIKTGFSVSVEKSTSSNRKNQLDTNGRRRQFDEESLESFSSMPDPVDPTTVTKTFKTRKASAQASLASKDKTPKSKSKKRNSTQLKSRVKNIRYESASMSSTCEPCKSRNRHSAQTEEPVQAKVFSRKNHEQLEKIIKCNRSTEISSETGSDFSMFEALRDTIYSEVATLISQNESRPHFLIELFHELQLLNTDYLRQRALYALQDIVSRHISESHEKGENVKSVNSGTWIASNSELTPSESLATTDDETFEKNFERETHKISEQNDADNASVLSVSSNFEPFATDDLGNTVIHLDQALARMREYERMKTEAESNSNMRCTCRIIEDGDGAGAETPVIENRSSQQPVSEVSTIPCPRIDTQQLDRQIKAIMKEVIPFLKEHMDEVCSSQLLTSVRRMVLTLTQQNDESKEFVKFFHKQLGSILQDSLAKFAGRKLKDCGEDLLVEISEVLFNELAFFKLMQDLDNNSITVKQRCKRKIEATGVIQSCAKEAKRILEDHGSPAGEIDDEDKDKDETETVKQTQTSEVYDGPKNVRSDISDQEEDEESEGCPVSINLSKAETQALTNYGSGEDENEDEEMEEFEEGPVDVQTSLQANTEATEENEHDEQVLQRDFKKTAESKNVPLEREATSKNDQNNCPVKPCYLNILEDEQPLNSAAHKESPPTVDSTQQPNPLPLRLPEMEPLVPRVKEVKSAQETPESSLAGSPDTESPVLVNDYEAESGNISQKSDEEDFVKVEDLPLKLTIYSEADLRKKMVEEEQKNHLSGEICEMQTEELAGNSETLKEPETVGAQSI

SEQ ID NO: 36475 - protein, 1050 aa, Artificial Sequence
  Synthetic polypeptide
LTPIIPALWEAELWSEMRRHEMLREELRQRRKQLEALMAEHQRRQGLAETASPVAVSLRSDGSENLCTPQQSRTEKTMATWGGSTQCALDEEGDEDGYLSEGIVRTDEEEEEEQDASSNDNFSVCPSNSVNHNSYNGKETKNRWKNNCPFSADENYRPLAKTRQQNISMQRQENLRWVSELSYVEEKEQWQEQINQLKKQLDFSVSICQTLMQDQQTLSCLLQTLLTGPYSVMPSNVASPQVHFIMHQLNQCYTQLTWQQNNVQRLKQMLNELMRQQNQHPEKPGGKERGSSASHPPSPSLFCPFSFPTQPVNLFNIPGFTNFSSFAPGMNFSPLFPSNFGDFSQNISTPSEQQQPLAQNSSGKTEYMAFPKPFESSSSIGAEKPRNKKLPEEEVESSRTPWLYEQEGEVEKPFIKTGFSVSVEKSTSSNRKNQLDTNGRRRQFDEESLESFSSMPDPVDPTTVTKTFKTRKASAQASLASKDKTPKSKSKKRNSTQLKSRVKNIKTGSDFSMFEALRDTIYSEVATLISQNESRPHFLIELFHELQLLNTDYLRQRALYALQDIVSRHISESHEKGENVKSVNSGTWIASNSELTPSESLATTDDETFEKNFERETHKISEQNDADNASVLSVSSNFEPFATDDLGNTVIHLDQALARMREYERMKTEAESNSNMRCTCRIIEDGDGAGAGTTVNNLEETPVIENRSSQQPVSEVSTIPCPRIDTQQLDRQIKAIMKEVIPFLKEHMDEVCSSQLLTSVRRMVLTLTQQNDESKEFVKFFHKQLGSILQDSLAKFAGRKLKDCGEDLLVEISEVLFNELAFFKLMQDLDNNSITVKQRCKRKIEATGVIQSCAKEAKRILEDHGSPAGEIDDEDKDKDETETVKQTQTSEVYDGPKNVRSDISDQEEDEESEGCPVSINLSKAETQALTNYGSGEDENEDEEMEEFEEGPVDVQTSLQANTEATEENEHDEQEAESGNISQKSDEEDFVKVEDLPLKLTIYSEADLRKKMVEEEQKNHLSGEICEMQTEELAGNSETLKEPETVGAQSI

SEQ ID NO: 36476 - protein, 33 aa, Artificial Sequence
  Synthetic polypeptide
PWELLPLTELREASGAAAWTSESPCLPLLQKMK

SEQ ID NO: 36477 - protein, 14 aa, Artificial Sequence
  Synthetic polypeptide
QPAALCCSLGSSFP

SEQ ID NO: 36478 - protein, 611 aa, Artificial Sequence
  Synthetic polypeptide
SQLPSAVALGAPSLNRAERGIWSCSMDQREPLPPAPAENEMKYDTNNNEEEEGEQFDFDSGDEIPEADRQAPSAPETGGAGASEAPAPTGGEDGAGAETTPVAEPTKLVLPMKVNPYSVIDITPFQEDQPPTPVPSAEEENVGLHVPCGYLVPVPCGYAVPSNLPLLLPAYSSPVIICATSLDEEAETPEVTEDRQPNSLSSEEPPTSEDQVGREDSALARWAADPANTAWMENPEEAIYDDVPRENSDSEPDEMIYDDVENGDEGGNSSLEYGWSSSEFESYEEQSDSECKNGIPRSFLRSNHKKQMQKLVKAAKDGTKDGLERTRAAVKRGRSFIRTKSLIAQDHRSSLEEEQNLFIDVDCKHPEAILTPMPEGLSQQQVVRRYILGSVVDSEKNYVDALKRILEQYEKPLSEMEPKVLSERKLKTVFYRVKEILQCHSLFQIALASRVSEWDSVEMIGDVFVASFSKSMVLDAYSEYVNNFSTAVAVLKKTCATKPAFLEFLKQEQEASPDRTTLYSLMMKPIQRFPQFILLLQDMLKNTSKGHPDRLPLQMALTELETLAEKLNERKRDADQRCEVKQIAKAINERYLNKVERGFLQLYSKIIFALC

SEQ ID NO: 36479 - protein, 1369 aa, Artificial Sequence
  Synthetic polypeptide
SQLPSAVALGAPSLNRAERGIWSCSMDQREPLPPAPAENEMKYDTNNNEEEEGEQFDFDSGDEIPEADRQAPSAPETGGAGASEAPAPTGGEDGAGAETTPVAEPTKLVLPMKVNPYSVIDITPFQEDQPPTPVPSAEEENVGLHVPCGYLVPVPCGYAVPSNLPLLLPAYSSPVIICATSLDEEAETPEVTEDRQPNSLSSEEPPTSEDQVGREDSALARWAADPANTAWMENPEEAIYDDVPRENSDSEPDEMIYDDVENGDEGGNSSLEYGWSSSEFESYEEQSDSECKNGIPRSFLRSNHKKQLSHDLTRLKEHYEKKMRDLMASTVGVVEIQQLRQKHELKMQKLVKAAKDGTKDGLERTRAAVKRGRSFIRTKSLIAQDHRSSLEEEQNLFIDVDCKHPEAILTPMPEGLSQQQVVRRYILGSVVDSEKNYVDALKRILEQYEKPLSEMEPKVLSERKLKTVFYRVKEILQCHSLFQIALASRVSEWDSVEMIGDVFVASFSKSMVLDAYSEYVNNFSTAVAVLKKTCATKPAFLEFLKEQEASPDRTTLYSLMMKPIQRFPQFILLLQDMLKNTSKGHPDRLPLQMALTELETLAEKLNERKRDADQRCEVKQIAKAINERYLNKLLSSGSRYLIRSDDMIETVYNDRGEIVKTKERRVFMLNDVLMCATVSSRPSHDSRVMSSQRYLLKWSVPLGHVDAIEYGSSAGTGEHSRHLAVHPPESLAVVANAKPNKVYMGPGQLYQDLQNLLHDLNVIGQITQLIGNLKGNYQNLNQSVAHDWTSGLQRLILKKEDEIRAADCCRIQLQLPGKQDKSGRPTFFTAVFNTFTPAIKESWVNSLQMAKLALEEENHMGWFCVEDDGNHIKKEKHPLLVGHMPVMVAKQQEFKIECAAYNPEPYLNNESQPDSFSTAHGFLWIGSCTHQMGQIAIVSFQNSTPKVIECFNVESRILCMLYVPVEEKRREPGAPPDPETPAVRASDVPTICVGTEEGSISIYKSSQGSKKVRLQHFFTPEKSTVMSLACTSQSLYAGLVNGAVASYARAPDGSWDSEPQKVIKLGVLPVRSLLMMEDTLWAASGGQVFIISVETHAVEGQLEAHQEEGMVISHMAVSGVGIWIAFTSGSTLRLFHTETLKHLQDINIATPVHNMLPGHQRLSVTSLLVCHGLLMVGTSLGVLVALPVPRLQGIPKVTGRGMVSYHAHNSPVKFIVLATALHEKDKDKSRDSLAPGPEPQDEDQKDALPSGGAGSSLSQGDPDAAIWLGDSLGSMTQKSDLSSSSGSLSLSHGSSSLEHRSEDSTIYDLLKDPVSLRSKARRAKKAKASSALVVCGGQGHRRVHRKARQPHQEELAPTVMVWQIPLLNI

SEQ ID NO: 36480 - protein, 1341 aa, Artificial Sequence
  Synthetic polypeptide
SQLPSAVALGAPSLNRAERGIWSCSMDQREPLPPAPAENEMKYDTNNNEEEEGEQFDFDSGDEIPEADRQAPSAPETGGAGASEAPAPTGGEDGAGAETTPVAEPTKLVLPMKVNPYSVIDITPFQEDQPPTPVPSAEEENVGLHVPCGYLVPVPCGYAVPSNLPLLLPAYSSPVIICATSLDEEAETPEVTEDRQPNSLSSEEPPTSEDQVGREDSALARWAADPANTAWMENPEEAIYDDVPRENSDSEPDEMIYDDVENGDEGGNSSLEYGWSSSEFESYEEQSDSECKNGIPRSFLRSNHKKQLSHDLTRLKEHYEKKMRDLMASTVGVVEIQQLRQKHELKMQKLVKAAKDGTKDGLERTRAAVKRGRSFIRTKSLIAQDHRSSLEEEQNLFIDVDCKHPEAILTPMPEGLSQQQVVRRYILGSVVDSEKNYVDALKRILEQYEKPLSEMEPKVLSERKLKTVFYRVKEILQCHSLFQIALASRVSEWDSVEMIGDVFVASFSKSMVLDAYSEYVNNFSTAVAVLKKTCATKPAFLEFLKQEQEASPDRTTLYSLMMKPIQRFPQFILLLQDMLKNTSKGHPDRLPLQMALTELETLAEKLNERKRDADQRCEVKQIAKAINERYLNKLLSSGSRYLIRSDDMIETVYNDRGEIVKTKERRVFMLNDVLMCATVSSRPSHDSRVMSSQRYLLKWSVPLGHVDAIEYGSSAGTGEHSRHLAVHPPESLAVVANAKPNKVYMGPGQLYQDLQNLLHDLNVIGQITQLIGNLKGNYQNLNQSVAHDWTSGLQRLILKKEDEIRAADCCRIQLQLPGKQDKSGRPTFFTAVFNTFTPAIKESWVNSLQMAKLALEEENHMGWFCVEDDGNHIKKEKHPLLVGHMPVMVAKQQEFKIGSCTHQMGQIAIVSFQNSTPKVIECFNVESRILCMLYVPVEEKRREPGAPPDPETPAVRASDVPTICVGTEEGSISIYKSSQGSKKVRLQHFFTPEKSTVMSLACTSQSLYAGLVNGAVASYARAPDGSWDSEPQKVIKLGVLPVRSLLMMEDTLWAASGGQVFIISVETHAVEGQLEAHQEEGMVISHMAVSGVGIWIAFTSGSTLRLFHTETLKHLQDINIATPVHNMLPGHQRLSVTSLLVCHGLLMVGTSLGVLVALPVPRLQGIPKVTGRGMVSYHAHNSPVKFIVLATALHEKDKDKSRDSLAPGPEPQDEDQKDALPSGGAGSSLSQGDPDAAIWLGDSLGSMTQKSDLSSSSGSLSLSHGSSSLEHRSEDSTIYDLLKDPVSLRSKARRAKKAKASSALVVCGGQGHRRVHRKARQPHQEELAPTVMVWQIPLLNI

SEQ ID NO: 36481 - protein, 1370 aa, Artificial Sequence
  Synthetic polypeptide
SQLPSAVALGAPSLNRAERGIWSCSMDQREPLPPAPAENEMKYDTNNNEEEEGEQFDFDSGDEIPEADRQAPSAPETGGAGASEAPAPTGGEDGAGAETTPVAEPTKLVLPMKVNPYSVIDITPFQEDQPPTPVPSAEEENVGLHVPCGYLVPVPCGYAVPSNLPLLLPAYSSPVIICATSLDEEAETPEVTEDRQPNSLSSEEPPTSEDQVGREDSALARWAADPANTAWMENPEEAIYDDVPRENSDSEPDEMIYDDVENGDEGGNSSLEYGWSSSEFESYEEQSDSECKNGIPRSFLRSNHKKQLSHDLTRLKEHYEKKMRDLMASTVGVVEIQQLRQKHELKMQKLVKAAKDGTKDGLERTRAAVKRGRSFIRTKSLIAQDHRSSLEEEQNLFIDVDCKHPEAILTPMPEGLSQQQVVRRYILGSVVDSEKNYVDALKRILEQYEKPLSEMEPKVLSERKLKTVFYRVKEILQCHSLFQIALASRVSEWDSVEMIGDVFVASFSKSMVLDAYSEYVNNFSTAVAVLKKTCATKPAFLEFLKQEQEASPDRTTLYSLMMKPIQRFPQFILLLQDMLKNTSKGHPDRLPLQMALTELETLAEKLNERKRDADQRCEVKQIAKAINERYLNKLLSSGSRYLIRSDDMIETVYNDRGEIVKTKERRVFMLNDVLMCATVSSRPSHDSRVMSSQRYLLKWSVPLGHVDAIEYGSSAGTGEHSRHLAVHPPESLAVVANAKPNKVYMGPGQLYQDLQNLLHDLNVIGQITQLIGNLKGNYQNLNQSVAHDWTSGLQRLILKKEDEIRAADCCRIQLQLPGKQDKSGRPTFFTAVFNTFTPAIKESWVNSLQMAKLALEEENHMGWFCVEDDGNHIKKEKHPLLVGHMPVMVAKQQEFKIECAAYNPEPYLNNESQPDSFSTAHGFLWIGSCTHQMGQIAIVSFQNSTPKVIECFNVESRILCMLYVPVEEKRREPGAPPDPETPAVRASDVPTICVGTEEGSISIYKSSQGSKKVRLQHFFTPEKSTVMSLACTSQSLYAGLVNGAVASYARAPDGSWDSEPQKVIKLGVLPVRSLLMMEDTLWAASGGQVFIISVETHAVEGQLEAHQEEGMVISHMAVSGVGIWIAFTSGSTLRLFHTETLKHLQDINIATPVHNMLPGHQRLSVTSLLVCHGLLMVGTSLGVLVALPVPRLQGIPKVTGRGMVSYHAHNSPVKFIVLATALHEKDKDKSRDSLAPGPEPQDEDQKDALPSGGAGSSLSQGDPDAAIWLGDSLGSMTQKSDLSSSSGSLSLSHGSSSLEHRSEDSTIYDLLKDPVSLRSKARRAKKAKASSALVVCGGQGHRRVHRKARQPHQEELAPTVMVWQIPLLNI

SEQ ID NO: 36482 - protein, 393 aa, Artificial Sequence
  Synthetic polypeptide
GRACVALVLLAAAVSCAVAQHAPPWTEDCRKSTYPPSGPTYRGAVPWYTINLDLPPYKRWHELMLDKAPVLKVIVNSLKNMINTFVPSGKIMQVVDEKLPGLLGNFPGPFEEEMKGIAAVTDIPLGEIISFNIFYELFTICTSIVAEDKKGHLIHGRNMDFGVFLGWNINNDTWVITEQLKPLTVNLDFQRNNKTVFKASSFAGYVGMLTGFKPGLFSLTLNERFSINGGYLGILEWILGKKDVMWIGFLTRTVLENSTSYEEAKNLLTKTKILAPAYFILGGNQSGEGCVITRDRKESLDVYELDAKQGRWYVVQTNYDRWKHPFFLDDRRTPAKMCLNRTSQENISFETMYDVLSTKPVLNKLTVYTTLIDVTKGQFETYLRDCPDPCIGW

SEQ ID NO: 36483 - protein, 6 aa, Artificial Sequence
  Synthetic polypeptide
AGLASP

SEQ ID NO: 36484 - protein, 51 aa, Artificial Sequence
  Synthetic polypeptide
PGLRRLSPPGCRRQLCRRAARAAVDRGLQKINLSSFRTNVQRCSSMVHHKS

SEQ ID NO: 36485 - protein, 368 aa, Artificial Sequence
  Synthetic polypeptide
GRACVALVLLAAAVSCAVAQHAPPWTEDCRKSTYPPSGPTYRGAVPWYTINLDLPPYKRWHELMLDKAPVLKVIVNSLKNMINTFVPSGKIMQVVDEKLPGLLGNFPGPFEEEMKGIAAVTDIPLGHLIHGRNMDFGVFLGWNINNDTWVITEQLKPLTVNLDFQRNNKTVFKASSFAGYVGMLTGFKPGLFSLTLNERFSINGGYLGILEWILGKKDVMWIGFLTRTVLENSTSYEEAKNLLTKTKILAPAYFILGGNQSGEGCVITRDRKESLDVYELDAKQGRWYVVQTNYDRWKHPFFLDDRRTPAKMCLNRTSQENISFETMYDVLSTKPVLNKLTVYTTLIDVTKGQFETYLRDCPDPCIGW

SEQ ID NO: 36486 - protein, 756 aa, Artificial Sequence
  Synthetic polypeptide
EFLTGVDGGLRESHTNVEILLSSGSRYLIRSDDMIETVYNDRGEIVKTKERRVFMLNDVLMCATVSSRPSHDSRVMSSQRYLLKWSVPLGHVDAIEYGSSAGTGEHSRHLAVHPPESLAVVANAKPNKVYMGPGQLYQDLQNLLHDLNVIGQITQLIGNLKGNYQNLNQSVAHDWTSGLQRLILKKEDEIRAADCCRIQLQLPGKQDKSGRPTFFTAVFNTFTPAIKESWVNSLQMAKLALEEENHMGWFCVEDDGNHIKKEKHPLLVGHMPVMVAKQQEFKIECAAYNPEPYLNNESQPDSFSTAHGFLWIGSCTHQMGQIAIVSFQNSTPKVIECFNVESRILCMLYVPVEEKRREPGAPPDPETPAVRASDVPTICVGTEEGSISIYKSSQGSKKVRLQHFFTPEKSTVMSLACTSQSLYAGLVNGAVASYARAPDGSWDSEPQKVIKLGVLPVRSLLMMEDTLWAASGGQVFIISVETHAVEGQLEAHQEEGMVISHMAVSGVGIWIAFTSGSTLRLFHTETLKHLQDINIATPVHNMLPGHQRLSVTSLLVCHGLLMVGTSLGVLVALPVPRLQGIPKVTGRGMVSYHAHNSPVKFIVLATALHEKDKDKSRDSLAPGPEPQDEDQKDALPSGGAGSSLSQGDPDAAIWLGDSLGSMTQKSDLSSSSGSLSLSHGSSSLEHRSEDSTIYDLLKDPVSLRSKARRAKKAKASSALVVCGGQGHRRVHRKARQPHQEELAPTVMVWQIPLLNI

SEQ ID NO: 36487 - protein, 30 aa, Artificial Sequence
  Synthetic polypeptide
PGWMEAFGRVTPMWKFFSAVEADTSFDQMI

SEQ ID NO: 36488 - protein, 31 aa, Artificial Sequence
  Synthetic polypeptide
VLNRGGWRPSGESHQCGNSSQQWKPIPHSIR

SEQ ID NO: 36489 - protein, 727 aa, Artificial Sequence
  Synthetic polypeptide
EFLTGVDGGLRESHTNVEILLSSGSRYLIRSDDMIETVYNDRGEIVKTKERRVFMLNDVLMCATVSSRPSHDSRVMSSQRYLLKWSVPLGHVDAIEYGSSAGTGEHSRHLAVHPPESLAVVANAKPNKVYMGPGQLYQDLQNLLHDLNVIGQITQLIGNLKGNYQNLNQSVAHDWTSGLQRLILKKEDEIRAADCCRIQLQLPGKQDKSGRPTFFTAVFNTFTPAIKESWVNSLQMAKLALEEENHMGWFCVEDDGNHIKKEKHPLLVGHMPVMVAKQQEFKIGSCTHQMGQIAIVSFQNSTPKVIECFNVESRILCMLYVPVEEKRREPGAPPDPETPAVRASDVPTICVGTEEGSISIYKSSQGSKKVRLQHFFTPEKSTVMSLACTSQSLYAGLVNGAVASYARAPDGSWDSEPQKVIKLGVLPVRSLLMMEDTLWAASGGQVFIISVETHAVEGQLEAHQEEGMVISHMAVSGVGIWIAFTSGSTLRLFHTETLKHLQDINIATPVHNMLPGHQRLSVTSLLVCHGLLMVGTSLGVLVALPVPRLQGIPKVTGRGMVSYHAHNSPVKFIVLATALHEKDKDKSRDSLAPGPEPQDEDQKDALPSGGAGSSLSQGDPDAAIWLGDSLGSMTQKSDLSSSSGSLSLSHGSSSLEHRSEDSTIYDLLKDPVSLRSKARRAKKAKASSALVVCGGQGHRRVHRKARQPHQEELAPTVMVWQIPLLNI

SEQ ID NO: 36490 - protein, 45 aa, Artificial Sequence
  Synthetic polypeptide
QAWWLMPVIPALWEAEAGGSQDRKLHPSNGSDCHRLVSKFHSQSH

SEQ ID NO: 36491 - protein, 458 aa, Artificial Sequence
  Synthetic polypeptide
SQHFGRPRRVDHKIGSCTHQMGQIAIVSFQNSTPKVIECFNVESRILCMLYVPVEEKRREPGAPPDPETPAVRASDVPTICVGTEEGSISIYKSSQGSKKVRLQHFFTPEKSTVMSLACTSQSLYAGLVNGAVASYARAPDGSWDSEPQKVIKLGVLPVRSLLMMEDTLWAASGGQVFIISVETHAVEGQLEAHQEEGMVISHMAVSGVGIWIAFTSGSTLRLFHTETLKHLQDINIATPVHNMLPGHQRLSVTSLLVCHGLLMVGTSLGVLVALPVPRLQGIPKVTGRGMVSYHAHNSPVKFIVLATALHEKDKDKSRDSLAPGPEPQDEDQKDALPSGGAGSSLSQGDPDAAIWLGDSLGSMTQKSDLSSSSGSLSLSHGSSSLEHRSEDSTIYDLLKDPVSLRSKARRAKKAKASSALVVCGGQGHRRVHRKARQPHQEELAPTVMVWQIPLLNI

SEQ ID NO: 36492 - protein, 79 aa, Artificial Sequence
  Synthetic polypeptide
GVVAHACNPSTLGGRGGWITRSEVAPIKWVRLPSSRFKIPLPKSLSASTWNLASCACCTFPSRRSAESLGHPRTPRPRP

SEQ ID NO: 36493 - protein, 71 aa, Artificial Sequence
  Synthetic polypeptide
QWFTKKMAPVPATSASPEKLLENADSQAPQTYGIRNSGMDPSSTCFTWCCRDICLGEQCICTFPECCQGQI

SEQ ID NO: 36494 - protein, 1068 aa, Artificial Sequence
  Synthetic polypeptide
KMQIRRPHRPTASETLGWTPAVRVLLGAAETFVWVNNASAHSQSVAKAKYEFLFGRSEGKAPDTSDHGGSTLLPPNVTNEFPEYGTMEEGGEGLRASLEFDGEALPCHPQEQQGVQPLTGCHSGLDSVTEGPKDVREAPSQSHLKEQSLQPIDSLISALKATEARIISGTLQATKVLDQDAVSSFSVQQVEKELDTASRKTQRVNKTLPAGQKNLPEIPLSAEVTTEESFYLSIQKDLTALLTGDTQAEISQIMNNGRKGAVCVQEPSCPLASLGSSAVTCHSAGSVGFLKEQRSALGREHPGGCDRSSSMGRPGRVKHVEFQGVEILWTGGDKRETQHPIDFETSLQRTASPDSKESSKVPRHLISSAGLCNSSSLTENVWDESWKAPSERPGTSSGTFSPVRLDESGEDEVFLQENKQHLEKTPKPERDRERISEQEEHVKGEDEDILGPGYTEDSTDVYSSQFETILDNTSLYYSAESLETLYSEPDSYFSFEMPLTPMIQQRIKEGGQFLERTSGGGHQDILSVSADGGIVMGYSSGVTNGLNDASDSIYTKGTPEIAFWGSNAGVKTTRLEAHSEMGSTEILEKETPENLSNGTSSNVEAAKRLAKRLYQLDRFKRSDVAKHLGKNNEFSKLVAEEYLKFFDFTGMTLDQSLRYFFKAFSLVGETQERERVLIHFSNRYFYCNPDTIASQDGVHCLTCAIMLLNTDLHGHNIGKKMTCQEFIANLQGVNEGVDFSKDLLKALYNSIKNEKLEWAVDDEEKKKSPSESTEEKANGTHPKTISRIGSTTNPFLDIPHDPNAAVYKSGFLARKIHADMDGKKTPRGKRGWKTFYAVLKGTVLYLQKDEYKPEKALSEEDLKNAVSVHHALASKATDYEKKPNVFKLKTADWRVLLFQTQSPEEMQGWINKINCVAAVFSAPPFPAAIGSQKKFSRPLLPATTTKLSQEEQLKSHESKLKQITTELAEHRSYPPDKKVKAKDVDEYKLKDHYLEFEKTRYEMYVSILKEGGKELLSNDESEAAGLKKSHSSPSLNPDTSPITAKVKRNVSERKDHRPETPSIKQKVT

SEQ ID NO: 36495 - protein, 38 aa, Artificial Sequence
  Synthetic polypeptide
KIVRKCRFAGPTDLRHQKLWDGPQQYVFYLVLQRHLFG

SEQ ID NO: 36496 - protein, 1070 aa, Artificial Sequence
  Synthetic polypeptide
KMQIRRPHRPTASETLGWTPAVRVLLGAAETFVWVNNASAHSQSVAKAKYEFLFGRSEGKAPDTSDHGGSTLLPPNVTNEFPEYGTMEEGGEGLRASLEFDGEALPCHPQEQQGVQPLTGCHSGLDSVTEGPKDVREAPSQSHLKEQSLQPIDSLISALKATEARIISGTLQATKVLDQDAVSSFSVQQVEKELDTASRKTQRVNKTLPAGQKNLPEIPLSAEVTTEESFYLSIQKDLTALLTGDTQAEISQIMNNGRKGAVCVQEPSCPLASLGSSAVTCHSAGSVGFLKEQRSALGREHPGGCDRSSSMGRPGRVKHVEFQGVEILWTGGDKRETQHPIDFETSLQRTASPDSKESSKVPRHLISSAGLCNSSSLTENVWDESWKAPSERPGTSSGTFSPVRLDESGEDEVFLQENKQHLEKTPKPERDRERISEQEEHVKGEDEDILGPGYTEDSTDVYSSQFETILDNTSLYYSAESLETLYSEPDSYFSFEMPLTPMIQQRIKEGGQFLERTSGGGHQDILSVSADGGIVMGYSSGVTNGLNDASDSIYTKGTPEIAFWGSNAGVKTTRLEAHSEMGSTEILEKETPENLSNGTSSNVEAAKRLAKRLYQLDRFKRSDVAKHLGKNNEFSKLVAEEYLKFFDFTGMTLDQSLRYFFKAFSLVGETQERERVLIHFSNRYFYCNPDTIASQDGVHCLTCAIMLLNTDLHGHVSNIGKKMTCQEFIANLQGVNEGVDFSKDLLKALYNSIKNEKLEWAVDDEEKKKSPSESTEEKANGTHPKTISRIGSTTNPFLDIPHDPNAAVYKSGFLARKIHADMDGKKTPRGKRGWKTFYAVLKGTVLYLQKDEYKPEKALSEEDLKNAVSVHHALASKATDYEKKPNVFKLKTADWRVLLFQTQSPEEMQGWINKINCVAAVFSAPPFPAAIGSQKKFSRPLLPATTTKLSQEEQLKSHESKLKQITTELAEHRSYPPDKKVKAKDVDEYKLKDHYLEFEKTRYEMYVSILKEGGKELLSNDESEAAGLKKSHSSPSLNPDTSPITAKVKRNVSERKDHRPETPSIKQKVT

SEQ ID NO: 36497 - protein, 62 aa, Artificial Sequence
  Synthetic polypeptide
KMQIRRPHRPTASETLGWTPAVRVLLGAAETFVWVNNASAHSQSVAKAKYEFLFGRSEGKAP

SEQ ID NO: 36498 - protein, 27 aa, Artificial Sequence
  Synthetic polypeptide
LAKCCVLYKVFTFLPEHTRQYLESMVH

SEQ ID NO: 36499 - protein, 32 aa, Artificial Sequence
  Synthetic polypeptide
LNAASSIKFLLFSLSIQDSIWSQWSTSDLRSC

SEQ ID NO: 36500 - protein, 237 aa, Artificial Sequence
  Synthetic polypeptide
GAPLPGRDPVWEVRSISARPPCLRSEETLCLAAAPSEKSRLADFHANCRASYQTVTSCPADNYQACLGSYAGMIGFDMTPNYVDSSPTGIVVSPWCSCRGSGNMEEECEKFLRDFTENPCLRNAIQAFGNGTDVNVSPKGPSFQATQAPRVEKTPSLPDDLSDSTSLGTSVITTCTSVQEQGLKANNSKELSMCFTELTTNIIPGSNKVIKPNSGPSRARPSAALTVLSVLMLKLAL

SEQ ID NO: 36501 - protein, 59 aa, Artificial Sequence
  Synthetic polypeptide
GASLPGRPVCEVRRPSAWQPPRLRSPGWPTSMPIVEPPTRRSPAALRTITRRVWALMLA

SEQ ID NO: 36502 - protein, 39 aa, Artificial Sequence
  Synthetic polypeptide
EVPAGRLPCQLSSLLPDGHQLPCGQLPGVSGLLCWHDWV

SEQ ID NO: 36503 - protein, 38 aa, Artificial Sequence
  Synthetic polypeptide
GAPLPGRDPVWEVRSISARPPCLRSEETLCLAAAPSEK

SEQ ID NO: 36504 - protein, 25 aa, Artificial Sequence
  Synthetic polypeptide
GASLPGRPVCEVRRPSAWQPPRLRS

SEQ ID NO: 36505 - protein, 50 aa, Artificial Sequence
  Synthetic polypeptide
GAPLPGRDPVWEVPAGRLPCQLSSLLPDGHQLPCGQLPGVSGLLCWHDWV

SEQ ID NO: 36506 - protein, 226 aa, Artificial Sequence
  Synthetic polypeptide
DVGSASAPPPRLGCEERLCPAATPSGRSRLADFHANCRASYQTVTSCPADNYQACLGSYAGMIGFDMTPNYVDSSPTGIVVSPWCSCRGSGNMEEECEKFLRDFTENPCLRNAIQAFGNGTDVNVSPKGPSFQATQAPRVEKTPSLPDDLSDSTSLGTSVITTCTSVQEQGLKANNSKELSMCFTELTTNIIPGSNKVIKPNSGPSRARPSAALTVLSVLMLKLAL

SEQ ID NO: 36507 - protein, 72 aa, Artificial Sequence
  Synthetic polypeptide
GASLPGRPSSEMWGAPLPRRPVWDVRSASARPRPRLGGPGWPTSMPIVEPPTRRSPAALRTITRRVWALMLA

SEQ ID NO: 36508 - protein, 27 aa, Artificial Sequence
  Synthetic polypeptide
DVGSASAPPPRLGCEERLCPAATPSGR

SEQ ID NO: 36509 - protein, 38 aa, Artificial Sequence
  Synthetic polypeptide
GASLPGRPSSEMWGAPLPRRPVWDVRSASARPRPRLGG

SEQ ID NO: 36510 - protein, 209 aa, Artificial Sequence
  Synthetic polypeptide
SLALGEHSIRSRLADFHANCRASYQTVTSCPADNYQACLGSYAGMIGFDMTPNYVDSSPTGIVVSPWCSCRGSGNMEEECEKFLRDFTENPCLRNAIQAFGNGTDVNVSPKGPSFQATQAPRVEKTPSLPDDLSDSTSLGTSVITTCTSVQEQGLKANNSKELSMCFTELTTNIIPGSNKVIKPNSGPSRARPSAALTVLSVLMLKLAL

SEQ ID NO: 36511 - protein, 42 aa, Artificial Sequence
  Synthetic polypeptide
AFHKVPAGRLPCQLSSLLPDGHQLPCGQLPGVSGLLCWHDWV

SEQ ID NO: 36512 - protein, 10 aa, Artificial Sequence
  Synthetic polypeptide
SLALGEHSIR

SEQ ID NO: 36513 - protein, 28 aa, Artificial Sequence
  Synthetic polypeptide
PGMVAHTCCPSTLGGRGGRITSLAPGNV

SEQ ID NO: 36514 - protein, 126 aa, Artificial Sequence
  Synthetic polypeptide
PAWWLTPVVLALWEAEAGGSQALHQGTSKSSSLPAYGRTTLSRLQSTEFSPSGSETGSPGLQIYPYEMLVVTNKGRTKLPPGVDRMRLERHLSAEDFSRVFAMSPEEFGKLALWKRNELKKKASLF

SEQ ID NO: 36515 - protein, 30 aa, Artificial Sequence
  Synthetic polypeptide
HFGRPRRADHKPCTRERLNLPLSPPMAGPP

SEQ ID NO: 36516 - protein, 148 aa, Artificial Sequence
  Synthetic polypeptide
PAWWLTPVVLALWEAEAGGSQALHQGTSKSSSLPAYGRTTLSRLQSTEFSPSGSETGSPGLQNGEGQRGRMDRGNSLPCVLEQKIYPYEMLVVTNKGRTKLPPGVDRMRLERHLSAEDFSRVFAMSPEEFGKLALWKRNELKKKASLF

SEQ ID NO: 36517 - protein, 69 aa, Artificial Sequence
  Synthetic polypeptide
PAWWLTPVVLALWEAEAGGSQALHQGTSKSSSLPAYGRTTLSRLQSTEFSPSGSETGSPGLQIYPYEML

SEQ ID NO: 36518 - protein, 17 aa, Artificial Sequence
  Synthetic polypeptide
AEMVPLHSSLSDARAQH

SEQ ID NO: 36519 - protein, 37 aa, Artificial Sequence
  Synthetic polypeptide
SQQLGRQENHLNPGSGGYSELRWCHCTLASVTREPSI

SEQ ID NO: 36520 - protein, 760 aa, Artificial Sequence
  Synthetic polypeptide
SQQLGRQENHLNPGSGGYSELRWCHCTLASVTREPSIDLLQAFVEHWKGITHYYIESTDESTPAKKTDIPWRLKQMLDILVYEEQQQAAAGEAGPCLEYLLQHKILETLCTLGKAEYPPGMRQQVFQFFSKVLAQVQHPLLHYLSVHRPVQKLLRLGGTASGSVTEKEEVQFTTVLCSKIQQDPELLAYILEGKKIVGRKKACGEPTALPKDTTSHGDKDCSHDGAPARPQLDGESCGAQALNSHMPAETEELDGGTTESNLITSLLGLCQSKKSRVALKAQENLLLLVSMASPAAATYLVQSSACCPAIVRHLCQLYRSMPVFLDPADIATLEGISWRLPSAPSDEASFPGKEALAAFLGWFDYCDHLITEAHTVVADALAKAVAENFFVETLQPQLLHVSEQSILTSTALLTAMLRQLRSPALLREAVAFLLGTDRQPEAPGDNPHTLYAHLIGHCDHLSDEISITTLRLFEELLQKPHEGIIHSLVLRNLEGRPYVAWGSPEPESYEDTLDLEEDPYFTDSFLDSGFQTPAKPRLAPATSYDGKTAVTEIVNSFLCLVPEEAKTSAFLEETGYDTYVHDAYGLFQECSSRVASWGWPLTPTPLDPHEPERPFFEGHFLRVLFDRMSRILDQPYSLNLQVTSVLSRLALFPHPHIHEYLLDPYISLAPGCRSLFSVLVRVIGDLMQRIQRVPQFPGKLLLVRKQLTGQAPGEQLDHQTLLQGVVVLEEFCKELAAIAFVKFPPHDPRQNVSPAPEGQV

SEQ ID NO: 36521 - protein, 15 aa, Artificial Sequence
  Synthetic polypeptide
ALIAPLHSTLGGERL

SEQ ID NO: 36522 - protein, 44 aa, Artificial Sequence
  Synthetic polypeptide
AHEFEATVSSDCTTALHPRWRETLKGSMENFSSWKSRPGGCRKT

SEQ ID NO: 36523 - protein, 405 aa, Artificial Sequence
  Synthetic polypeptide
SDLTDSIFLLTYKVSAESALITQQDLAPQQRAAPQQKRSSPSEGLCPPGHHISEDGRDCISCKYGQDYSTHWNDLLFCLRCTRCDSGEVELSPCTTTRNTVCQCEEGTFREEDSPEMCRKCRTGCPRGMVKVGDCTPWSDIECVHKESGTKHSGEVPAVEETVTSSPGTPASPCSLSGIIIGVTVAAVVLIVAVFVCKSLLWKKVLPYLKGICSGGGGDPERVDRSSQRPGAEDNVLNEIVSILQPTQVPEQEMEVQEPAEPTGVNMLSPGESEHLLEPAEAERSQRRRLLVPANEGDPTETLRQCFDDFADLVPFDSWEPLMRKLGLMDNEIKVAKAEAAGHRDTLYTMLIKWVNKTGRDASVHTLLDALETLGERLAKQKIEDHLLSSGKFMYLEGNADSAMS

SEQ ID NO: 36524 - protein, 9 aa, Artificial Sequence
  Synthetic polypeptide
PTRSQLSLL

SEQ ID NO: 36525 - protein, 11 aa, Artificial Sequence
  Synthetic polypeptide
LHLPSNLQGLS

SEQ ID NO: 36526 - protein, 376 aa, Artificial Sequence
  Synthetic polypeptide
SDLTDSIFLLTYKVSAESALITQQDLAPQQRAAPQQKRSSPSEGLCPPGHHISEDGRDCISCKYGQDYSTHWNDLLFCLRCTRCDSGEVELSPCTTTRNTVCQCEEGTFREEDSPEMCRKCRTGCPRGMVKVGDCTPWSDIECVHKESGIIIGVTVAAVVLIVAVFVCKSLLWKKVLPYLKGICSGGGGDPERVDRSSQRPGAEDNVLNEIVSILQPTQVPEQEMEVQEPAEPTGVNMLSPGESEHLLEPAEAERSQRRRLLVPANEGDPTETLRQCFDDFADLVPFDSWEPLMRKLGLMDNEIKVAKAEAAGHRDTLYTMLIKWVNKTGRDASVHTLLDALETLGERLAKQKIEDHLLSSGKFMYLEGNADSAMS

SEQ ID NO: 36527 - protein, 17 aa, Artificial Sequence
  Synthetic polypeptide
SILKDPGPGSPGLGSWS

SEQ ID NO: 36528 - protein, 50 aa, Artificial Sequence
  Synthetic polypeptide
KIQGQVPQDWGVGPSLLCHHCPAGGSSPADSGPTATEAQLQGGGVSSRIS

SEQ ID NO: 36529 - protein, 262 aa, Artificial Sequence
  Synthetic polypeptide
HNALLSMKHPERSRARFPRIGELVLAYSATTARQEEVPQQTVAPQQQRHSFKGEECPAGSHRSEHTGACNPCTEGVDYTNASNNEPSCFPCTVCKSDQKHKSSCTMTRDTVCQCKEGTFRNENSPEMCRKCSRCPSGEVQVSNCTSWDDIQCVEEFGANATVETPAAEETMNTSPGTPAPAAEETMNTSPGTPAPAAEETMTTSPGTPAPAAEETMTTSPGTPAPAAEETMITSPGTPASSHYLSCTIVGIIVLIVLLIVFV

SEQ ID NO: 36530 - protein, 313 aa, Artificial Sequence
  Synthetic polypeptide
PSPEDSFMLLDFPASRTEKAEEVYRLYQNSPLSSHPVVALSELSTLCANSCPDERTFYLVLLQLQKEKRVTVLEQNGEKIVKFARGPRAKVSPVNDVDVGVYQLMQSEQLLSRKVESLSQEAERCKEEARRACRAGKKQLALRSLKAKQRTEKRIEALHAKLDTVQGILDRIYASQTDQMVFNAYQAGVGALKLSMKDVTVEKAESLVDQIQELCDTQDEVSQTLAGGVTNGLDFDSEELEKELDILLQDTTKEPLDLPDNPRNRHFTNSVPNPRISDAELEAELEKLSLSEGGLVPSSKSPKRQLEPTLKPL

SEQ ID NO: 36531 - protein, 104 aa, Artificial Sequence
  Synthetic polypeptide
VWHDFLPLSHLGLLRPSALLLCGDPHQRTASCSWTSQPQELKRLRRCIVCIRTRPSPPTPWWPCQSSAPSVLTPAQMRGPSTWCCCSCRRRRGSQSSSRTGRRL

SEQ ID NO: 36532 - protein, 56 aa, Artificial Sequence
  Synthetic polypeptide
PSPEDSFMLLDFPASRTEKAEEVYRLYQNSPLSSHPVVALSELSTLCANSCPDERT

SEQ ID NO: 36533 - protein, 80 aa, Artificial Sequence
  Synthetic polypeptide
VWHDFLPLSHLGLLRPSALLLCGDPHQRTASCSWTSQPQELKRLRRCIVCIRTRPSPPTPWWPCQSSAPSVLTPAQMRGP

SEQ ID NO: 36534 - protein, 81 aa, Artificial Sequence
  Synthetic polypeptide
PSPEDSFMLLDFPASRTEKAEEVYRLYQNSPLSSHPVVALSELSTLCANSCPDERTFYLVLLQLQKEKRVTVLEQNGEKIV

SEQ ID NO: 36535 - protein, 161 aa, Artificial Sequence
  Synthetic polypeptide
SQHFGRRRRVDHLRHYHSMEVFTHYDLLNLNGTKVAEGHKASFCLEDTECEGDIQKNYECANFGDQGITMGCWDMYRHDIDCQWVDITDVPPGDYLFQVVINPNFEVAESDYSNNIMKCRSRYDGHRIWMYNCHIGGSFSEETEKKFEHFSGLLNNQLSPQ

SEQ ID NO: 36536 - protein, 32 aa, Artificial Sequence
  Synthetic polypeptide
TQWLTPVITALWETEASGSLEALPQHGGVHPL

SEQ ID NO: 36537 - protein, 78 aa, Artificial Sequence
  Synthetic polypeptide
QDGQIGTASVYVCQREQRRRWVISAFPTEKAPAASVPRLSLPAAQGPFVGSSARRQGWRGLCAPTSAAAWLCWPSCPP

SEQ ID NO: 36538 - protein, 61 aa, Artificial Sequence
  Synthetic polypeptide
FLHFQLRKLLLLLYPACPSQLRRAPSWDHQPEDRDGEASVLPPLQLPGYAGPPVPPEPGTV

SEQ ID NO: 36539 - protein, 83 aa, Artificial Sequence
  Synthetic polypeptide
LPPHSYLLPWFRDLDVSSSLRSQTAQVKNTNAEFESRSQSPVHKYLRSPQENHADRRLLEALARRQRHDHGCRAGPCHVFCLL

SEQ ID NO: 36540 - protein, 276 aa, Artificial Sequence
  Synthetic polypeptide
DPRLPKLKTRMQSLSPDPKAQYTSIYGALKKIMRTEGFWRPLRGVNVMIMGAGPAHAMYFACYENMKRTLNDVFHHQGNSHLANGIAGSMATLLHDAVMNPAEVVKQRLQMYNSQHRSAISCIRTVWRTEGLGAFYRSYTTQLTMNIPFQSIHFITYEFLQEQVNPHRTYNPQSHIISGGLAGALAAAATTPLDVCKTLLNTQENVALSLANISGRLSGMANAFRTVYQLNGLAGYFKGIQARVIYQMPSTAISWSVYEFFKYFLTKRQLENRAPY

SEQ ID NO: 36541 - protein, 97 aa, Artificial Sequence
  Synthetic polypeptide
DPRLPKLKTRMQSLSPDPKAQYTSIYGALKKIMRTEGFWRPLRGVNVMIMGAGPAHAMYFACYENMKRTLNDVFHHQGNSHLANGSRNFLRTPDRRG

SEQ ID NO: 36542 - protein, 93 aa, Artificial Sequence
  Synthetic polypeptide
DPRLPKLKTRMQSLSPDPKAQYTSIYGALKKIMRTEGFWRPLRGVNVMIMGAGPAHAMYFACYENMKRTLNDVFHHQGNSHLANGILKAFVWS

SEQ ID NO: 36543 - protein, 110 aa, Artificial Sequence
  Synthetic polypeptide
DPRLPKLKTRMQSLSPDPKAQYTSIYGALKKIMRTEGFWRPLRGVNVMIMGAGPAHAMYFACYENMKRTLNDVFHHQGNSHLANGIAGSMATLLHDAVMNPAEVHPLHHL

SEQ ID NO: 36544 - protein, 47 aa, Artificial Sequence
  Synthetic polypeptide
KSLRQVLQEGFQKKALRSQEVPAALGQDVEVEDSDIDDPDPLHECRV

SEQ ID NO: 36545 - protein, 100 aa, Artificial Sequence
  Synthetic polypeptide
VNCKRASGRSFRRDSRRRHCDHRRCQLHWDKMWRWKTVILMILTLYTNAEFESRSQSPVHKYLRSPQENHADRRLLEALARRQRHDHGCRAGPCHVFCLL

SEQ ID NO: 36546 - protein, 270 aa, Artificial Sequence
  Synthetic polypeptide
PSTRMQSLSPDPKAQYTSIYGALKKIMRTEGFWRPLRGVNVMIMGAGPAHAMYFACYENMKRTLNDVFHHQGNSHLANGIAGSMATLLHDAVMNPAEVVKQRLQMYNSQHRSAISCIRTVWRTEGLGAFYRSYTTQLTMNIPFQSIHFITYEFLQEQVNPHRTYNPQSHIISGGLAGALAAAATTPLDVCKTLLNTQENVALSLANISGRLSGMANAFRTVYQLNGLAGYFKGIQARVIYQMPSTAISWSVYEFFKYFLTKRQLENRAPY

SEQ ID NO: 36547 - protein, 91 aa, Artificial Sequence
  Synthetic polypeptide
PSTRMQSLSPDPKAQYTSIYGALKKIMRTEGFWRPLRGVNVMIMGAGPAHAMYFACYENMKRTLNDVFHHQGNSHLANGSRNFLRTPDRRG

SEQ ID NO: 36548 - protein, 87 aa, Artificial Sequence
  Synthetic polypeptide
PSTRMQSLSPDPKAQYTSIYGALKKIMRTEGFWRPLRGVNVMIMGAGPAHAMYFACYENMKRTLNDVFHHQGNSHLANGILKAFVWS

SEQ ID NO: 36549 - protein, 104 aa, Artificial Sequence
  Synthetic polypeptide
PSTRMQSLSPDPKAQYTSIYGALKKIMRTEGFWRPLRGVNVMIMGAGPAHAMYFACYENMKRTLNDVFHHQGNSHLANGIAGSMATLLHDAVMNPAEVHPLHHL

SEQ ID NO: 36550 - protein, 63 aa, Artificial Sequence
  Synthetic polypeptide
VTWILRALLGRHLPWWNASSERCTAGPRRGSTQWLNTRKELALGVWTCETCKCYKRTPWGEEV

SEQ ID NO: 36551 - protein, 775 aa, Artificial Sequence
  Synthetic polypeptide
TPGRNWHLESGHVKLVSAIKELPGVKKYEVVYPIRLHPLHKREAKEPEQQEQFETELKYKMTINGKIAVLYLKKNKNLLAPGYTETYYNSTGKEITTSPQIMDDCYYQGHILNEKVSDASISTCRGLRGYFSQGDQRYFIEPLSPIHRDGQEHALFKYNPDEKNYDSTCGMDGVLWAHDLQQNIALPATKLVKLKDRKVQEHEKYIEYYLVLDNGEFKRYNENQDEIRKRVFEMANYVNMLYKKLNTHVALVGMEIWTDKDKIKITPNASFTLENFSKWRGSVLSRRKRHDIAQLITATELAGTTVGLAFMSTMCSPYSVGVVQDHSDNLLRVAGTMAHEMGHNFGMFHDDYSCKCPSTICVMDKALSFYIPTDFSSCSRLSYDKFFEDKLSNCLFNAPLPTDIISTPICGNQLVEMGEDCDCGTSEECTNICCDAKTCKIKATFQCALGECCEKCQFKKAGMVCRPAKDECDLPEMCNGKSGNCPDDRFQVNGFPCHHGKGHCLMGTCPTLQEQCTELWGPGTEVADKSCYNRNEGGSKYGYCRRVDDTLIPCKANDTMCGKLFCQGGSDNLPWKGRIVTFLTCKTFDPEDTSQEIGMVANGTKCGDNKVCINAECVDIEKAYKSTNCSSKCKGHAVCDHELQCQCEEGWIPPDCDDSSVVFHFSIVVGVLFPMAVIFVVVAMVIRHQSSREKQKKDQRPLSTTGTRPHKQKRKPQMVKAVQPQEMSQMKPHVYDLPVEGNEPPASFHKDTNALPPTVFKDNPVSTPKDSNPKA

SEQ ID NO: 36552 - protein, 58 aa, Artificial Sequence
  Synthetic polypeptide
TPGRNWHLESGHVKLVSAIKELPGVKKYEVVYPIRLHPLHKREAKEPEQQFLSSMKIS

SEQ ID NO: 36553 - protein, 217 aa, Artificial Sequence
  Synthetic polypeptide
TPGRNWHLESGHVKLVSAIKELPGVKKYEVVYPIRLHPLHKREAKEPEQQEQFETELKYKMTINGKIAVLYLKKNKNLLAPGYTETYYNSTGKEITTSPQIMDDCYYQGHILNEKVSDASISTCRGLRGYFSQGDQRYFIEPLSPIHRDGQEHALFKYNPDEKNYDSTCGMDGVLWAHDLQQNIALPATKLVKLKDRKVQEHEKYIEYYLVLDNGEF

SEQ ID NO: 36554 - protein, 540 aa, Artificial Sequence
  Synthetic polypeptide
TPGRNWHLESGHVKLVSAIKELPGVKKYEVVYPIRLHPLHKREAKEPEQQEQFETELKYKMTINGKIAVLYLKKNKNLLAPGYTETYYNSTGKEITTSPQIMDDCYYQGHILNEKVSDASISTCRGLRGYFSQGDQRYFIEPLSPIHRDGQEHALFKYNPDEKNYDSTCGMDGVLWAHDLQQNIALPATKLVKLKDRKVQEHEKYIEYYLVLDNGEFKRYNENQDEIRKRVFEMANYVNMLYKKLNTHVALVGMEIWTDKDKIKITPNASFTLENFSKWRGSVLSRRKRHDIAQLITATELAGTTVGLAFMSTMCSPYSVGVVQDHSDNLLRVAGTMAHEMGHNFGMFHDDYSCKCPSTICVMDKALSFYIPTDFSSCSRLSYDKFFEDKLSNCLFNAPLPTDIISTPICGNQLVEMGEDCDCGTSEECTNICCDAKTCKIKATFQCALGECCEKCQFKKAGMVCRPAKDECDLPEMCNGKSGNCPDDRFQVNGFPCHHGKGHCLMGTCPTLQEQCTELWGPGRRTNPFPCACAKENHFR

SEQ ID NO: 36555 - protein, 57 aa, Artificial Sequence
  Synthetic polypeptide
AWCLMPIILALWEAEVGGSFEARSSRPTGQIVTYQSCRTSICGASPSSVPSTPMASM

SEQ ID NO: 36556 - protein, 54 aa, Artificial Sequence
  Synthetic polypeptide
HINPAEPRFAGPVHLQYHPHLWPLCELQELCLQHRGRCRVVYGPLRPRPVHFYQ

SEQ ID NO: 36557 - protein, 161 aa, Artificial Sequence
  Synthetic polypeptide
GQEFKTNWANSDISILQNLDLRGQSIFSTIHTYGLYVNFKNFVCNIGEDAELFMALYDPDQSTFISENYLIRWGSNGMPKEIEKLNNLQAVFTDLSSMDLIRPRVSLVCQIVRVGHMELKEGKKHTCGLRRPFGVAVMDITDIIHGKVDDEEKQHFIPFQQ

SEQ ID NO: 36558 - protein, 1681 aa, Artificial Sequence
  Synthetic polypeptide
GQEFKTNWANSDISILQNLDLRGQSIFSTIHTYGLYVNFKNFVCNIGEDAELFMALYDPDQSTFISENYLIRWGSNGMPKEIEKLNNLQAVFTDLSSMDLIRPRVSLVCQIVRVGHMELKEGKKHTCGLRRPFGVAVMDITDIIHGKVDDEEKQHFIPFQQIAMETYIRQRQLIMSPLITSHVIGENEPLTSVLNKVIAAKEVNHKGQGLWVSLKLLPGDLTQVQKNFSHLVDRSTAIARKMGFPEIILPGDVRNDIYVTLIHGEFDKGKKKTPKNVEVTMSVHDEEGKLLEKAIHPGAGYEGISEYKSVVYYQVKQPCWYETVKVSIAIEEVTRCHIRFTFRHRSSQETRDKSERAFGVAFVKLMNPDGTTLQDGRHDLVVYKGDNKKMEDAKFYLTLPGTKMEMEEKELQASKNLVTFTPSKDSTKDSFQIATLICSTKLTQNVDLLGLLNWRSNSQNIKHNLKKLMEVDGGEIVKFLQDTLDALFNIMMEMSDSETYDFLVFDALVFIISLIGDIKFQHFNPVLETYIYKHFSATLAYVKLSKVLNFYVANADDSSKTELLFAALKALKYLFRFIIQSRVLYLRFYGQSKDGDEFNNSIRQLFLAFNMLMDRPLEEAVKIKGAALKYLPSIINDVKLVFDPVELSVLFCKFIQSIPDNQLVRQKLNCMTKIVESTLFRQSECREVLLPLLTDQLSGQLDDNSNKPDHEASSQLLSNILEVLDRKDVGATAVHIQLIMERLLRRINRTVIGMNRQSPHIGSFVACMIALLQQMDDSHYSHYISTFKTRQDIIDFLMETFIMFKDLIGKNVYAKDWMVMNMTQNRVFLRAINQFAEVLTRFFMDQASFELQLWNNYFHLAVAFLTHESLQLETFSQAKRNKIVKKYGDMRKEIGFRIRDMWYNLGPHKIKFIPSMVGPILEVTLTPEVELRKATIPIFFDMMQCEFNFSGNGNFHMFENELITKLDQEVEGGRGDEQYKVLLEKLLLEHCRKHKYLSSSGEVFALLVSSLLENLLDYRTIIMQDESKENRMSCTVNVLNFYKEKKREDIYIRYLYKLRDLHRDCENYTEAAYTLLLHAELLQWSDKPCVPHLLQKDSYYVYTQQELKEKLYQEIISYFDKGKMWEKAIKLSKELAETYESKVFDYEGLGNLLKKRASFYENIIKAMRPQPEYFAVGYYGQGFPSFLRNKIFIYRGKEYERREDFSLRLLTQFPNAEKMTSTTPPGEDIKSSPKQYMQCFTVKPVMSLPPSYKDKPVPEQILNYYRANEVQQFRYSRPFRKGEKDPDNEFATMWIERTTYTTAYTFPGILKWFEVKQISTEEISPLENAIETMELTNERISNCVQQHAWDRSLSVHPLSMLLSGIVDPAVMGGFSNYEKAFFTEKYLQEHPEDQEKVELLKRLIALQMPLLTEGIRIHGEKLTEQLKPLHERLSSCFRELKEKVEKHYGVITLPPNLTERKQSRTGSIVLPYIMSSTLRRLSITSVTSSVVSTSSNSSDNAPSRPGSDGSILEPLLERRASSGARVEDLSLREENSENRISKFKRKDWSLSKSQVIAEKAPEPDLMSPTRKAQRPKSLQLMDNRLSPFHGSSPPQSTPLSPPPLTPKATRTLSSPSLQTDGIAATPVPPPPPPKSKPYEGSQRNSTELAPPLPVRREAKAPPPPPPKARKSGIPTSEPGSQ

SEQ ID NO: 36559 - protein, 1090 aa, Artificial Sequence
  Synthetic polypeptide
HINPAEPRFAGPVHLQYHPHLWPLCELQELCLQHRGRCRVVYGPLRPRPVHFYQDLSSMDLIRPRVSLVCQIVRVGHMELKEGKKHTCGLRRPFGVAVMDITDIIHGKVDDEEKQHFIPFQQIAMETYIRQRQLIMSPLITSHVIGENEPLTSVLNKVIAAKEVNHKGQGLWVSLKLLPGDLTQVQKNFSHLVDRSTAIARKMGFPEIILPGDVRNDIYVTLIHGEFDKGKKKTPKNVEVTMSVHDEEGKLLEKAIHPGAGYEGISEYKSVVYYQVKQPCWYETVKVSIAIEEVTRCHIRFTFRHRSSQETRDKSERAFGVAFVKLMNPDGTTLQDGRHDLVVYKGDNKKMEDAKFYLTLPGTKMEMEEKELQASKNLVTFTPSKDSTKDSFQIATLICSTKLTQNVDLLGLLNWRSNSQNIKHNLKKLMEVDGGEIVKFLQDTLDALFNIMMEMSDSETYDFLVFDALVFIISLIGDIKFQHFNPVLETYIYKHFSATLAYVKLSKVLNFYVANADDSSKTELLFAALKALKYLFRFIIQSRVLYLRFYGQSKDGDEFNNSIRQLFLAFNMLMDRPLEEAVKIKGAALKYLPSIINDVKLVFDPVELSVLFCKFIQSIPDNQLVRQKLNCMTKIVESTLFRQSECREVLLPLLTDQLSGQLDDNSNKPDHEASSQLLSNILEVLDRKDVGATAVHIQLIMERLLRRINRTVIGMNRQSPHIGSFVACMIALLQQMDDSHYSHYISTFKTRQDIIDFLMETFIMFKDLIGKNVYAKDWMVMNMTQNRVFLRAINQFAEVLTRFFMDQASFELQLWNNYFHLAVAFLTHESLQLETFSQAKRNKIVKKYGDMRKEIGFRIRDMWYNLGPHKIKFIPSMVGPILEVTLTPEVELRKATIPIFFDMMQCEFNFSGNGNFHMFENELITKLDQEVEGGRGDEQYKVLLEKLLLEHCRKHKYLSSSGEVFALLVSSLLENLLDYRTIIMQDESKENRMSCTVNVLNFYKEKKREDIYIRYLYKLRDLHRDCENYTEAAYTLLLHAELLQVNGSESLFQQGGVQCPFRLNSIHFMILMGKNFIPGISFYTSFFSSF

SEQ ID NO: 36560 - protein, 91 aa, Artificial Sequence
  Synthetic polypeptide
GQEFKTNWANSDISILQNLDLRGQSIFSTIHTYGLYVNFKNFVCNIGEDAELFMALYDPDQSTFIRTLAAWTSSGPASALCARLSAWAIWS

SEQ ID NO: 36561 - protein, 18 aa, Artificial Sequence
  Synthetic polypeptide
LSPPVMILRPSQPCGTQI

SEQ ID NO: 36562 - protein, 16 aa, Artificial Sequence
  Synthetic polypeptide
GLPSHVELRYNFYSRI

SEQ ID NO: 36563 - protein, 438 aa, Artificial Sequence
  Synthetic polypeptide
EVTFTSRHDSEAFPAMWNSDIISTVEFNHSGELLATGDKGGRVVIFQQEQENKIQSHSRGEYNVYSTFQSHEPEFDYLKSLEIEEKINKIRWLPQKNAAQFLLSTNDKTIKLWKISERDKRPEGYNLKEEDGRYRDPTTVTTLRVPVFRPMDLMVEASPRRIFANAHTYHINSISINSDYETYLSADDLRINLWHLEITDRSFNIVDIKPANMEELTEVITAAEFHPNSCNTFVYSSSKGTIRLCDMRASALCDRHSKLFEEPEDPSNRSFFSEIISSISDVKFSHSGRYMMTRDYLSVKIWDLNMENRPVETYQVHEYLRSKLCSLYENDCIFDKFECCWNGSDSVVMTGSYNNFFRMFDRNTKRDITLEASRENNKPRTVLKPRKVCASGKRKKDEISVDSLDFNKKILHTAWHPKENIIAVATTNNLYIFQDKVN

SEQ ID NO: 36564 - protein, 123 aa, Artificial Sequence
  Synthetic polypeptide
EVTFTSRHDSEAFPAMWNSDIISTVEFNHSGELLATGDKGGRVVIFQQEQENKIQSHSRGEYNVYSTFQSHEPEFDYLKSLEIEEKINKIRWLPQKNAAQFLLSTNVQAGFSDSLPKNRIWQG

SEQ ID NO: 36565 - protein, 4 aa, Artificial Sequence
  Synthetic polypeptide
RHQL

SEQ ID NO: 36566 - protein, 356 aa, Artificial Sequence
  Synthetic polypeptide
KSHCIVEKPGKHCLNQMTQVNATSYKTIKLWKISERDKRPEGYNLKEEDGRYRDPTTVTTLRVPVFRPMDLMVEASPRRIFANAHTYHINSISINSDYETYLSADDLRINLWHLEITDRSFNIVDIKPANMEELTEVITAAEFHPNSCNTFVYSSSKGTIRLCDMRASALCDRHSKLFEEPEDPSNRSFFSEIISSISDVKFSHSGRYMMTRDYLSVKIWDLNMENRPVETYQVHEYLRSKLCSLYENDCIFDKFECCWNGSDSVVMTGSYNNFFRMFDRNTKRDITLEASRENNKPRTVLKPRKVCASGKRKKDEISVDSLDFNKKILHTAWHPKENIIAVATTNNLYIFQDKVN

SEQ ID NO: 36567 - protein, 10 aa, Artificial Sequence
  Synthetic polypeptide
PKLTPPAIKQ

SEQ ID NO: 36568 - protein, 27 aa, Artificial Sequence
  Synthetic polypeptide
LCHCTTAWVTMQDCLKRKTKVPGWSYP

SEQ ID NO: 36569 - protein, 24 aa, Artificial Sequence
  Synthetic polypeptide
QCKTVSKEKQKFLGGATHEQQQWQ

SEQ ID NO: 36570 - protein, 208 aa, Artificial Sequence
  Synthetic polypeptide
AVIVPLYYSLGDNARLSQKKNKSSWVELPMNSSNGNDNGNGKNGGLEHVPSSSSIHNGDMEKILLDAQHESGQSSSRGSSHCDSPSPQEDGQIMFDVEMHTSRDHSSQSEEEVVEGEKEVEALKKSADWVSDWSSRPENIPPKEFHFRHPKRSVSLSMRKSGAMKKGGIFSAEFLKVFIPSLFLSHVLALGLGIYIGKRLSTPSASTY

SEQ ID NO: 36571 - protein, 196 aa, Artificial Sequence
  Synthetic polypeptide
AVIVPLYYSLGDNARLSQKKNKSSWVELPMNSSNGNDNGNGKNGGLEHVPSSSSIHNGDMEKILLDAQHESGQSSSRGSSHCDSPSPQEDGQIMFDVEMHTSRDHSSQSEEEVVEGEKEVEALKKSADWVSDWSSRPENIPPKEFHFRHPKRSVSLSMRKSGAMKKGGIFSAEFLKVFIPSLFLSHVLALGLGCGN

SEQ ID NO: 36572 - protein, 53 aa, Artificial Sequence
  Synthetic polypeptide
DKLTTLFLSLGQACSLPLTSGGNGPTASPAVTTLCMWTSVSGIRASRRRWKRL

SEQ ID NO: 36573 - protein, 6 aa, Artificial Sequence
  Synthetic polypeptide
ASDEIS

SEQ ID NO: 36574 - protein, 50 aa, Artificial Sequence
  Synthetic polypeptide
PGVVLKMIYIKNEREKEGNQIETSGSEHFPPWSRVLLRNMKNWNHGPEGF

SEQ ID NO: 36575 - protein, 31 aa, Artificial Sequence
  Synthetic polypeptide
AQEFKTSLSNTARPHHWKKKKKEKKISQAWC

SEQ ID NO: 36576 - protein, 804 aa, Artificial Sequence
  Synthetic polypeptide
ATQQDLITGKKKKKKKKLARRGVEDDLYKERTRKRRKSDRDQRFRAFPSMEQSALKEYEKLESRTRRVLSNTYQKLIQSVFLDDSIPNGVKYLINRLLALIEKPTVDPIYIALFGSTGAGKSSLINAIIQQAMFLPVSGESICTSCIVQVSSGCCVQYEAKIHLLSDQEWREELKNLTKLLHRTEELSREEADAWNRDEAVEEATWKLQMIYGNGAESKNYEELLRAKPKRKIPTSRVITLKAEEAEELSIKLDPYIRTQRRDWDGEAAEMRIWPLIKHVEVTLPKSDLIPEGVVLVDIPGTGDFNSKRDEMWKKTIDKCSVIWVISDIERVSGGQAHEDLLNESIKACQRGFCRDVALVVTKMDKLHLPEYLRERKAGNQAIQSQREAVLERNEMIKLQRTRILKEKLKRKLPADFKVLEASDLVYTVSAQEYWQQALLTEEETEIPKLREYIRKSLLDKKKRTVTKYVTEAFGLLLLTDSFNSTQNLPNEHLHMSVLRRFAEEKVELLEKAIAQCFACMEQPLQEGVRTARTSYRCILRACLVRSKGNQGFHQTLKAVCLKNGIYASRTLARIDLNEALTQPVYDQIDPVFGSIFRTGKPTGSALMPHIDAFKQSLQEKMTEIGIRSGWKYDSCKKNFLIQEISAILGGLEDHILRRKRRIYESLTASVQSDLKLCYEEAAQITGKKACERMKDAIRRGVDRQVAEGMFERAQERMQHQFQQLKTGIVEKVKGSITTMLALASSQGDGLYKELADVGSEYKEMEKLHRSLREVAENARLRKGMQEFLLRASPSKAGPPGTSL

SEQ ID NO: 36577 - protein, 804 aa, Artificial Sequence
  Synthetic polypeptide
ATQQDLITGKKKKKKKKLARRGVEDDLYKERTRKRRKSDRDQRFRAFPSMEQSALKEYEKLESRTRRVLSNTYQKLIQSVFLDDSIPNGVKYLINRLLALIEKPTVDPIYIALFGSTGAGKSSLINAIIQQAMFLPVSGESICTSCIVQVSSGCCVQYEAKIHLLSDQEWREELKNLTKLLHRTEELSREEADAWNRDEAVEEATWKLQMIYGNGAESKNYEELLRAKPKRKIPTSRVITLKAEEAEELSIKLDPYIRTQRRDWDGEAAEMRIWPLIKHVEVTLPKSDLIPEGVVLVDIPGTGDFNSKRDEMWKKTIDKCSVIWVISDIERVSGGQAHEDLLNESIKACQRGFCRDVALVVTKMDKLHLPEYLREERKGWQAIQSQREAVLERNEMIKLQRTRILKEKLKRKLPADFKVLEASDLVYTVSAQEYWQQALLTEEETEIPKLREYIRKSLLDKKKRTVTKYVTEAFGLLLLTDSFNSTQNLPNEHLHMSVLRRFAEEKVELLEKAIAQCFACMEQPLQEGVRTARTSYRCILRACLVRSKGNQGFHQTLKAVCLKNGIYASRTLARIDLNEALTQPVYDQIDPVFGSIFRTGKPTGSALMPHIDAFKQSLQEKMTEIGIRSGWKYDSCKKNFLIQEISAILGGLEDHILRRKRRIYESLTASVQSDLKLCYEEAAQITGKKACERMKDAIRRGVDRQVAEGMFERAQERMQHQFQQLKTGIVEKVKGSITTMLALASSQGDGLYKELADVGSEYKEMEKLHRSLREVAENARLRKGMQEFLLRASPSKAGPPGTSL

SEQ ID NO: 36578 - protein, 45 aa, Artificial Sequence
  Synthetic polypeptide
PGVVLKMIYIKNEREKEGNQIETSGSEHFPPWSRVLLRNTPPLET

SEQ ID NO: 36579 - protein, 84 aa, Artificial Sequence
  Synthetic polypeptide
ATQQDLITGKKKKKKKKLARRGVEDDLYKERTRKRRKSDRDQRFRAFPSMEQSALKEYTSFGDLVLYPCQVPAGDISLLIPDEK

SEQ ID NO: 36580 - protein, 22 aa, Artificial Sequence
  Synthetic polypeptide
QPLPTGSTKIKHNALRHSWLNW

SEQ ID NO: 36581 - protein, 4 aa, Artificial Sequence
  Synthetic polypeptide
GIHG

SEQ ID NO: 36582 - protein, 134 aa, Artificial Sequence
  Synthetic polypeptide
CLKAFMVELVRRDYVANGGWETFLSYEDPDQDILIGLLRLRKCSEETFRFELGGGVSIVRELHVYGSVVPVSSRDPTKFQHQGFGMLLMEEAERIAREEHGSGKIAVISGVGTRNYYRKIGYRLQGPYMVKMLK

SEQ ID NO: 36583 - protein, 128 aa, Artificial Sequence
  Synthetic polypeptide
CLKAFMVELVRRDYVANGGWETFLSYEDPDQDILIGLLRLRKCSEETFRFELGGGVSIVRELHVYGSVVPVSSRDPTKFQHQGFGMLLMEEAERIAREEHGSGKIAVISGVDVLGQRQRGGHHRSCSL

SEQ ID NO: 36584 - protein, 60 aa, Artificial Sequence
  Synthetic polypeptide
CLKAFMVELVRRDYVANGGWETFLSYEDPDQDILIGLLRLRKCSEETFRFELGGGSRKNS

SEQ ID NO: 36585 - protein, 330 aa, Artificial Sequence
  Synthetic polypeptide
QDPISTKNTKNHLGMVGSTVFFRCRKGYHIQGSTTRTCLANLTWSGIQTECIPHACRQPETPAHADVRAIDLPTFGYTLVYTCHPGFFLAGGSEHRTCKADMKWTGKSPVCKIPSDVFFVNSLWKGYYEYLGKRQPATLTVDWFNATSSKVNATFSEASPVELKLTGIYKKEEAHLLLKAFQIKGQADIFVSKFENDNWGLDGYVSSGLERGGFTFQGDIHGKDFGKFKLERQDPLNPDQDSSSHYHGTSSGSVAAAILVPFFALILSGFAFYLYKHRTRPKVQYNGYAGHENSNGQASFENPMYDTNLKPTEAKAVRFDTTLNTVCTVV

SEQ ID NO: 36586 - protein, 64 aa, Artificial Sequence
  Synthetic polypeptide
SQHFGRPRQKNRLRPGEQPGQHSKTLFLQRIQKIIWAWLEARFFSGAEKATIFKVPRLAPALPI

SEQ ID NO: 36587 - protein, 102 aa, Artificial Sequence
  Synthetic polypeptide
GQENSLGNIARPYFYKEYKKSSGHGWKHGFFQVQKRLPYSRFHDSHLPCQFNMEWDTDRMYTSCLQTARNPGTRGCESHRSSYFRLHLSVHLPSRLFPRRGI

SEQ ID NO: 36588 - protein, 345 aa, Artificial Sequence
  Synthetic polypeptide
QDPISTKNTKNHLGMVGSTVFFRCRKGYHIQGSTTRTCLANLTWSGIQTECIPHACRQPETPAHADVRAIDLPTFGYTLVYTCHPGFFLAGGSEHRTCKADMKWTGKSPVCKSKGVREVNETVTKTPVPSDVFFVNSLWKGYYEYLGKRQPATLTVDWFNATSSKVNATFSEASPVELKLTGIYKKEEAHLLLKAFQIKGQADIFVSKFENDNWGLDGYVSSGLERGGFTFQGDIHGKDFGKFKLERQDPLNPDQDSSSHYHGTSSGSVAAAILVPFFALILSGFAFYLYKHRTRPKVQYNGYAGHENSNGQASFENPMYDTNLKPTEAKAVRFDTTLNTVCTVV

SEQ ID NO: 36589 - protein, 14 aa, Artificial Sequence
  Synthetic polypeptide
QCHCLLALGFWTNR

SEQ ID NO: 36590 - protein, 64 aa, Artificial Sequence
  Synthetic polypeptide
LWDFGQIGDGQRLQCPLRLRRRGEAAAWRVSCPDALESGPSWEPGCWDPVPRRGPRLPHPRSHC

SEQ ID NO: 36591 - protein, 25 aa, Artificial Sequence
  Synthetic polypeptide
SRETRLTCIPNVWWMWMQTRLFLIL

SEQ ID NO: 36592 - protein, 9 aa, Artificial Sequence
  Synthetic polypeptide
GLPSHVKLD

SEQ ID NO: 36593 - protein, 6 aa, Artificial Sequence
  Synthetic polypeptide
SRETRL

SEQ ID NO: 36594 - protein, 35 aa, Artificial Sequence
  Synthetic polypeptide
FQLLRKLRQENCLNPGGRGCSELRSCHCTPAWGTE

SEQ ID NO: 36595 - protein, 75 aa, Artificial Sequence
  Synthetic polypeptide
DRATVLQPGGQNELTVPALYPSSPEVWAPYPLYPAELAPALPPPAFTYPASLHAQMRWLPPSEATSQGWKSRQFC

SEQ ID NO: 36596 - protein, 38 aa, Artificial Sequence
  Synthetic polypeptide
AEIVPLYSSLGDRMSSQCLHFTPVALKCGPRTLCTQRS

SEQ ID NO: 36597 - protein, 98 aa, Artificial Sequence
  Synthetic polypeptide
DRATVLQPGGQNELTVPALYPSSPEVWAPYPLYPAELAPALPPPAFTYPASLHAQCFSPEAKPNTPVFCPLLQQIRFVSGNVFVTYQPTADQQRELPC

SEQ ID NO: 36598 - protein, 83 aa, Artificial Sequence
  Synthetic polypeptide
DRATVLQPGGQNELTVPALYPSSPEVWAPYPLYPAELAPALPPPAFTYPASLHAQLCEGQTVRRSHPLSAPSPDSASLAWFPV

SEQ ID NO: 36599 - protein, 103 aa, Artificial Sequence
  Synthetic polypeptide
DRATVLQPGGQNELTVPALYPSSPEVWAPYPLYPAELAPALPPPAFTYPASLHAQVIDTHRPGLHSLHHQSFQTWFPRAHHTTNTYPANRSTLKRLMIPSKSS

SEQ ID NO: 36600 - protein, 32 aa, Artificial Sequence
  Synthetic polypeptide
DRATVLQPGGQNELTVPALYPSSPEVWAPYPL

SEQ ID NO: 36601 - protein, 34 aa, Artificial Sequence
  Synthetic polypeptide
AEIVPLYSSLGDRMSSQCLHFTPVALKCGPRTLC

SEQ ID NO: 36602 - protein, 58 aa, Artificial Sequence
  Synthetic polypeptide
DRATVLQPGGQNELTVPALYPSSPEVWAPYPLYPAELAPALPPPAFTYPASLHAQETL

SEQ ID NO: 36603 - protein, 24 aa, Artificial Sequence
  Synthetic polypeptide
DQPAQHSECWMCTQKGNVEHSCPL

SEQ ID NO: 36604 - protein, 437 aa, Artificial Sequence
  Synthetic polypeptide
RERTASAQHFETSLRNIVNVGCVPKKVMWNTAVHSEFMHDHADYGFPSCEGKFNWRVIKEKRDAYVSRLNAIYQNNLTKSHIEIIRGHAAFTSDPKPTIEVSGKKYTAPHILIATGGMPSTPHESQIPGASLGITSDGFFQLEELPGRSVIVGAGYIAVEMAGILSALGSKTSLMIRHDKVLRSFDSMISTNCTEELENAGVEVLKFSQVKEVKKTLSGLEVSMVTAVPGRLPVMTMIPDVDCLLWAIGRVPNTKDLSLNKLGIQTDDKGHIIVDEFQNTNVKGIYAVGDVCGKALLTPVAIAAGRKLAHRLFEYKEDSKLDYNNIPTVVFSHPPIGTVGLTEDEAIHKYGIENVKTYSTSFTPMYHAVTKRKTKCVMKMVCANKEEKVVGIHMQGLGCDEMLQGFAVAVKMGATKADFDNTVAIHPTSSEELVTLR

SEQ ID NO: 36605 - protein, 355 aa, Artificial Sequence
  Synthetic polypeptide
RERTASAQHFETSLRNIVNVGCVPKKVMWNTAVHSEFMHDHADYGFPSCEGKFNWRVIKEKRDAYVSRLNAIYQNNLTKSHIEIIRGHAAFTSDPKPTIEVSGKKYTAPHILIATGGMPSTPHESQIPGASLGITSDGFFQLEELPGRSVIVGAGYIAVEMAGILSALGSKTSLMIRHDKGIQTDDKGHIIVDEFQNTNVKGIYAVGDVCGKALLTPVAIAAGRKLAHRLFEYKEDSKLDYNNIPTVVFSHPPIGTVGLTEDEAIHKYGIENVKTYSTSFTPMYHAVTKRKTKCVMKMVCANKEEKVVGIHMQGLGCDEMLQGFAVAVKMGATKADFDNTVAIHPTSSEELVTLR

SEQ ID NO: 36606 - protein, 384 aa, Artificial Sequence
  Synthetic polypeptide
RERTASAQHFETSLRNIVNVGCVPKKVMWNTAVHSEFMHDHADYGFPSCEGKFNWRVIKEKRDAYVSRLNAIYQNNLTKSHIEIIRGHAAFTSDPKPTIEVSGKKYTAPHILIATGGMPSTPHESQIPGASLGITSDGFFQLEELPGRSVIVGAGYIAVEMAGILSALGSKTSLMIRHDKVLRSFDSMISTNCTEELENAGVEVLKFSQGIQTDDKGHIIVDEFQNTNVKGIYAVGDVCGKALLTPVAIAAGRKLAHRLFEYKEDSKLDYNNIPTVVFSHPPIGTVGLTEDEAIHKYGIENVKTYSTSFTPMYHAVTKRKTKCVMKMVCANKEEKVVGIHMQGLGCDEMLQGFAVAVKMGATKADFDNTVAIHPTSSEELVTLR

SEQ ID NO: 36607 - protein, 408 aa, Artificial Sequence
  Synthetic polypeptide
RERTASAQHFETSLRNIVNVGCVPKKVMWNTAVHSEFMHDHADYGFPSCEGKFNWRVIKEKRDAYVSRLNAIYQNNLTKSHIEIIRGHAAFTSDPKPTIEVSGKKYTAPHILIATGGMPSTPHESQIPGASLGITSDGFFQLEELPGRSVIVGAGYIAVEMAGILSALGSKTSLMIRHDKVKEVKKTLSGLEVSMVTAVPGRLPVMTMIPDVDCLLWAIGRVPNTKDLSLNKLGIQTDDKGHIIVDEFQNTNVKGIYAVGDVCGKALLTPVAIAAGRKLAHRLFEYKEDSKLDYNNIPTVVFSHPPIGTVGLTEDEAIHKYGIENVKTYSTSFTPMYHAVTKRKTKCVMKMVCANKEEKVVGIHMQGLGCDEMLQGFAVAVKMGATKADFDNTVAIHPTSSEELVTLR

SEQ ID NO: 36608 - protein, 102 aa, Artificial Sequence
  Synthetic polypeptide
RERTASAQHFETSLRNIVNVGCVPKKVMWNTAVHSEFMHDHADYGFPSCEGKFNWRVIKEKRDAYVSRLNAIYQNNLTKPQRHCWCRLHCCGDGRDPVSPGF

SEQ ID NO: 36609 - protein, 259 aa, Artificial Sequence
  Synthetic polypeptide
RERTASAQHFETSLRNIVNVGCVPKKVMWNTAVHSEFMHDHADYGFPSCEGKFNWRVIKEKRDAYVSRLNAIYQNNLTKSHIEIIRGHAAFTSDPKPTIEVSGKKYTAPHILIATGGMPSTPHESQIPGASLGITSDGFFQLEELPGVIVGAGYIAVEMAGILSALGSKTSLMIRHDKVLRSFDSMISTNCTEELENAGVEVLKFSQVKEVKKTLSGLEVSMVTAVPGRLPVMTMIPDVDCLLWAIGRVPNTKDLSLNK

SEQ ID NO: 36610 - protein, 61 aa, Artificial Sequence
  Synthetic polypeptide
SRHFGRPRWADCLSPGVQDQPGQHGRHERCHKNQQRKGNIQASKDYRISSQKRKQNSTKFM

SEQ ID NO: 36611 - protein, 462 aa, Artificial Sequence
  Synthetic polypeptide
VQEFKTSLGNMVDMKDVTKINREKATFKHPRTTGSHPKSENKIVPSSCDSLKRNHLTPKKVEMQRSLPGSLLPLENPKDTCASKSESKIDLTVSSDHFSGQQENLNSMKKRNVNFSAAETKSDKKDCAAFAICDQKSVHGTFSPDHGTLLQKFLKNSPDPTQKSCLSDINPETDVSLVPDASVLSKPIFCFVKDVHPDLEMNDTVFELQDNDIVNSSIKNSSCMTSPEPICIQNKIPTLQINKLQPTETESEDKYMKDTLNPNTVHTFGASGHITLNVNQGAEYSLSEQQNDKNSKVLMQNAATYWNELPQSACNPTYNSSEHLFGTSYPYSAWCVYQYSNSNGNAITQTYQGITSYEVQPSPSGLLTTVASTAQGTHSNLLYSQYFTYFAGEPQANGFVPVNGYFQSQIPASNFRQPIFSQYASHQPLPQATYPYLPNRFVPPEVPWVYAPWHQESFHPGH

SEQ ID NO: 36612 - protein, 29 aa, Artificial Sequence
  Synthetic polypeptide
LTPVIPALWEAKVGRLLESRSSRPAWATW

SEQ ID NO: 36613 - protein, 481 aa, Artificial Sequence
  Synthetic polypeptide
CRTLQHDVEQDSDQLDSSGMFHWCKPTSLDKVTLKRTGKSKYKFRNHIVACVFGDAHSAPMGLRNFVMPLRASNYTRKELKDIVFIGSLDYLQREWRFLWNFPQIYILPGCALYSGDLHAANIEQCSMCAVLSPPPQPSSNQTLVDTEAIMATLTIGSLQIDSSSDPSPSVSEETPGYTNGHNEKSNCRKVPILTELKNPSNIHFIEQLGGLEGSLQETNLHLSTAFSTGTVFSGSFLDSLLATAFYNYHVLELLQMLVTGGVSSQLEQHLDKDKVYGVADSCTSLLSGRNRCKLGLLSLHETILSDVNPRNTFGQLFCGSLDLFGILCVGLYRIIDEEELNPENKRFVITRPANEFKLLPSDLVFCAIPFSTACYKRNEEFSLQKSYEIVNKASQTTETHSDTNCPPTIDSVTETLYSPVYSYQPRTNSLSFPKQIAWNQSRTNSIISSQIPLGDNAKENERKTSDEVYDEDPFAYSEPL

SEQ ID NO: 36614 - protein, 31 aa, Artificial Sequence
  Synthetic polypeptide
SLCPPGSGWLCGGETPFHLSNIYSVGLFNMM

SEQ ID NO: 36615 - protein, 279 aa, Artificial Sequence
  Synthetic polypeptide
CRTLQHDVEQDSDQLDSSGMFHWCKPTSLDKVTLKRTGKSKYKFRNHIVACVFGDAHSAPMGLRNFVMPLRASNYTRKELKDIVFIGSLDYLQREWRFLWNFPQIYILPGCALYSGDLHAANIEQCSMCAVLSPPPQPSSNQTLVDTEAIMATLTIGSLQIDSSSDPSPSVSEETPGYTNGHNEKSNCRKVPILTELKNPSNIHFIEQLGGLEGSLQETNLHLSTAFSTGTVFSGSFLDSLLATLMWKLAIKGSQFQGRSSGLCWPSTIIMSWNCFRCW

SEQ ID NO: 36616 - protein, 15 aa, Artificial Sequence
  Synthetic polypeptide
AEITPLHSSLCNTVV

SEQ ID NO: 36617 - protein, 605 aa, Artificial Sequence
  Synthetic polypeptide
SQHFGRPRWTDHLKSGVRDRPGHHGETPSLLKIQNLAGCGSACLLSWLLRRPRQENCLNLGGRGCSEPRSRHCTPACATRWYKLKSKPGKKDKERGEIEVDIQFMRNNMTASMFDLSMKDKSRNPFGKLKDKIKGKNKDSGSDTASAIIPSTTPSVDSDDESVVKDKKKKSKIKTLLSKSNLQKTPLSQSMSVLPTSKPEKVLLRPGDFQSQWDEDDNEDESSSASDVMSHKRTASTDLKQLNQVNFTLPKKEGLSFLGGLRSKNDVLSRSNVCINGNHVYLEQPEAKGEIKDSSPSSSPSPKGFRKKHLFSSTENLAAGSWKEPAEGGGLSSDRQLSESSTKDSLKSMTLPSYRPAPLVSGDLRENMAPANSEATKEAKESKKPESRRSSLLSLMTGKKDVAKGSEGENPLTVPGREKEGMLMGVKPGEDASGPAEDLVRRSEKDTAAVVSRQGSSLNLFEDVQITEPEAEPESKSEPRPPISSPRAPQTRAVKPRLHPVKPMNAMATKVANCSLGTATIISENLNNEVMMKKYSPSDPAFAYAQLTHDELIQLVLKQKETISKKEFQVRELEDYIDNLLVRVMEETPNILRIPTQVGKKAGKM

SEQ ID NO: 36618 - protein, 25 aa, Artificial Sequence
  Synthetic polypeptide
IWEAEVAVSRDHATALQPVQHGGIS

SEQ ID NO: 36619 - protein, 1239 aa, Artificial Sequence
  Synthetic polypeptide
SQHFGRPRWTDHLKSGVRDRPGHHGETPSLLKIQNLAGCGSACLLSWLLRRPRQENCLNLGGRGCSEPRSRHCTPACATRWYKLKSKPGKKDKERGEIEVDIQFMRNNMTASMFDLSMKDKSRNPFGKLKDKIKGKNKDSGSDTASAIIPSTTPSVDSDDESVVKDKKKKSKIKTLLSKSNLQKTPLSQSMSVLPTSKPEKVLLRPGDFQSQWDEDDNEDESSSASDVMSHKRTASTDLKQLNQVNFTLPKKEGLSFLGGLRSKNDVLSRSNVCINGNHVYLEQPEAKGEIKDSSPSSSPSPKGFRKKHLFSSTENLAAGSWKEPAEGGGLSSDRQLSESSTKDSLKSMTLPSYRPAPLVSGDLRENMAPANSEATKEAKESKKPESRRSSLLSLMTGKKDVAKGSEGENPLTVPGREKEGMLMGVKPGEDASGPAEDLVRRSEKDTAAVVSRQGSSLNLFEDVQITEPEAEPESKSEPRPPISSPRAPQTRAVKPRLEVSPEAQPTARLPSPTDSPSSLPPLPSSSGQASVPSELGHGADTQSSESPSVFSSLSSPIAAPISTSTPIESWPLVDRGQAKSEGPPLLPKAELQTESLTPVPNSGSSALGSLFKQPSFPANKGTEDSLMGRTRETGTEKNTSSLELEESLPEQPETGRQEEELPRFPCKKQDYSPSSGEAQEVPFALSLSSDGAVSPVGELAAGGDRDLESQAGSLVESKARDAAEEVAPPLPMGASVPSIDSMMRKLEEMGLNLRKDQKKTKKRVSFSEQLFTEEAVAGAALLVEGHSSCPQELNPAWSVAGNASDGEPPESPHAEDSERESVTTPGPATCGAPASPADHLLLPSQEESFSEVPMSEASSAKDTPLFRMEGEDALVTQYQSKASDHEGLLSDPLSDLQLVSDFKSPIMADLNLSLPSIPEVASDDERIDQVEDDGDQVEDDGETAKSSTLDIGALSLGLVVPCPERGKGPSGEADRLVLGEGLCDFRLQAPQASVTAPSEQTTEFGIHKPHLGKSSSLDKQLPGPSGGEEEKPMGNGSPSPPPGTSLDNPVPSPSPSEIFPVTHSFPSSAHSDTHHTSTAESQKKATAEGSAGRVENFGKRKPLLQAWVSPSETHPVSAQPGAGTGSAKHRLHPVKPMNAMATKVANCSLGTATIISENLNNEVMMKKYSPSDPAFAYAQLTHDELIQLVLKQKETISKKEFQVRELEDYIDNLLVRVMEETPNILRIPTQVGKKAGKM

SEQ ID NO: 36620 - protein, 15 aa, Artificial Sequence
  Synthetic polypeptide
SQHFARPRRADHEVV

SEQ ID NO: 36621 - protein, 547 aa, Artificial Sequence
  Synthetic polypeptide
PGAVAHACNPSTLRGRGGQITRWYKLKSKPGKKDKERGEIEVDIQFMRNNMTASMFDLSMKDKSRNPFGKLKDKIKGKNKDSGSDTASAIIPSTTPSVDSDDESVVKDKKKKSKIKTLLSKSNLQKTPLSQSMSVLPTSKPEKVLLRPGDFQSQWDEDDNEDESSSASDVMSHKRTASTDLKQLNQVNFTLPKKEGLSFLGGLRSKNDVLSRSNVCINGNHVYLEQPEAKGEIKDSSPSSSPSPKGFRKKHLFSSTENLAAGSWKEPAEGGGLSSDRQLSESSTKDSLKSMTLPSYRPAPLVSGDLRENMAPANSEATKEAKESKKPESRRSSLLSLMTGKKDVAKGSEGENPLTVPGREKEGMLMGVKPGEDASGPAEDLVRRSEKDTAAVVSRQGSSLNLFEDVQITEPEAEPESKSEPRPPISSPRAPQTRAVKPRLHPVKPMNAMATKVANCSLGTATIISENLNNEVMMKKYSPSDPAFAYAQLTHDELIQLVLKQKETISKKEFQVRELEDYIDNLLVRVMEETPNILRIPTQVGKKAGKM

SEQ ID NO: 36622 - protein, 25 aa, Artificial Sequence
  Synthetic polypeptide
RARWLMPVIPALCEAEAGRSRGGIS

SEQ ID NO: 36623 - protein, 1181 aa, Artificial Sequence
  Synthetic polypeptide
PGAVAHACNPSTLRGRGGQITRWYKLKSKPGKKDKERGEIEVDIQFMRNNMTASMFDLSMKDKSRNPFGKLKDKIKGKNKDSGSDTASAIIPSTTPSVDSDDESVVKDKKKKSKIKTLLSKSNLQKTPLSQSMSVLPTSKPEKVLLRPGDFQSQWDEDDNEDESSSASDVMSHKRTASTDLKQLNQVNFTLPKKEGLSFLGGLRSKNDVLSRSNVCINGNHVYLEQPEAKGEIKDSSPSSSPSPKGFRKKHLFSSTENLAAGSWKEPAEGGGLSSDRQLSESSTKDSLKSMTLPSYRPAPLVSGDLRENMAPANSEATKEAKESKKPESRRSSLLSLMTGKKDVAKGSEGENPLTVPGREKEGMLMGVKPGEDASGPAEDLVRRSEKDTAAVVSRQGSSLNLFEDVQITEPEAEPESKSEPRPPISSPRAPQTRAVKPRLEVSPEAQPTARLPSPTDSPSSLPPLPSSSGQASVPSELGHGADTQSSESPSVFSSLSSPIAAPISTSTPIESWPLVDRGQAKSEGPPLLPKAELQTESLTPVPNSGSSALGSLFKQPSFPANKGTEDSLMGRTRETGTEKNTSSLELEESLPEQPETGRQEEELPRFPCKKQDYSPSSGEAQEVPFALSLSSDGAVSPVGELAAGGDRDLESQAGSLVESKARDAAEEVAPPLPMGASVPSIDSMMRKLEEMGLNLRKDQKKTKKRVSFSEQLFTEEAVAGAALLVEGHSSCPQELNPAWSVAGNASDGEPPESPHAEDSERESVTTPGPATCGAPASPADHLLLPSQEESFSEVPMSEASSAKDTPLFRMEGEDALVTQYQSKASDHEGLLSDPLSDLQLVSDFKSPIMADLNLSLPSIPEVASDDERIDQVEDDGDQVEDDGETAKSSTLDIGALSLGLVVPCPERGKGPSGEADRLVLGEGLCDFRLQAPQASVTAPSEQTTEFGIHKPHLGKSSSLDKQLPGPSGGEEEKPMGNGSPSPPPGTSLDNPVPSPSPSEIFPVTHSFPSSAHSDTHHTSTAESQKKATAEGSAGRVENFGKRKPLLQAWVSPSETHPVSAQPGAGTGSAKHRLHPVKPMNAMATKVANCSLGTATIISENLNNEVMMKKYSPSDPAFAYAQLTHDELIQLVLKQKETISKKEFQVRELEDYIDNLLVRVMEETPNILRIPTQVGKKAGKM

SEQ ID NO: 36624 - protein, 10 aa, Artificial Sequence
  Synthetic polypeptide
GTVGRQTWSM

SEQ ID NO: 36625 - protein, 22 aa, Artificial Sequence
  Synthetic polypeptide
DFEGLLGGKLGRCKRWLGDRII

SEQ ID NO: 36626 - protein, 573 aa, Artificial Sequence
  Synthetic polypeptide
AKTLRDCWEANLVDVSGGLETESSNGKDTLEGAGDTSEVMDTQAGSVDEENGRQLGEVELQCGICTKWFTADTFGIDTSSCLPFMTNYSFHCNVCHHSGNTYFLRKQANLKEMCLSALANLTWQSRTQDEHPKTMFSKDKDIIPFIDKYWECMTTRQRPGKMTWPNNIVKTMSKERDVFLVKEHPDPGSKDPEEDYPKFGLLDQDLSNIGPAYDNQKQSSAVSTSGNLNGGIAAGSSGKGRGAKRKQQDGGTTGTTKKARSDPLFSAQRLPPHGYPLEHPFNKDGYRYILAEPDPHAPDPEKLELDCWAGKPIPGDLYRACLYERVLLALHDRAPQLKISDDRLTVVGEKGYSMVRASHGVRKGAWYFEITVDEMPPDTAARLGWSQPLGNLQAPLGYDKFSYSWRSKKGTKFHQSIGKHYSSGYGQGDVLGFYINLPEDTETAKSLPDTYKDKALIKFKSYLYFEEKDFVDKAEKSLKQTPHSEIIFYKNGVNQGVAYKDIFEGVYFPAISLYKSCTVSINFGPCFKYPPKDLTYRPMSDMGWGAVVEHTLADVLYHVETEVDGRRSPPWEP

SEQ ID NO: 36627 - protein, 66 aa, Artificial Sequence
  Synthetic polypeptide
AKTLRDCWEANLVDVSGGLETESSNGKDTLILSTFHDQLQFSLQRLPSQWEYLFPPEASKLEGNVP

SEQ ID NO: 36628 - protein, 636 aa, Artificial Sequence
  Synthetic polypeptide
LTPVIPTLGRLRQEDCLRPGVQDQFGQHSKTPSLQNIKELAKHGGVCLWSQLLERLRREDHLTPGVQDCRLIVQDHSDPMFSSYAYKSHYLLNESNRAELMKLPMIPSSSASKKKCEKGGRLLCCESCPASFHPECLSIEMPEGCWNCNDCKAGKKLHYKQIVWVKLGNYRWWPAEICNPRSVPLNIQGLKHDLGDFPVFFFGSHDYYWVHQGRVFPYVEGDKSFAEGQTSINKTFKKALEEAAKRFQELKAQRESKEALEIEKNSRKPPPYKHIKANKVIGKVQIQVADLSEIPRCNCKPADENPCGLESECLNRMLQYECHPQVCPAGDRCQNQCFTKRLYPDAEIIKTERRGWGLRTKRSIKKGEFVNEYVGELIDEEECRLRIKRAHENSVTNFYMLTVTKDRIIDAGPKGNYSRFMNHSCNPNCETQKWTVNGDVRVGLFALCDIPAGMELTFNYNLDCLGNGRTECHCGADNCSGFLGVRPKSACASTNEEKAKNAKLKQKRRKIKTEPKQMHEDYCFQCGDGGELVMCDKKDCPKAYHLLCLNLTQPPYGKWECPWHQCDECSSAAVSFCEFCPHSFCKDHEKGALVPSALEGRLCCSEHDPMAPVSPEYWSKIKCKWESQDHGEEVKE

SEQ ID NO: 36629 - protein, 8 aa, Artificial Sequence
  Synthetic polypeptide
PQEFKTAG

SEQ ID NO: 36630 - protein, 57 aa, Artificial Sequence
  Synthetic polypeptide
QDPISTKHKGISQAWWCVPVVPATREAEEGGSLDPRSSRLQADSSGPFRPHVQFICL

SEQ ID NO: 36631 - protein, 625 aa, Artificial Sequence
  Synthetic polypeptide
LTPVIPTLGRLRQEDCLRPGVQDQFGQHSKTPSLQNIKELAKHGGVCLWSQLLERLRREDHLTPGVQDCRLIVQDHSDPMFSSYAYKSHYLLNESNRAELMKLPMIPSSSASKKKCEKGGRLLCCESCPASFHPECLSIEMPEGCWNCNDCKAGKKLHYKQIVWVKLGNYRWWPAEICNPRSVPLNIQGLKHDLGDFPVFFFGSHDYYWVHQGRVFPYVEGDKSFAEGQTSINKTFKKALEEAAKRFQELKAQRESKEALEIEKNSRKPPPYKHIKANKVIGKVQIQVADLSEIPRCNCKPADENPCGLESECLNRMLQYECHPQVCPAGDRCQNQCFTKRLYPDAEIIKTERRGWGLRTKRSIKKGEFVNEYVGELIDEEECRLRIKRAHENSDRIIDAGPKGNYSRFMNHSCNPNCETQKWTVNGDVRVGLFALCDIPAGMELTFNYNLDCLGNGRTECHCGADNCSGFLGVRPKSACASTNEEKAKNAKLKQKRRKIKTEPKQMHEDYCFQCGDGGELVMCDKKDCPKAYHLLCLNLTQPPYGKWECPWHQCDECSSAAVSFCEFCPHSFCKDHEKGALVPSALEGRLCCSEHDPMAPVSPEYWSKIKCKWESQDHGEEVKE

SEQ ID NO: 36632 - protein, 12 aa, Artificial Sequence
  Synthetic polypeptide
ERAYQKMNKGQV

SEQ ID NO: 36633 - protein, 30 aa, Artificial Sequence
  Synthetic polypeptide
TKRRTLVYRMNQEGRVLLCSLSAESVHIRR

SEQ ID NO: 36634 - protein, 170 aa, Artificial Sequence
  Synthetic polypeptide
IKKAEYCFVHCQLRACISEDEQRTSMTSQKSFQQLTMEKEQALADLNSVERSLSDLFRRYENLKGVLEGFKKNEEALKKCAQDYLARVKQEEQRYQALKIHAEEKLDKANEEIAQVRTKAKAESAALHAGLRKEQMKVESLERALQQKNQEIEELTKICDELIAKLGKTD

SEQ ID NO: 36635 - protein, 35 aa, Artificial Sequence
  Synthetic polypeptide
SQLLGRWRQQNRLNPGGRGCSEWRSCHCTSLGNRK

SEQ ID NO: 36636 - protein, 67 aa, Artificial Sequence
  Synthetic polypeptide
TQEAEVAVSGDRAIALAWATGNEYCIEGRTSGLLLPNCSPYCLCYFYLHQEGSTVEKLLQKEEITNI

SEQ ID NO: 36637 - protein, 134 aa, Artificial Sequence
  Synthetic polypeptide
PGQQEMNTALRDGLLVFFFLIVPLIVCAIFIFIKRDQLWRSYFRKKRSQTYESDGKNQANPSRQPGSVPRHVSPVTPPREVPIYANRFAVPTYAAKQPQQFPSRPPPPQPKVSSQGNLIPARPAPAPPLYSSLT

SEQ ID NO: 36638 - protein, 22 aa, Artificial Sequence
  Synthetic polypeptide
TQEAEVAVSGDRAIALAWATGN

SEQ ID NO: 36639 - protein, 6 aa, Artificial Sequence
  Synthetic polypeptide
PGQQEM

SEQ ID NO: 36640 - protein, 12 aa, Artificial Sequence
  Synthetic polypeptide
PQSGCNPSVCQT

SEQ ID NO: 36641 - protein, 155 aa, Artificial Sequence
  Synthetic polypeptide
LGNLSLVAIPVYVKHNISFRDSSSLGRFEITVGPKQTMGKTIEGVTVTSQMPKGVLNMSLTPSQGTHTFDPVTKMLSWDVGKINPQKLPSLKGTMSLQAGASKPDENPTINLQFKIQQLAISGLKVNRLDMYGEKYKPFKGIKYMTKAGKFQVRT

SEQ ID NO: 36642 - protein, 50 aa, Artificial Sequence
  Synthetic polypeptide
VIKNSGSRVTWVHIPASVVTNWVTSVWLQSQCMSNITSVSGTVVPLDALK

SEQ ID NO: 36643 - protein, 139 aa, Artificial Sequence
  Synthetic polypeptide
LGNLSLVAIPVYVKHNISFRDSSSLGRFEITVGPKQTMGKTIEGVTVTSQMPKGVLNMSLTPSQGTHTFDPVTKMLSWDVGKINPQKLPSLKGTMSLQAGASKPDENPTINLQFKIQQLAISGLKVNRLDMYGEKYKPF

SEQ ID NO: 36644 - protein, 489 aa, Artificial Sequence
  Synthetic polypeptide
SQVPRDTNTAEGRRDLCLGKPGCVGCATEERLFHKLFSHYNQFIRPVENVSDPVTVHFEVAITQLANVDEVNQIMETNLWLRHIWNDYKLRWDPMEYDGIETLRVPADKIWKPDIVLYNNAVGDFQVEGKTKALLKYNGMITWTPPAIFKSSCPMDITFFPFDHQNCSLKFGSWTYDKAEIDLLIIGSKVDMNDFWENSEWEIIDASGYKHDIKYNCCEEIYTDITYSFYIRRLPMFYTINLIIPCLFISFLTVLVFYLPSDCGEKVTLCISVLLSLTVFLLVITETIPSTSLVVPLVGEYLLFTMIFVTLSIVVTVFVLNIHYRTPTTHTMPRWVKTVFLKLLPQVLLMRWPLDKTRGTGSDAVPRGLARRPAKGKLASHGEPRHLKECFHCHKSNELATSKRRLSHQPLQWVVENSEHSPEVEDVINSVQFIAENMKSHNETKEVEDDWKYVAMVVDRVFLWVFIIVCVFGTAGLFLQPLLGNTGKS

SEQ ID NO: 36645 - protein, 52 aa, Artificial Sequence
  Synthetic polypeptide
ESQAVWAVQLRRGSSTNCFLITTSSSGLWKTFPTLSRYTLKWPSPSWPTWMK

SEQ ID NO: 36646 - protein, 53 aa, Artificial Sequence
  Synthetic polypeptide
GLCKMCFVKQMLEGSMLLKSHHHSLISSTQGHKHCGRPQGPLPRKARLCGLCN

SEQ ID NO: 36647 - protein, 474 aa, Artificial Sequence
  Synthetic polypeptide
SQVPRDTNTAEGRRDLCLGKPGCVGCATEERLFHKLFSHYNQFIRPVENVSDPVTVHFEVAITQLANVIWNDYKLRWDPMEYDGIETLRVPADKIWKPDIVLYNNAVGDFQVEGKTKALLKYNGMITWTPPAIFKSSCPMDITFFPFDHQNCSLKFGSWTYDKAEIDLLIIGSKVDMNDFWENSEWEIIDASGYKHDIKYNCCEEIYTDITYSFYIRRLPMFYTINLIIPCLFISFLTVLVFYLPSDCGEKVTLCISVLLSLTVFLLVITETIPSTSLVVPLVGEYLLFTMIFVTLSIVVTVFVLNIHYRTPTTHTMPRWVKTVFLKLLPQVLLMRWPLDKTRGTGSDAVPRGLARRPAKGKLASHGEPRHLKECFHCHKSNELATSKRRLSHQPLQWVVENSEHSPEVEDVINSVQFIAENMKSHNETKEVEDDWKYVAMVVDRVFLWVFIIVCVFGTAGLFLQPLLGNTGKS

SEQ ID NO: 36648 - protein, 49 aa, Artificial Sequence
  Synthetic polypeptide
ESQAVWAVQLRRGSSTNCFLITTSSSGLWKTFPTLSRYTLKWPSPSWPT

SEQ ID NO: 36649 - protein, 59 aa, Artificial Sequence
  Synthetic polypeptide
KKHWQGCGAKGTVVHFFGEYKMKCTSKHSPRKPGASKGTSRTASNRTGCTCCHSTAVLH

SEQ ID NO: 36650 - protein, 14 aa, Artificial Sequence
  Synthetic polypeptide
NEMYIKTFTQKTRS

SEQ ID NO: 36651 - protein, 14 aa, Artificial Sequence
  Synthetic polypeptide
HGLYLLWDLPFFYR

SEQ ID NO: 36652 - protein, 107 aa, Artificial Sequence
  Synthetic polypeptide
SQHFWEAEAGGSQGREIETILANTVCIYYGIFHFSIDDFYTATGVFKIQIAGEDCMEEFPVNLHRNYHCESQLLPWSIVLGQGAHSWCAAAIGSDILCGCCVGAPLC

SEQ ID NO: 36653 - protein, 384 aa, Artificial Sequence
  Synthetic polypeptide
PGVVAHACNPSTFGRPRRADHKVGRLRPSWLTRFVFIMGSSIFLSMTSILQRGCSKFRLLGKIAWRSFLLICIGIIIVNPNYCLGPLSWDKVRIPGVLQRLGVTYFVVAVLELLFAKPVPEHCASERSCLSLRDITSSWPQWLLILVLEGLWLGLTFLLPVPGCPTGYLGPGGIGDFGKYPNCTGGAAGYIDRLLLGDDHLYQHPSSAVLYHTEVAYDPEGILGTINSIVMAFLGVQAGKILLYYKARTKDILIRFTAWCCILGLISVALTKVSENEGFIPVNKNLWSLSYVTTLSSFAFFILLVLYPVVDVKGLWTGTPFFYPGMNSILVYVGHEVFENYFPFQWKLKDNQSHKEHLTQNIVATALWVLIAYILYRKKIFWKI

SEQ ID NO: 36654 - protein, 186 aa, Artificial Sequence
  Synthetic polypeptide
PGVVAHACNPSTFGRPRRADHKVGRLRPSWLTRFVFIMGSSIFLSMTSILQRGCSKFRLLGKIAWRSFLLICIGIIIVNPNYCLGPLSWDKVRIPGVLQRLGVTYFVVAVLELLFAKPVPEHCASTGPSLLASSDPPALATQSAGITGEELPFSSRHHVQLAPVAAHPGAGRPVAGLDIPPASPWV

SEQ ID NO: 36655 - protein, 85 aa, Artificial Sequence
  Synthetic polypeptide
KQAFTRYRIYWCLDLGLPNLQNLLPRLGHQTGLSDGTLVTFVENSLWALPGSKSHGACPGRKNTIVLQGSDQRHPDSIHCLVLYS

SEQ ID NO: 36656 - protein, 128 aa, Artificial Sequence
  Synthetic polypeptide
HEGGALTLHPVNGIVALMKEKPQRPALPLLPCEDRTRSRHLSENRPSPDTESTGALILDFPTFRTCCPDWVTKQACLTEPLSPLWRILFGPCLEVRATEPAQAGKILLYYKARTKDILIRFTAWCCIL

SEQ ID NO: 36657 - protein, 20 aa, Artificial Sequence
  Synthetic polypeptide
SWTSQPSELAAQTGSPNRPV

SEQ ID NO: 36658 - protein, 59 aa, Artificial Sequence
  Synthetic polypeptide
KQAFTRYRIYWCLDLGLPNLQNCRKNTIVLQGSDQRHPDSIHCLVLYSWAHFCCSDEGF

SEQ ID NO: 36659 - protein, 212 aa, Artificial Sequence
  Synthetic polypeptide
HEGGALTLHPVNGIVALMKEKPQRPALPLLPCEDRTRSRHLSENRPSPDTESTGALILDFPTFRTAGKILLYYKARTKDILIRFTAWCCILGLISVALTKVSENEGFIPVNKNLWSLSYVTTLSSFAFFILLVLYPVVDVKGLWTGTPFFYPGMNSILVYVGHEVFENYFPFQWKLKDNQSHKEHLTQNIVATALWVLIAYILYRKKIFWKI

SEQ ID NO: 36660 - protein, 24 aa, Artificial Sequence
  Synthetic polypeptide
SWTSQPSELQEKYYCITRLGPKTS

SEQ ID NO: 36661 - protein, 48 aa, Artificial Sequence
  Synthetic polypeptide
KQAFTRYRIYWCLDLGLPNLQNCRKNTIVLQGSDQRHPDSIHCLVLYS

SEQ ID NO: 36662 - protein, 91 aa, Artificial Sequence
  Synthetic polypeptide
HEGGALTLHPVNGIVALMKEKPQRPALPLLPCEDRTRSRHLSENRPSPDTESTGALILDFPTFRTAGKILLYYKARTKDILIRFTAWCCIL

SEQ ID NO: 36663 - protein, 196 aa, Artificial Sequence
  Synthetic polypeptide
PPSLYLSPVLDASCPQTSDSQVLQFWDSDWLPCSSACRHPVVGPCDCVQGASFRGWKEVTSLFNKDDEQHLLERCKSPKSKGTNLRLKEELKAEKKSGFWDNLVLKQNIQSKKPDEIEGWEPPKLALEDISADPEDTVGGHPSWSGWEDDAKGSTKYTSLASSANSSRWSLRAAGRLVSIRRQSKGHLTDSPEEAE

SEQ ID NO: 36664 - protein, 100 aa, Artificial Sequence
  Synthetic polypeptide
HLNPWTGKGRPTANLSGHHLISCWHSQDIKQTENMKRLDWPSLPAYIFLLCWMLPALKHQTPKFFSFGTRTGFLAPQLADILLWDLVIVFREQVSEVGKK

SEQ ID NO: 36665 - protein, 17 aa, Artificial Sequence
  Synthetic polypeptide
LCSGSKFPRLERSDFTV

SEQ ID NO: 36666 - protein, 209 aa, Artificial Sequence
  Synthetic polypeptide
PPSLYLSPVLDASCPQTSDSQVLQFWDSDWLPCSSACRHPVVGPCDCVQGASFRGWKEVTSLFNKDDEQHLLERCKSPKSKGTNLRLKEELKAEKKSGFWDNLVLKQNIQSKKPDEIEGWEPPKLALEDISADPEDTVGGHPSWSGWEDDAKGSTKYTSLASSANSSRWSLRAAGRLIKEVWINFSQLIISFRKHCLAHYRELRLCIKY

SEQ ID NO: 36667 - protein, 36 aa, Artificial Sequence
  Synthetic polypeptide
IKRWTSRKTKWTAESREICYFFVETSMYFLPKDTFR

SEQ ID NO: 36668 - protein, 28 aa, Artificial Sequence
  Synthetic polypeptide
ILVLSSVQWVLISVLSVSKGYYLNKEVD

SEQ ID NO: 36669 - protein, 24 aa, Artificial Sequence
  Synthetic polypeptide
LWEARARGLLESLPSGTRCLWNVR

SEQ ID NO: 36670 - protein, 411 aa, Artificial Sequence
  Synthetic polypeptide
FGRPGQEDCLRACLLVQDACGMFGEVHLEFTMSKARQLEGKSCSLVGMKVLQKVTRGRTAGIFSLIDTLWPPAIPLKTPGRDQPCEEIKTHLPPPALCYILTAHPNLGQIDIIDEDPIYKLYQPPVTRCLRDILQMNDLGTRCSFYATVIYQKPQLKSLLLLEQREIWLLVTDVTLQTKEERDPRLPKTLLVYVAPLCVLGSEVLEALAGAAPHSLFFKDALRDQGRIVCAERTVLLLQKPLLSVVSGASSCELPGPVMLDSLDSATPVNSICSVQGTVVGVDESTAFSWPVCDMCGNGRLEQRPEDRGAFSCGDCSRVVTSPVLKRHLQVFLDCRSRPQCRVKVKLLQRSISSLLRFAAGEDGSYEVKSVLGKEVGLLNCFVQSVTAHPTSCIGLEEIELLSAGGASAEH

SEQ ID NO: 36671 - protein, 432 aa, Artificial Sequence
  Synthetic polypeptide
FGRPGQEDCLRACLLVQDACGMFGEVHLEFTMSKARQLEGKSCSLVGMKVLQKVTRGRTAGIFSLIDTLWPPAIPLKTPGRDQPCEEIKTHLPPPALCYILTAHPNLGQIDIIDEDPIYKLYQPPVTRCLRDILQMNDLGTRCSFYATVIYQKPQLKSLLLLEQREIWLLVTDVTLQTKEERDPRLPKTLLVYVAPLCVLGSEVLEALAGAAPHSLFFKDALRDQGRIVCAERTVLLLQKPLLSVVSGASSCELPGPVMLDSLDSATPVNSICSVQGTVVGVDESTAFSWPVCDMCGNGRLEQRPEDRGAFSCGDCSRVVTSPVLKRHLQVFLDCRSRPQCRVKVKVGARPEHARTPSSLQHSEELRSEECPRKGSGVVKLFCPVRNRPPDQLHWIGGNRASECRRGLCRTLAVAAGSVNFAMWLQGWWWWW

SEQ ID NO: 36672 - protein, 311 aa, Artificial Sequence
  Synthetic polypeptide
FGRPGQEDCLRACLLVQDACGMFGEVHLEFTMSKARQLEGKSCSLVGMKVLQKVTRGRTAGIFSLIDTLWPPAIPLKTPGRDQPCEEIKTHLPPPALCYILTAHPNLGQIDIIDEDPIYKLYQPPVTRCLRDILQMNDLGTRCSFYATVIYQKPQLKSLLLLEQREIWLLVTDVTLQTKEERDPRLPKTLLVYVAPLCVLGSEVLEALAGAAPHSLFFKDALRDQGRIVCAERTVLLLQKPLLSVVSGASSCELPGPVMLDSLDSATPVNSICSVQGTVVGVDESTAFSWPVCDMCGNGRLEQRPEDRATK

SEQ ID NO: 36673 - protein, 1479 aa, Artificial Sequence
  Synthetic polypeptide
NDGRSSFDWLTGSSTDPLVDHTSPSSDSLLFAHKRSERLQRAPLKSVGPDFGKKRLGLPGDEVDNKVKGAAGRTDLLRLRRRFMRDQEKLSLMYARKGVAEQKREKEIKSELKMKQDAQVVLYRSYRHGDLPDIQIKHSSLITPLQAVAQRDPIIAKQLFSSLFSGILKEMDKFKTLSEKNNITQKLLQDFNRFLNTTFSFFPPFVSCIQDISCQHAALLSLDPAAVSAGCLASLQQPVGIRLLEEALLRLLPAELPAKRVRGKARLPPDVLRWVELAKLYRSIGEYDVLRGIFTSEIGTKQITQSALLAEARSDYSEAAKQYDEALNKQDWVDGEPTEAEKDFWELASLDCYNHLAEWKSLEYCSTASIDSENPPDLNKIWSEPFYQETYLPYMIRSKLKLLLQGEADQSLLTFIDKAMHGELQKAILELHYSQELSLLYLLQDDVDRAKYYIQNGIQSFMQNYSSIDVLLHQSRLTKLQSVQALTEIQEFISFISKQGNLSSQVPLKRLLNTWTNRYPDAKMDPMNIWDDIITNRCFFLSKIEEKLTPLPEDNSMNVDQDGDPSDRMEVQEQEEDISSLIRSCKFSMKMKMIDSARKQNNFSLAMKLLKELHKESKTRDDWLVSWVQSYCRLSHCRSRSQGCSEQVLTVLKTVSLLDENNVSSYLSKNILAFRDQNILLGTTYRIIANALSSEPACLAEIEEDKARRILELSGSSSEDSEKVIAGLYQRAFQHLSEAVQAAEEEAQPPSWSCGPAAGVIDAYMTLADFCDQQLRKEEENASVIDSAELQAYPALVVEKMLKALKLNSNEARLKFPRLLQIIERYPEETLSLMTKEISSVPCWQFISWISHMVALLDKDQAVAVQHSVEEITDNYPQAIVYPFIISSESYSFKDTSTGHKNKEFVARIKSKLDQGGVIQDFINALDQLSNPELLFKDWSNDVRAELAKTPVNKKNIEKMYERMYAALGDPKAPGLGAFRRKFIQTFGKEFDKHFGKGGSKLLRMKLSDFNDITNMLLLKMNKDSKPPGNLKECSPWMSDFKVEFLRNELEIPGQYDGRGKPLPEYHVRIAGFDERVTVMASLRRPKRIIIRGHDEREHPFLVKGGEDLRQDQRVEQLFQVMNGILAQDSACSQRALQLRTYSVVPMTSRLGLIEWLENTVTLKDLLLNTMSQEEKAAYLSDPRAPPCEYKDWLTKMSGKHDVGAYMLMYKGANRTETVTSFRKRESKVPADLLKRAFVRMSTSPEAFLALRSHFASSHALICISHWILGIGDRHLNNFMVAMETGGVIGIDFGHAFGSATQFLPVPELMPFRLTRQFINLMLPMKETGLMYSIMVHALRAFRSDPGLLTNTMDVFVKEPSFDWKNFEQKMLKKGGSWIQEINVAEKNWYPRQKICYAKRKLAGANPAVITCDELLLGHEKAPAFRDYVAVARGSKDHNIRAQEPESGLSEETQVKCLMDQATDPNILGRTWEGWEPWM

SEQ ID NO: 36674 - protein, 17 aa, Artificial Sequence
  Synthetic polypeptide
TVHLRMIEMMEEAHLIG

SEQ ID NO: 36675 - protein, 1448 aa, Artificial Sequence
  Synthetic polypeptide
NDGRSSFDWLTGSSTDPLVDHTSPSSDSLLFAHKRSERLQRAPLKSVGPDFGKKRLGLPGDEVDNKVKGAAGRTDLLRLRRRFMRDQEKLSLMYARKGVAEQKREKEIKSELKMKQDAQVVLYRSYRHGDLPDIQIKHSSLITPLQAVAQRDPIIAKQLFSSLFSGILKEMDKFKTLSEKNNITQKLLQDFNRFLNTTFSFFPPFVSCIQDISCQHAALLSLDPAAVSAGCLASLQQPVGIRLLEEALLRLLPAELPAKRVRGKARLPPDVLRWVELAKLYRSIGEYDVLRGIFTSEIGTKQITQSALLAEARSDYSEAAKQYDEALNKQDWVDGEPTEAEKDFWELASLDCYNHLAEWKSLEYCSTASIDSENPPDLNKIWSEPFYQETYLPYMIRSKLKLLLQGEADQSLLTFIDKAMHGELQKAILELHYSQELSLLYLLQDDVDRAKYYIQNGIQSFMQNYSSIDVLLHQSRLTKLQSVQALTEIQEFISFISKQGNLSSQVPLKRLLNTWTNRYPDAKMDPMNIWDDIITNRCFFLSKIEEKLTPLPEDNSMNVDQDGDPSDRMEVQEQEEDISSLIRSCKFSMKMKMIDSARKQNNFSLAMKLLKELHKESKTRDDWLVSWVQSYCRLSHCRSRSQGCSEQVLTVLKTVSLLDENNVSSYLSKNILAFRDQNILLGTTYRIIANALSSEPACLAEIEEDKARRILELSGSSSEDSEKVIAGLYQRAFQHLSEAVQAAEEEAQPPSWSCGPAAGVIDAYMTLADFCDQQLRKEEENASVIDSAELQAYPALVVEKMLKALKLNSNEARLKFPRLLQIIERYPEETLSLMTKEISSVPCWQFISWISHMVALLDKDQAVAVQHSVEEITDNYPQAIVYPFIISSESYSFKDTSTGHKNKEFVARIKSKLDQGGVIQDFINALDQLSNPELLFKDWSNDVRAELAKTPVNKKNIEKMYERMYAALGDPKAPGLGAFRRKFIQTFGKEFDKHFGKGGSKLLRMKLSDFNDITNMLLLKMNKDSKPPGNLKECSPWMSDFKVEFLRNELEIPGQYDGRGKPLPEYHVRIAGFDERVTVMASLRRPKRIIIRGHDEREHPFLVKGGEDLRQDQRVEQLFQVMNGILAQDSACSQRALQLRTYSVVPMTSSDPRAPPCEYKDWLTKMSGKHDVGAYMLMYKGANRTETVTSFRKRESKVPADLLKRAFVRMSTSPEAFLALRSHFASSHALICISHWILGIGDRHLNNFMVAMETGGVIGIDFGHAFGSATQFLPVPELMPFRLTRQFINLMLPMKETGLMYSIMVHALRAFRSDPGLLTNTMDVFVKEPSFDWKNFEQKMLKKGGSWIQEINVAEKNWYPRQKICYAKRKLAGANPAVITCDELLLGHEKAPAFRDYVAVARGSKDHNIRAQEPESGLSEETQVKCLMDQATDPNILGRTWEGWEPWM

SEQ ID NO: 36676 - protein, 94 aa, Artificial Sequence
  Synthetic polypeptide
LEYKSFRATLLCPASLWVPISGRTELLKAPDLPTPSPAALLTAHSSIWLLPVPCRRQACFCPRSCALAVSSNTLNPRWSFLYVFPVIFGRQYPE

SEQ ID NO: 36677 - protein, 2184 aa, Artificial Sequence
  Synthetic polypeptide
NTSPFEPLFCAQPHCGFPSPAGQSCSRPLTCRLPPLQPFLLLTPAYGSCLCLVGARPAFALGRVHLQFPLIPSTPDGPSYMSSLSYLADSTLSEEMSQFDFSTGVQSYSYSSQDPRPATGRFRRREQRDPTVHDDVLELEMDELNRHECMAPLTALVKHMHRSLGPPQGEEDSVPRDLPSWMKFLHGKLGNPIVPLNIRLFLAKLVINTEEVFRPYAKHWLSPLLQLAASENNGGEGIHYMVVEIVATILSWTGLATPTGVPKDEVLANRLLNFLMKHVFHPKRAVFRHNLEIIKTLVECWKDCLSIPYRLIFEKFSGKDPNSKDNSVGIQLLGIVMANDLPPYDPQCGIQSSEYFQALVNNMSFVRYKEVYAAAAEVLGLILRYVMERKNILEESLCELVAKQLKQHQNTMEDKFIVCLNKVTKSFPPLADRFMNAVFFLLPKFHGVLKTLCLEVVLCRVEGMTELYFQLKSKDFVQVMRHRDDERQKVCLDIIYKMMPKLKPVELRELLNPVVEFVSHPSTTCREQMYNILMWIHDNYRDPESETDNDSQEIFKLAKDVLIQGLIDENPGLQLIIRNFWSHETRLPSNTLDRLLALNSLYSPKIEVHFLSLATNFLLEMTSMSPDYPNPMFEHPLSECEFQEYTIDSDWRFRSTVLTPMFVETQASQGTLQTRTQEGSLSARWPVAGQIRATQQQHDFTLTQTADGRSSFDWLTGSSTDPLVDHTSPSSDSLLFAHKRSERLQRAPLKSVGPDFGKKRLGLPGDEVDNKVKGAAGRTDLLRLRRRFMRDQEKLSLMYARKGVAEQKREKEIKSELKMKQDAQVVLYRSYRHGDLPDIQIKHSSLITPLQAVAQRDPIIAKQLFSSLFSGILKEMDKFKTLSEKNNITQKLLQDFNRFLNTTFSFFPPFVSCIQDISCQHAALLSLDPAAVSAGCLASLQQPVGIRLLEEALLRLLPAELPAKRVRGKARLPPDVLRWVELAKLYRSIGEYDVLRGIFTSEIGTKQITQSALLAEARSDYSEAAKQYDEALNKQDWVDGEPTEAEKDFWELASLDCYNHLAEWKSLEYCSTASIDSENPPDLNKIWSEPFYQETYLPYMIRSKLKLLLQGEADQSLLTFIDKAMHGELQKAILELHYSQELSLLYLLQDDVDRAKYYIQNGIQSFMQNYSSIDVLLHQSRLTKLQSVQALTEIQEFISFISKQGNLSSQVPLKRLLNTWTNRYPDAKMDPMNIWDDIITNRCFFLSKIEEKLTPLPEDNSMNVDQDGDPSDRMEVQEQEEDISSLIRSCKFSMKMKMIDSARKQNNFSLAMKLLKELHKESKTRDDWLVSWVQSYCRLSHCRSRSQGCSEQVLTVLKTVSLLDENNVSSYLSKNILAFRDQNILLGTTYRIIANALSSEPACLAEIEEDKARRILELSGSSSEDSEKVIAGLYQRAFQHLSEAVQAAEEEAQPPSWSCGPAAGVIDAYMTLADFCDQQLRKEEENASVIDSAELQAYPALVVEKMLKALKLNSNEARLKFPRLLQIIERYPEETLSLMTKEISSVPCWQFISWISHMVALLDKDQAVAVQHSVEEITDNYPQAIVYPFIISSESYSFKDTSTGHKNKEFVARIKSKLDQGGVIQDFINALDQLSNPELLFKDWSNDVRAELAKTPVNKKNIEKMYERMYAALGDPKAPGLGAFRRKFIQTFGKEFDKHFGKGGSKLLRMKLSDFNDITNMLLLKMNKDSKPPGNLKECSPWMSDFKVEFLRNELEIPGQYDGRGKPLPEYHVRIAGFDERVTVMASLRRPKRIIIRGHDEREHPFLVKGGEDLRQDQRVEQLFQVMNGILAQDSACSQRALQLRTYSVVPMTSRLGLIEWLENTVTLKDLLLNTMSQEEKAAYLSDPRAPPCEYKDWLTKMSGKHDVGAYMLMYKGANRTETVTSFRKRESKVPADLLKRAFVRMSTSPEAFLALRSHFASSHALICISHWILGIGDRHLNNFMVAMETGGVIGIDFGHAFGSATQFLPVPELMPFRLTRQFINLMLPMKETGLMYSIMVHALRAFRSDPGLLTNTMDVFVKEPSFDWKNFEQKMLKKGGSWIQEINVAEKNWYPRQKICYAKRKLAGANPAVITCDELLLGHEKAPAFRDYVAVARGSKDHNIRAQEPESGLSEETQVKCLMDQATDPNILGRTWEGWEPWM

SEQ ID NO: 36678 - protein, 21 aa, Artificial Sequence
  Synthetic polypeptide
YPQPQMVLPICLPCHIWQTVP

SEQ ID NO: 36679 - protein, 2153 aa, Artificial Sequence
  Synthetic polypeptide
NTSPFEPLFCAQPHCGFPSPAGQSCSRPLTCRLPPLQPFLLLTPAYGSCLCLVGARPAFALGRVHLQFPLIPSTPDGPSYMSSLSYLADSTLSEEMSQFDFSTGVQSYSYSSQDPRPATGRFRRREQRDPTVHDDVLELEMDELNRHECMAPLTALVKHMHRSLGPPQGEEDSVPRDLPSWMKFLHGKLGNPIVPLNIRLFLAKLVINTEEVFRPYAKHWLSPLLQLAASENNGGEGIHYMVVEIVATILSWTGLATPTGVPKDEVLANRLLNFLMKHVFHPKRAVFRHNLEIIKTLVECWKDCLSIPYRLIFEKFSGKDPNSKDNSVGIQLLGIVMANDLPPYDPQCGIQSSEYFQALVNNMSFVRYKEVYAAAAEVLGLILRYVMERKNILEESLCELVAKQLKQHQNTMEDKFIVCLNKVTKSFPPLADRFMNAVFFLLPKFHGVLKTLCLEVVLCRVEGMTELYFQLKSKDFVQVMRHRDDERQKVCLDIIYKMMPKLKPVELRELLNPVVEFVSHPSTTCREQMYNILMWIHDNYRDPESETDNDSQEIFKLAKDVLIQGLIDENPGLQLIIRNFWSHETRLPSNTLDRLLALNSLYSPKIEVHFLSLATNFLLEMTSMSPDYPNPMFEHPLSECEFQEYTIDSDWRFRSTVLTPMFVETQASQGTLQTRTQEGSLSARWPVAGQIRATQQQHDFTLTQTADGRSSFDWLTGSSTDPLVDHTSPSSDSLLFAHKRSERLQRAPLKSVGPDFGKKRLGLPGDEVDNKVKGAAGRTDLLRLRRRFMRDQEKLSLMYARKGVAEQKREKEIKSELKMKQDAQVVLYRSYRHGDLPDIQIKHSSLITPLQAVAQRDPIIAKQLFSSLFSGILKEMDKFKTLSEKNNITQKLLQDFNRFLNTTFSFFPPFVSCIQDISCQHAALLSLDPAAVSAGCLASLQQPVGIRLLEEALLRLLPAELPAKRVRGKARLPPDVLRWVELAKLYRSIGEYDVLRGIFTSEIGTKQITQSALLAEARSDYSEAAKQYDEALNKQDWVDGEPTEAEKDFWELASLDCYNHLAEWKSLEYCSTASIDSENPPDLNKIWSEPFYQETYLPYMIRSKLKLLLQGEADQSLLTFIDKAMHGELQKAILELHYSQELSLLYLLQDDVDRAKYYIQNGIQSFMQNYSSIDVLLHQSRLTKLQSVQALTEIQEFISFISKQGNLSSQVPLKRLLNTWTNRYPDAKMDPMNIWDDIITNRCFFLSKIEEKLTPLPEDNSMNVDQDGDPSDRMEVQEQEEDISSLIRSCKFSMKMKMIDSARKQNNFSLAMKLLKELHKESKTRDDWLVSWVQSYCRLSHCRSRSQGCSEQVLTVLKTVSLLDENNVSSYLSKNILAFRDQNILLGTTYRIIANALSSEPACLAEIEEDKARRILELSGSSSEDSEKVIAGLYQRAFQHLSEAVQAAEEEAQPPSWSCGPAAGVIDAYMTLADFCDQQLRKEEENASVIDSAELQAYPALVVEKMLKALKLNSNEARLKFPRLLQIIERYPEETLSLMTKEISSVPCWQFISWISHMVALLDKDQAVAVQHSVEEITDNYPQAIVYPFIISSESYSFKDTSTGHKNKEFVARIKSKLDQGGVIQDFINALDQLSNPELLFKDWSNDVRAELAKTPVNKKNIEKMYERMYAALGDPKAPGLGAFRRKFIQTFGKEFDKHFGKGGSKLLRMKLSDFNDITNMLLLKMNKDSKPPGNLKECSPWMSDFKVEFLRNELEIPGQYDGRGKPLPEYHVRIAGFDERVTVMASLRRPKRIIIRGHDEREHPFLVKGGEDLRQDQRVEQLFQVMNGILAQDSACSQRALQLRTYSVVPMTSSDPRAPPCEYKDWLTKMSGKHDVGAYMLMYKGANRTETVTSFRKRESKVPADLLKRAFVRMSTSPEAFLALRSHFASSHALICISHWILGIGDRHLNNFMVAMETGGVIGIDFGHAFGSATQFLPVPELMPFRLTRQFINLMLPMKETGLMYSIMVHALRAFRSDPGLLTNTMDVFVKEPSFDWKNFEQKMLKKGGSWIQEINVAEKNWYPRQKICYAKRKLAGANPAVITCDELLLGHEKAPAFRDYVAVARGSKDHNIRAQEPESGLSEETQVKCLMDQATDPNILGRTWEGWEPWM

SEQ ID NO: 36680 - protein, 43 aa, Artificial Sequence
  Synthetic polypeptide
WYHKGQFCICFLAFHHVKLDFASLSPSAMNVRPPQPCGTRLEV

SEQ ID NO: 36681 - protein, 1416 aa, Artificial Sequence
  Synthetic polypeptide
GLPSHVELDLRFNRIREIPGSAFKKLKNLNTLLLNNNHIRKISRNAFEGLENLLYLYLYKNEIHALDKQTFKGLISLEHLYIHFNQLEMLQPETFGDLLRLERLFLHNNKLSKIPAGSFSNLDSLKRLRLDSNALVCDCDLMWLGELLQGFAQHGHTQAAATCEYPRRLHGRAVASVTVEEFNCQSPRITFEPQDVEVPSGNTVYFTCRAEGNPKPEIIWIHNNHSLDLEDDTRLNVFDDGTLMIRNTRESDQGVYQCMARNSAGEAKTQSAMLRYSSLPAKPSFVIQPQDTEVLIGTSTTLECMATGHPHPLITWTRDNGLELDGSRHVATSSGLYLQNITQRDHGRFTCHANNSHGTVQAAANIIVQAPPQFTVTPKDQVVLEEHAVEWLCEADGNPPPVIVWTKTGGQLPVEGQHTVLSSGTLRIDRAAQHDQGQYECQAVSSLGVKKVSVQLTVKPKALAVFTQLPQDTSVEVGKNINISCHAQGEPQPIITWNKEGVQITESGKFHVDDEGTLTIYDAGFPDQGRYECVARNSFGLAVTNMFLTVTAIQGRQAGDDFVESSILDAVQRVDSAINSTRRHLFSQKPHTSSDLLAQFHYPRDPLIVEMARAGEIFEHTLQLIRERVKQGLTVDLEGKEFRYNDLVSPRSLSLIANLSGCTARRPLPNCSNRCFHAKYRAHDGTCNNLQQPTWGAALTAFARLLQPAYRDGIRAPRGLGLPVGSRQPLPPPRLVATVWARAAAVTPDHSYTRMLMHWGWFLEHDLDHTVPALSTARFSDGRPCSSVCTNDPPCFPMNTRHADPRGTHAPCMLFARSSPACASGRPSATVDSVYAREQINQQTAYIDGSNVYGSSERESQALRDPSVPRGLLKTGFPWPPSGKPLLPFSTGPPTECARQEQESPCFLAGDHRANEHLALAAMHTLWFREHNRMATELSALNPHWEGNTVYQEARKIVGAELQHITYSHWLPKVLGDPGTRMLRGYRGYNPNVNAGIINSFATAAFRFGHTLINPILYRLNATLGEISEGHLPFHKALFSPSRIIKEGGIDPVLRGLFGVAAKWRAPSYLLSPELTQRLFSAAYSAAVDSAATIIQRGRDHGIPPYVDFRVFCNLTSVKNFEDLQNEIKDSEIRQKLRKLYGSPGDIDLWPALMVEDLIPGTRVGPTLMCLFVTQFQRLRDGDRFWYENPGVFTPAQLTQLKQASLSRVLCDNGDSIQQVQADVFVKAEYPQDYLNCSEIPKVDLRVWQDCCADCRSRGQFRAVTQESQKKRSAQYSYPVDKDMELSHLRSRQQDKIYVGEDARNVTVLAKTKFSQDFSTFAAEIQETITALREQINKLEARLRQAGCTDVRGVPRKAEERWMKEDCTHCICESGQVTCVVEICPPAPCPSPELVKGTCCPVCRDRGMPSDSPEKR

SEQ ID NO: 36682 - protein, 1269 aa, Artificial Sequence
  Synthetic polypeptide
GLPSHVELDLRFNRIREIPGSAFKKLKNLNTLLLNNNHIRKISRNAFEGLENLLYLYLYKNEIHALDKQTFKGLISLEHLYIHFNQLEMLQPETFGDLLRLERLFLHNNKLSKIPAGSFSNLDSLKRLRLDSNALVCDCDLMWLGELLQGFAQHGHTQAAATCEYPRRLHGRAVASVTVEEFNCQSPRITFEPQDVEVPSGNTVYFTCRAEGNPKPEIIWIHNNHSLDLEDDTRLNVFDDGTLMIRNTRESDQGVYQCMARNSAGEAKTQSAMLRYSSLPAKPSFVIQPQDTEVLIGTSTTLECMATGHPHPLITWTRDNGLELDGSRHVATSSGLYLQNITQRDHGRFTCHANNSHGTVQAAANIIVQAPPQFTVTPKDQVVLEEHAVEWLCEADGNPPPVIVWTKTGGQLPVEGQHTVLSSGTLRIDRAAQHDQGQYECQAVSSLGVKKVSVQLTVKPKALAVFTQLPQDTSVEVGKNINISCHAQGEPQPIITWNKEGVQITESGKFHVDDEGTLTIYDAGFPDQGRYECVARNSFGLAVTNMFLTVTAIQGRQAGDDFVESSILDAVQRVDSAINSTRRHLFSQKPHTSSDLLAQFHYPRDPLIVEMARAGEIFEHTLQLIRERVKQGLTVDLEGKEFRYNDLVSPRSLSLIANLSGCTARRPLPNCSNRCFHAKYRAHDGTCNNLQQPTWGAALTAFARLLQPAYRDGIRAPRGLGLPVGSRQPLPPPRLVATVWARAAAVTPDHSYTRMLMHWGWFLEHDLDHTVPALSTARFSDGRPCSSVCTNDPPCFPMNTRHADPRGTHAPCMLFARSSPACASGRPSATVDSVYAREQINQQTAYIDGSNVYGSSERESQALRDPSVPRGLLKTGFPWPPSGKPLLPFSTGPPTECARQEQESPCFLAGDHRANEHLALAAMHTLWFREHNRMATELSALNPHWEGNTVYQEARKIVGAELQHITYSHWLPKVLGDPGTRMLRGYRGYNPNVNAGIINSFATAAFRFGHTLINPILYRLNATLGEISEGHLPFHKALFSPSRIIKEGGIDPVLRGLFGVAAKWRAPSYLLSPELTQRLFSAAYSAAVDSAATIIQRGRDHGIPPYVDFRVFCNLTSVKNFEDLQNEIKDSEIRQKLRKLYGSPGDIDLWPALMVEDLIPGTRVGPTLMCLFVTQFQRLRDGDRFWYENPGVFTPAQLTQLKQASLSRVLCDNGDSIQQVQADVFVKAEYPQDYLNCSEIPKVDLRVWQDCCADKQAGGTPEAGRVYRC

SEQ ID NO: 36683 - protein, 62 aa, Artificial Sequence
  Synthetic polypeptide
RGETGLASQPTSFSHAGCFLPLNIGLQSSSVLRLGLGHLVAQTCRQPVVGSCDCKYSQETLT

SEQ ID NO: 36684 - protein, 28 aa, Artificial Sequence
  Synthetic polypeptide
DLDWVTLLLKLADSLLWDLVIVNIPKRL

SEQ ID NO: 36685 - protein, 68 aa, Artificial Sequence
  Synthetic polypeptide
SRQKNGKRRDWPSLPAYIFLLYWMLPALKLWTPEFFSFETRTGSPCSSSLQTAYCGSCDCKYSQETLT

SEQ ID NO: 36686 - protein, 73 aa, Artificial Sequence
  Synthetic polypeptide
SAASEYKAGRKMEKGETGLASQPTSFSYTGCFLPSNFGLQNFSVLRLELALLAPQACRQPIVDLVIVNIPKRL

SEQ ID NO: 36687 - protein, 24 aa, Artificial Sequence
  Synthetic polypeptide
DQTARRQRGWGRGARHCRGLSRTF

SEQ ID NO: 36688 - protein, 8 aa, Artificial Sequence
  Synthetic polypeptide
VELFRKIN

SEQ ID NO: 36689 - protein, 224 aa, Artificial Sequence
  Synthetic polypeptide
TWEAEVAMGSERMEMRKRQMPAAQDTPGAAPGQPGAGSRGSNACCFCWCCCCSCSCLTVRNQEDQRPTIASHELRADLPTWEESPAPTLEEVNAWAQSFDKLMVTPAGRNAFREFLRTEFSEENMLFWMACEELKKEANKNIIEEKARIIYEDYISILSPKEVSLDSRVREVINRNMVEPSQHIFDDAQLQIYTLMHRDSYPRFMNSAVYKDLLQSLSEKSIEA

SEQ ID NO: 36690 - protein, 95 aa, Artificial Sequence
  Synthetic polypeptide
KYKISRAWWCMPVILATREAEAGELLEPGRQRLRWDQSGWRCGSGRCPPPRTHQAPPQASPERGVAGPTHAASAGAAVVAARVSLLETRKIRGPQ

SEQ ID NO: 36691 - protein, 63 aa, Artificial Sequence
  Synthetic polypeptide
LLGRLRQENCLNLGGRGCDGIRADGDAEAADARRPGHTRRRPRPARSGESRVQRMLLLLVLLL

SEQ ID NO: 36692 - protein, 60 aa, Artificial Sequence
  Synthetic polypeptide
EQLRSVAPNEINAEADGIRADGDAEAADARRPGHTRRRPRPARSGESRVQRMLLLLVLLL

SEQ ID NO: 36693 - protein, 226 aa, Artificial Sequence
  Synthetic polypeptide
LPMRSMQKQMGSERMEMRKRQMPAAQDTPGAAPGQPGAGSRGSNACCFCWCCCCSCSCLTVRNQEDQRPTIASHELRADLPTWEESPAPTLEEVNAWAQSFDKLMVTPAGRNAFREFLRTEFSEENMLFWMACEELKKEANKNIIEEKARIIYEDYISILSPKEVSLDSRVREVINRNMVEPSQHIFDDAQLQIYTLMHRDSYPRFMNSAVYKDLLQSLSEKSIEA

SEQ ID NO: 36694 - protein, 67 aa, Artificial Sequence
  Synthetic polypeptide
DQCRSRWDQSGWRCGSGRCPPPRTHQAPPQASPERGVAGPTHAASAGAAVVAARVSLLETRKIRGPQ

SEQ ID NO: 36695 - protein, 79 aa, Artificial Sequence
  Synthetic polypeptide
FMQPKCGNNPNVYLLMNGQTKCDVSIQTMRYYSTGKRNEVPIHATAWAKCKNITPSERRQPAKITYVSLLETRKIRGPQ

SEQ ID NO: 36696 - protein, 40 aa, Artificial Sequence
  Synthetic polypeptide
DIIQLEKEMKCRYMLRHGLSAKTLRQVKGDSQQRSHTSHC

SEQ ID NO: 36697 - protein, 178 aa, Artificial Sequence
  Synthetic polypeptide
KETASKDHIRLTVRNQEDQRPTIASHELRADLPTWEESPAPTLEEVNAWAQSFDKLMVTPAGRNAFREFLRTEFSEENMLFWMACEELKKEANKNIIEEKARIIYEDYISILSPKEVSLDSRVREVINRNMVEPSQHIFDDAQLQIYTLMHRDSYPRFMNSAVYKDLLQSLSEKSIEA

SEQ ID NO: 36698 - protein, 70 aa, Artificial Sequence
  Synthetic polypeptide
FMQPKCGNNPNVYLLMNGQTKCDVSIQTMRYYSTGKRNEVPIHATAWAKCKNITPSERRQPAKITYVSLL

SEQ ID NO: 36699 - protein, 13 aa, Artificial Sequence
  Synthetic polypeptide
KETASKDHIRLTV

SEQ ID NO: 36700 - protein, 161 aa, Artificial Sequence
  Synthetic polypeptide
GWAQWCTPVIPALWEAKVGRSRGQEFETSLTSMVKPCHGGALVIPATREAEGGALSLYTALTTQQKLAGVTALSCWLPLRASFPQGPIGGANRDISILQCHGDCDPLVPLMFGSLTVEKLKTLVNPANVTFKTYEGMMHSSCQQEMMDVKQFIDKLLPPID

SEQ ID NO: 36701 - protein, 66 aa, Artificial Sequence
  Synthetic polypeptide
SQLLGRLREELYLYILPLPHSRNWQVSLHSVAGFHFGLPFHRVLSVVLIEIFLFSSATGIVTLWFP

SEQ ID NO: 36702 - protein, 144 aa, Artificial Sequence
  Synthetic polypeptide
GWAQWCTPVIPALWEAKVGRSRGQEFETSLTSMVKPCHGGALVIPATREAEGGALSLYTALTTQQKLAGVTALSCWLPLRASFPQGPIGGANRDISILQCHGDCDPLVPLMFGSLTVEKLKTLVNPANVTFKTYEGMMHSSCQQ

SEQ ID NO: 36703 - protein, 85 aa, Artificial Sequence
  Synthetic polypeptide
GWAQWCTPVIPALWEAKVGRSRGQEFETSLTSMVKPCHGGALVIPATREAEGGALSLYTALTTQQKLAGVTALSCWLPLRASFPQ

SEQ ID NO: 36704 - protein, 42 aa, Artificial Sequence
  Synthetic polypeptide
SQLLGRLREELYLYILPLPHSRNWQVSLHSVAGFHFGLPFHR

SEQ ID NO: 36705 - protein, 53 aa, Artificial Sequence
  Synthetic polypeptide
GWAQWCTPVIPALWEAKVGRSRGQEFETSLTSMVKPCHGGALVIPATREAEAC

SEQ ID NO: 36706 - protein, 182 aa, Artificial Sequence
  Synthetic polypeptide
SQLLGRLRPVRPVTLNMNVAMPSWFDIIGLSPDSQEDESGIKQAAENIKALIDQEVKNGIPSNRIILGGFSQGGALSLYTALTTQQKLAGVTALSCWLPLRASFPQGPIGGANRDISILQCHGDCDPLVPLMFGSLTVEKLKTLVNPANVTFKTYEGMMHSSCQQEMMDVKQFIDKLLPPID

SEQ ID NO: 36707 - protein, 74 aa, Artificial Sequence
  Synthetic polypeptide
SQLLGRLRPVRPVTLNMNVAMPSWFDIIGLSPDSQEDESGIKQAAENIKALIDQEVKNGIPSNRIILGGFSQVR

SEQ ID NO: 36708 - protein, 41 aa, Artificial Sequence
  Synthetic polypeptide
GWAQWCTPVIPALWEAKARMGRSLCRYQKFTYQIYLPACAC

SEQ ID NO: 36709 - protein, 204 aa, Artificial Sequence
  Synthetic polypeptide
SQHFGRPRHGWAEAFAGIRSSHIKYICPHAPVRPVTLNMNVAMPSWFDIIGLSPDSQEDESGIKQAAENIKALIDQEVKNGIPSNRIILGGFSQGGALSLYTALTTQQKLAGVTALSCWLPLRASFPQGPIGGANRDISILQCHGDCDPLVPLMFGSLTVEKLKTLVNPANVTFKTYEGMMHSSCQQEMMDVKQFIDKLLPPID

SEQ ID NO: 36710 - protein, 45 aa, Artificial Sequence
  Synthetic polypeptide
MGAVVHACNPSTLGGQGTDGQKPLQVSEVHISNISARMRLLGLLH

SEQ ID NO: 36711 - protein, 40 aa, Artificial Sequence
  Synthetic polypeptide
GWAQWCTPVIPALWEAKARMGRSLCRYQKFTYQIYLPACV

SEQ ID NO: 36712 - protein, 188 aa, Artificial Sequence
  Synthetic polypeptide
SQHFGRPRHGWAEAFAGIRSSHIKYICPHAFDIIGLSPDSQEDESGIKQAAENIKALIDQEVKNGIPSNRIILGGFSQGGALSLYTALTTQQKLAGVTALSCWLPLRASFPQGPIGGANRDISILQCHGDCDPLVPLMFGSLTVEKLKTLVNPANVTFKTYEGMMHSSCQQEMMDVKQFIDKLLPPID

SEQ ID NO: 36713 - protein, 62 aa, Artificial Sequence
  Synthetic polypeptide
MGAVVHACNPSTLGGQGTDGQKPLQVSEVHISNISARMRLILLGFHQIHRRMNLGLNRQQKI

SEQ ID NO: 36714 - protein, 171 aa, Artificial Sequence
  Synthetic polypeptide
SQHFGRPRHGWAEAFAGIRSSHIKYICPHAFDIIGLSPDSQEDESGIKQAAENIKALIDQEVKNGIPSNRIILGGFSQGGALSLYTALTTQQKLAGVTALSCWLPLRASFPQGPIGGANRDISILQCHGDCDPLVPLMFGSLTVEKLKTLVNPANVTFKTYEGMMHSSCQQ

SEQ ID NO: 36715 - protein, 48 aa, Artificial Sequence
  Synthetic polypeptide
QMRWLMPVISALWEVEAGGSPEVRSSGPAWPTWRNPISTKNTKISQAC

SEQ ID NO: 36716 - protein, 212 aa, Artificial Sequence
  Synthetic polypeptide
SQHFGRWRRADHLRSGVQDQPGQHGETPSLLKIQKLARPVRPVTLNMNVAMPSWFDIIGLSPDSQEDESGIKQAAENIKALIDQEVKNGIPSNRIILGGFSQGGALSLYTALTTQQKLAGVTALSCWLPLRASFPQGPIGGANRDISILQCHGDCDPLVPLMFGSLTVEKLKTLVNPANVTFKTYEGMMHSSCQQEMMDVKQFIDKLLPPID

SEQ ID NO: 36717 - protein, 8 aa, Artificial Sequence
  Synthetic polypeptide
PGLLGLLH

SEQ ID NO: 36718 - protein, 104 aa, Artificial Sequence
  Synthetic polypeptide
SQHFGRWRRADHLRSGVQDQPGQHGETPSLLKIQKLARPVRPVTLNMNVAMPSWFDIIGLSPDSQEDESGIKQAAENIKALIDQEVKNGIPSNRIILGGFSQVR

SEQ ID NO: 36719 - protein, 70 aa, Artificial Sequence
  Synthetic polypeptide
QMRWLMPVISALWEVEAGGSPEVRSSGPAWPTWRNPISTKNTKISQARMGRSLCRYQKFTYQIYLPACAC

SEQ ID NO: 36720 - protein, 234 aa, Artificial Sequence
  Synthetic polypeptide
SQHFGRWRRADHLRSGVQDQPGQHGETPSLLKIQKLARHGWAEAFAGIRSSHIKYICPHAPVRPVTLNMNVAMPSWFDIIGLSPDSQEDESGIKQAAENIKALIDQEVKNGIPSNRIILGGFSQGGALSLYTALTTQQKLAGVTALSCWLPLRASFPQGPIGGANRDISILQCHGDCDPLVPLMFGSLTVEKLKTLVNPANVTFKTYEGMMHSSCQQEMMDVKQFIDKLLPPID

SEQ ID NO: 36721 - protein, 30 aa, Artificial Sequence
  Synthetic polypeptide
PGTDGQKPLQVSEVHISNISARMRLLGLLH

SEQ ID NO: 36722 - protein, 69 aa, Artificial Sequence
  Synthetic polypeptide
QMRWLMPVISALWEVEAGGSPEVRSSGPAWPTWRNPISTKNTKISQARMGRSLCRYQKFTYQIYLPACV

SEQ ID NO: 36723 - protein, 218 aa, Artificial Sequence
  Synthetic polypeptide
SQHFGRWRRADHLRSGVQDQPGQHGETPSLLKIQKLARHGWAEAFAGIRSSHIKYICPHAFDIIGLSPDSQEDESGIKQAAENIKALIDQEVKNGIPSNRIILGGFSQGGALSLYTALTTQQKLAGVTALSCWLPLRASFPQGPIGGANRDISILQCHGDCDPLVPLMFGSLTVEKLKTLVNPANVTFKTYEGMMHSSCQQEMMDVKQFIDKLLPPID

SEQ ID NO: 36724 - protein, 47 aa, Artificial Sequence
  Synthetic polypeptide
PGTDGQKPLQVSEVHISNISARMRLILLGFHQIHRRMNLGLNRQQKI

SEQ ID NO: 36725 - protein, 201 aa, Artificial Sequence
  Synthetic polypeptide
SQHFGRWRRADHLRSGVQDQPGQHGETPSLLKIQKLARHGWAEAFAGIRSSHIKYICPHAFDIIGLSPDSQEDESGIKQAAENIKALIDQEVKNGIPSNRIILGGFSQGGALSLYTALTTQQKLAGVTALSCWLPLRASFPQGPIGGANRDISILQCHGDCDPLVPLMFGSLTVEKLKTLVNPANVTFKTYEGMMHSSCQQ

SEQ ID NO: 36726 - protein, 24 aa, Artificial Sequence
  Synthetic polypeptide
QMRWLMPVISALWEVEAGGSPEAC

SEQ ID NO: 36727 - protein, 188 aa, Artificial Sequence
  Synthetic polypeptide
SQHFGRWRRADHLRPVRPVTLNMNVAMPSWFDIIGLSPDSQEDESGIKQAAENIKALIDQEVKNGIPSNRIILGGFSQGGALSLYTALTTQQKLAGVTALSCWLPLRASFPQGPIGGANRDISILQCHGDCDPLVPLMFGSLTVEKLKTLVNPANVTFKTYEGMMHSSCQQEMMDVKQFIDKLLPPID

SEQ ID NO: 36728 - protein, 80 aa, Artificial Sequence
  Synthetic polypeptide
SQHFGRWRRADHLRPVRPVTLNMNVAMPSWFDIIGLSPDSQEDESGIKQAAENIKALIDQEVKNGIPSNRIILGGFSQVR

SEQ ID NO: 36729 - protein, 46 aa, Artificial Sequence
  Synthetic polypeptide
QMRWLMPVISALWEVEAGGSPEARMGRSLCRYQKFTYQIYLPACAC

SEQ ID NO: 36730 - protein, 210 aa, Artificial Sequence
  Synthetic polypeptide
SQHFGRWRRADHLRHGWAEAFAGIRSSHIKYICPHAPVRPVTLNMNVAMPSWFDIIGLSPDSQEDESGIKQAAENIKALIDQEVKNGIPSNRIILGGFSQGGALSLYTALTTQQKLAGVTALSCWLPLRASFPQGPIGGANRDISILQCHGDCDPLVPLMFGSLTVEKLKTLVNPANVTFKTYEGMMHSSCQQEMMDVKQFIDKLLPPID

SEQ ID NO: 36731 - protein, 45 aa, Artificial Sequence
  Synthetic polypeptide
QMRWLMPVISALWEVEAGGSPEARMGRSLCRYQKFTYQIYLPACV

SEQ ID NO: 36732 - protein, 194 aa, Artificial Sequence
  Synthetic polypeptide
SQHFGRWRRADHLRHGWAEAFAGIRSSHIKYICPHAFDIIGLSPDSQEDESGIKQAAENIKALIDQEVKNGIPSNRIILGGFSQGGALSLYTALTTQQKLAGVTALSCWLPLRASFPQGPIGGANRDISILQCHGDCDPLVPLMFGSLTVEKLKTLVNPANVTFKTYEGMMHSSCQQEMMDVKQFIDKLLPPID

SEQ ID NO: 36733 - protein, 177 aa, Artificial Sequence
  Synthetic polypeptide
SQHFGRWRRADHLRHGWAEAFAGIRSSHIKYICPHAFDIIGLSPDSQEDESGIKQAAENIKALIDQEVKNGIPSNRIILGGFSQGGALSLYTALTTQQKLAGVTALSCWLPLRASFPQGPIGGANRDISILQCHGDCDPLVPLMFGSLTVEKLKTLVNPANVTFKTYEGMMHSSCQQ

SEQ ID NO: 36734 - protein, 47 aa, Artificial Sequence
  Synthetic polypeptide
GRVQWLMPVIPALWEAEAGGSSEARMGRSLCRYQKFTYQIYLPACAC

SEQ ID NO: 36735 - protein, 210 aa, Artificial Sequence
  Synthetic polypeptide
FQHFGRLRQEDHLRHGWAEAFAGIRSSHIKYICPHAPVRPVTLNMNVAMPSWFDIIGLSPDSQEDESGIKQAAENIKALIDQEVKNGIPSNRIILGGFSQGGALSLYTALTTQQKLAGVTALSCWLPLRASFPQGPIGGANRDISILQCHGDCDPLVPLMFGSLTVEKLKTLVNPANVTFKTYEGMMHSSCQQEMMDVKQFIDKLLPPID

SEQ ID NO: 36736 - protein, 46 aa, Artificial Sequence
  Synthetic polypeptide
GRVQWLMPVIPALWEAEAGGSSEARMGRSLCRYQKFTYQIYLPACV

SEQ ID NO: 36737 - protein, 194 aa, Artificial Sequence
  Synthetic polypeptide
FQHFGRLRQEDHLRHGWAEAFAGIRSSHIKYICPHAFDIIGLSPDSQEDESGIKQAAENIKALIDQEVKNGIPSNRIILGGFSQGGALSLYTALTTQQKLAGVTALSCWLPLRASFPQGPIGGANRDISILQCHGDCDPLVPLMFGSLTVEKLKTLVNPANVTFKTYEGMMHSSCQQEMMDVKQFIDKLLPPID

SEQ ID NO: 36738 - protein, 177 aa, Artificial Sequence
  Synthetic polypeptide
FQHFGRLRQEDHLRHGWAEAFAGIRSSHIKYICPHAFDIIGLSPDSQEDESGIKQAAENIKALIDQEVKNGIPSNRIILGGFSQGGALSLYTALTTQQKLAGVTALSCWLPLRASFPQGPIGGANRDISILQCHGDCDPLVPLMFGSLTVEKLKTLVNPANVTFKTYEGMMHSSCQQ

SEQ ID NO: 36739 - protein, 113 aa, Artificial Sequence
  Synthetic polypeptide
GRAQWLIPVIPALWEAEMDGSHETLYANLFHSFFVDNPFQKECFHQKNWYHITLMQRTVGTWRILPNFLKHDLNSPGSMVISYLISLKMNSSKCSVLGRIQGRFSLVLLQDGW

SEQ ID NO: 36740 - protein, 44 aa, Artificial Sequence
  Synthetic polypeptide
SQHFGKPRWTDHMRHCMQTCSILSSWTTHSKKNASTRRTGTILH

SEQ ID NO: 36741 - protein, 69 aa, Artificial Sequence
  Synthetic polypeptide
GWRMTGAWEAEVAVSRDRTIVFQLGRHPLFLCLHKIFEKDLDHLEEQGYLGGFMKNSAIHLLQCMEVFQ

SEQ ID NO: 36742 - protein, 26 aa, Artificial Sequence
  Synthetic polypeptide
AEIAPLCSSLGDTHYSYVYTKYSRRI

SEQ ID NO: 36743 - protein, 127 aa, Artificial Sequence
  Synthetic polypeptide
LLRWLRLEDDWSLGGRGCSEPRSHHCVPAWATPIIPMFTQNIREGFRSLGGTRLFRWLYEKFRYPFAPMYGGFPVKLRTYLGDPIPYDPQITAEELAEKTKNAVQALIDKHQRIPGNIMSALLERFH

SEQ ID NO: 36744 - protein, 56 aa, Artificial Sequence
  Synthetic polypeptide
GWRMTGAWEAEVAVSRDRTIVFQLGRHPLFLCLHKIFEKDLDHLEEQTKNAVQALI

SEQ ID NO: 36745 - protein, 61 aa, Artificial Sequence
  Synthetic polypeptide
LLRWLRLEDDWSLGGRGCSEPRSHHCVPAWATPIIPMFTQNIREGFRSLGGTNEECCSSFD

SEQ ID NO: 36746 - protein, 99 aa, Artificial Sequence
  Synthetic polypeptide
LLRWLRLEDDWSLGGRGCSEPRSHHCVPAWATPIIPMFTQNIREGFRSLGGTRLFRWLYEKFRYPFAPMYGGFPVKLRTYLGDPIPYDPQITAEELAEK

SEQ ID NO: 36747 - protein, 41 aa, Artificial Sequence
  Synthetic polypeptide
GWRMTGAWEAEVAVSRDRTIVFQLGRHPLFLCLHKIFEKDL

SEQ ID NO: 36748 - protein, 46 aa, Artificial Sequence
  Synthetic polypeptide
LLRWLRLEDDWSLGGRGCSEPRSHHCVPAWATPIIPMFTQNIREGF

SEQ ID NO: 36749 - protein, 6 aa, Artificial Sequence
  Synthetic polypeptide
FKSDCH

SEQ ID NO: 36750 - protein, 146 aa, Artificial Sequence
  Synthetic polypeptide
IHRNNLKVIAIDIDPVKIALARNNAEVYGIADKIEFICGDFLLLASFLKADVVFLSPPWGGPDYATAETFDIRTMMSPDGFEIFRLSKKITNNIVYFLPRNADIDQVASLAGPGGQVEIEQNFLNNKLKTITAYFGDLIRRPASET

SEQ ID NO: 36751 - protein, 16 aa, Artificial Sequence
  Synthetic polypeptide
ERKEHEKMLILTRWHP

SEQ ID NO: 36752 - protein, 8 aa, Artificial Sequence
  Synthetic polypeptide
RERSMRKC

SEQ ID NO: 36753 - protein, 43 aa, Artificial Sequence
  Synthetic polypeptide
RLERAKWNMFLNWMFPGKWKMLWRRCFSFTEHPALTNWVTKPP

SEQ ID NO: 36754 - protein, 36 aa, Artificial Sequence
  Synthetic polypeptide
RFERPPASLARLINEGLFLCMKPVLRDWRGQNGICF

SEQ ID NO: 36755 - protein, 797 aa, Artificial Sequence
  Synthetic polypeptide
SQSLETGEGKMEYVFELDVPGKVEDVVETLLQLHRASCLDKLGDQTAMITAILQSRLARTSFDKNRFQNISEKLHMECKAEMVTPLVTNPGHVCITDTNLYFQPLNGYPKPVVQITLQDVRRIYKRRHGLMPLGLEVFCTEDDLCSDIYLKFYEPQDRDDLYFYIATYLEHHVAEHTAESYMLQWQRGHLSNYQYLLHLNNLADRSCNDLSQYPVFPWIIHDYSSSELDLSNPGTFRDLSKPVGALNKERLERLLTRYQEMPEPKFMYGSHYSSPGYVLFYLVRIAPEYMLCLQNGRFDNADRMFNSIAETWKNCLDGATDFKELIPEFYGDDVSFLVNSLKLDLGKRQGGQMVDDVELPPWASSPEDFLQKSKDALESNYVSEHLHEWIDLIFGYKQKGSDAVGAHNVFHPLTYEGGVDLNSIQDPDEKVAMLTQILEFGQTPKQLFVTPHPRRITPKFKSLSQTSSYNASMADSPGEESFEDLTEESKTLAWNNITKLQLHEHYKIHKEAVTGITVSRNGSSVFTTSQDSTLKMFSKESKMLQRSISFSNMALSSCLLLPGDATVITSSWDNNVYFYSIAFGRRQDTLMGHDDAVSKICWHDNRLYSASWDSTVKVWSGVPAEMPGTKRHHFDLLAELEHDVSVDTISLNAASTLLVSGTKEGTVNIWDLTTATLMHQIPCHSGIVCDTAFSPDSRHVLSTGTDGCLNVIDVQTGMLISSMTSDEPQRCFVWDGNSVLSGSQSGELLVWDLLGAKISERIQGHTGAVTCIWMNEQCSSIITGGEDRQIIFWKLQY

SEQ ID NO: 36756 - protein, 26 aa, Artificial Sequence
  Synthetic polypeptide
PHIDNCRARPLENQRLLKNMFKIGDF

SEQ ID NO: 36757 - protein, 896 aa, Artificial Sequence
  Synthetic polypeptide
FSVLFSRVPGGYTQDKSDHILTIVELGHWKIRGSLKICSKSVIFEPDSISQPIIKIPLRDCIKIGKHGENGANRHFTKAKSGGISLIFSQVYFIKEHNVVAPYKIERGKMEYVFELDVPGKVEDVVETLLQLHRASCLDKLGDQTAMITAILQSRLARTSFDKNRFQNISEKLHMECKAEMVTPLVTNPGHVCITDTNLYFQPLNGYPKPVVQITLQDVRRIYKRRHGLMPLGLEVFCTEDDLCSDIYLKFYEPQDRDDLYFYIATYLEHHVAEHTAESYMLQWQRGHLSNYQYLLHLNNLADRSCNDLSQYPVFPWIIHDYSSSELDLSNPGTFRDLSKPVGALNKERLERLLTRYQEMPEPKFMYGSHYSSPGYVLFYLVRIAPEYMLCLQNGRFDNADRMFNSIAETWKNCLDGATDFKELIPEFYGDDVSFLVNSLKLDLGKRQGGQMVDDVELPPWASSPEDFLQKSKDALESNYVSEHLHEWIDLIFGYKQKGSDAVGAHNVFHPLTYEGGVDLNSIQDPDEKVAMLTQILEFGQTPKQLFVTPHPRRITPKFKSLSQTSSYNASMADSPGEESFEDLTEESKTLAWNNITKLQLHEHYKIHKEAVTGITVSRNGSSVFTTSQDSTLKMFSKESKMLQRSISFSNMALSSCLLLPGDATVITSSWDNNVYFYSIAFGRRQDTLMGHDDAVSKICWHDNRLYSASWDSTVKVWSGVPAEMPGTKRHHFDLLAELEHDVSVDTISLNAASTLLVSGTKEGTVNIWDLTTATLMHQIPCHSGIVCDTAFSPDSRHVLSTGTDGCLNVIDVQTGMLISSMTSDEPQRCFVWDGNSVLSGSQSGELLVWDLLGAKISERIQGHTGAVTCIWMNEQCSSIITGGEDRQIIFWKLQY

SEQ ID NO: 36758 - protein, 8 aa, Artificial Sequence
  Synthetic polypeptide
AIGKSEAP

SEQ ID NO: 36759 - protein, 869 aa, Artificial Sequence
  Synthetic polypeptide
GRKIRGSLKICSKSVIFEPDSISQPIIKIPLRDCIKIGKHGENGANRHFTKAKSGGISLIFSQVYFIKEHNVVAPYKIERGKMEYVFELDVPGKVEDVVETLLQLHRASCLDKLGDQTAMITAILQSRLARTSFDKNRFQNISEKLHMECKAEMVTPLVTNPGHVCITDTNLYFQPLNGYPKPVVQITLQDVRRIYKRRHGLMPLGLEVFCTEDDLCSDIYLKFYEPQDRDDLYFYIATYLEHHVAEHTAESYMLQWQRGHLSNYQYLLHLNNLADRSCNDLSQYPVFPWIIHDYSSSELDLSNPGTFRDLSKPVGALNKERLERLLTRYQEMPEPKFMYGSHYSSPGYVLFYLVRIAPEYMLCLQNGRFDNADRMFNSIAETWKNCLDGATDFKELIPEFYGDDVSFLVNSLKLDLGKRQGGQMVDDVELPPWASSPEDFLQKSKDALESNYVSEHLHEWIDLIFGYKQKGSDAVGAHNVFHPLTYEGGVDLNSIQDPDEKVAMLTQILEFGQTPKQLFVTPHPRRITPKFKSLSQTSSYNASMADSPGEESFEDLTEESKTLAWNNITKLQLHEHYKIHKEAVTGITVSRNGSSVFTTSQDSTLKMFSKESKMLQRSISFSNMALSSCLLLPGDATVITSSWDNNVYFYSIAFGRRQDTLMGHDDAVSKICWHDNRLYSASWDSTVKVWSGVPAEMPGTKRHHFDLLAELEHDVSVDTISLNAASTLLVSGTKEGTVNIWDLTTATLMHQIPCHSGIVCDTAFSPDSRHVLSTGTDGCLNVIDVQTGMLISSMTSDEPQRCFVWDGNSVLSGSQSGELLVWDLLGAKISERIQGHTGAVTCIWMNEQCSSIITGGEDRQIIFWKLQY

SEQ ID NO: 36760 - protein, 39 aa, Artificial Sequence
  Synthetic polypeptide
KDGGSLEKLLILSQRQEICEMNLGHPVILASKEGKSEAP

SEQ ID NO: 36761 - protein, 27 aa, Artificial Sequence
  Synthetic polypeptide
TWDILSYWQVRKENQRLLKNMFKIGDF

SEQ ID NO: 36762 - protein, 878 aa, Artificial Sequence
  Synthetic polypeptide
DEPGTSCHTGKKIRGSLKICSKSVIFEPDSISQPIIKIPLRDCIKIGKHGENGANRHFTKAKSGGISLIFSQVYFIKEHNVVAPYKIERGKMEYVFELDVPGKVEDVVETLLQLHRASCLDKLGDQTAMITAILQSRLARTSFDKNRFQNISEKLHMECKAEMVTPLVTNPGHVCITDTNLYFQPLNGYPKPVVQITLQDVRRIYKRRHGLMPLGLEVFCTEDDLCSDIYLKFYEPQDRDDLYFYIATYLEHHVAEHTAESYMLQWQRGHLSNYQYLLHLNNLADRSCNDLSQYPVFPWIIHDYSSSELDLSNPGTFRDLSKPVGALNKERLERLLTRYQEMPEPKFMYGSHYSSPGYVLFYLVRIAPEYMLCLQNGRFDNADRMFNSIAETWKNCLDGATDFKELIPEFYGDDVSFLVNSLKLDLGKRQGGQMVDDVELPPWASSPEDFLQKSKDALESNYVSEHLHEWIDLIFGYKQKGSDAVGAHNVFHPLTYEGGVDLNSIQDPDEKVAMLTQILEFGQTPKQLFVTPHPRRITPKFKSLSQTSSYNASMADSPGEESFEDLTEESKTLAWNNITKLQLHEHYKIHKEAVTGITVSRNGSSVFTTSQDSTLKMFSKESKMLQRSISFSNMALSSCLLLPGDATVITSSWDNNVYFYSIAFGRRQDTLMGHDDAVSKICWHDNRLYSASWDSTVKVWSGVPAEMPGTKRHHFDLLAELEHDVSVDTISLNAASTLLVSGTKEGTVNIWDLTTATLMHQIPCHSGIVCDTAFSPDSRHVLSTGTDGCLNVIDVQTGMLISSMTSDEPQRCFVWDGNSVLSGSQSGELLVWDLLGAKISERIQGHTGAVTCIWMNEQCSSIITGGEDRQIIFWKLQY

SEQ ID NO: 36763 - protein, 36 aa, Artificial Sequence
  Synthetic polypeptide
KDGGSLEKLLILSQRQEICEMNLGHPVILARKSEAP

SEQ ID NO: 36764 - protein, 24 aa, Artificial Sequence
  Synthetic polypeptide
TWDILSYWQENQRLLKNMFKIGDF

SEQ ID NO: 36765 - protein, 72 aa, Artificial Sequence
  Synthetic polypeptide
IIVIQIDVFGPECVSSNPGTSAYQLCDHARYTKPRRNSVQFPSSDGSHETKGPACRHQAAARNDATWPADYH

SEQ ID NO: 36766 - protein, 413 aa, Artificial Sequence
  Synthetic polypeptide
FKLMSLGQSASVQILALLLTSCVTMPDIRNPEGTQYSSHPQMAAMRPRGQPADIRQQPGMMPHGQLTTINQSQLSAQLGLNMGGSNVPHNSPSPPGSKSATPSPSSSVHEDEGDDTSKINGGEKRPASDMGKKPKTPKKKKKKDPNEPQKPVSAYALFFRDTQAAIKGQNPNATFGEVSKIVASMWDGLGEEQKQVYKKKTEAAKKEYLKQLAAYRASLVSKSYSEPVDVKTSQPPQLINSKPSVFHGPSQAHSALYLSSHYHQQPGMNPHLTAMHPSLPRNIAPKPNNQMPVTVSIANMAVSPPPPLQISPPLHQHLNMQQHQPLTMQQPLGNQLPMQVQSALHSPTMQQGFTLQPDYQTIINPTSTAAQVVTQAMEYVRSGCRNPPPQPVDWNNDYCSSGGMQRDKALYLT

SEQ ID NO: 36767 - protein, 15 aa, Artificial Sequence
  Synthetic polypeptide
MQHMRDPKAESPRCW

SEQ ID NO: 36768 - protein, 205 aa, Artificial Sequence
  Synthetic polypeptide
ETLRQNHPGVGKSCLLLQFTDKRFQPVHDLTIGVEFGARMITIDGKQIKLQIWDTAGQESFRSITRSYYRGAAGALLVYDITRRDTFNHLTTWLEDARQHSNSNMVIMLIGNKSDLESRREVKKEEGEAFAREHGLIFMETSAKTASNVEEAFINTAKEIYEKIQEGVFDINNEANGIKIGPQHAATNATHAGNQGGQQAGGGCC

SEQ ID NO: 36769 - protein, 30 aa, Artificial Sequence
  Synthetic polypeptide
GRITQVLVNHAYCYSLQTRGFSQCMTLLLV

SEQ ID NO: 36770 - protein, 174 aa, Artificial Sequence
  Synthetic polypeptide
ETLRQNHPGVGKSCLLLQFTDKRFQPVHDLTIGVEFGARMITIDGKQIKLQIWDTAGQESFRSITRSYYRGAAGALLVYDITRRDTFNHLTTWLEDARQHSNSNMVIMLIGNKRHLLIQQKKFMKKFKKESLTLIMRQMALKLALSMLLPMQHMQAIREDSRLGAAAVESVFTV

SEQ ID NO: 36771 - protein, 133 aa, Artificial Sequence
  Synthetic polypeptide
ETLRQNHPGVGKSCLLLQFTDKRFQPVHDLTIGVEFGARMITIDGKQIKLQIWDTGKSKKKHTLPLVSVHWQKKGRGRARILSFHHKVVLQRCSRSFTSLRYYTERYIQPLDNLVRRCPPAFQFQHGHYAYWK

SEQ ID NO: 36772 - protein, 77 aa, Artificial Sequence
  Synthetic polypeptide
ETLRQNHPGVGKSCLLLQFTDKRFQPVHDLTIGTKHLGAQEAETVKSYPAAGAVVLASHLLGWNGHRCRVRCSNDNY

SEQ ID NO: 36773 - protein, 52 aa, Artificial Sequence
  Synthetic polypeptide
GRITQVLVNHAYCYSLQTRGFSQCMTLLLEQSILEPRKQKLLRAILQQEQLC

SEQ ID NO: 36774 - protein, 31 aa, Artificial Sequence
  Synthetic polypeptide
RPSSSCAMCKGPAACPHAVLPKTRSDRRPGG

SEQ ID NO: 36775 - protein, 1279 aa, Artificial Sequence
  Synthetic polypeptide
EQHGVVEPEDLVPVVPCARVLLRVRMLYYLRQEVIGDQADKILEGADSSEADVWIPEPFHAEVPADWWDKEADKSLLIGVFKHGYEKYNSMRADPALCFLERVGMPDAKAIAAEQRGTDMLADGGDGGEFDREDEDPEYKPTRTPFKDEIDEFANSPSEDKEESMEIHATGKHSESNAELGQLYWPNTSTLTTRLRRLITAYQRSYKRQQMRQEALMKTDRRRRRPREEVRALEAEREAIISEKRQKWTRREEADFYRVVSTFGVIFDPVKQQFDWNQFRAFARLDKKSDESLEKYFSCFVAMCRRVCRMPVKPDDEPPDLSSIIEPITEERASRTLYRIELLRKIREQVLHHPQLGERLKLCQPSLDLPEWWECGRHDRDLLVGAAKHGVSRTDYHILNDPELSFLDAHKNFAQNRGAGNTSSLNPLAVGFVQTPPVISSAHIQDERVLEQAEGKVEEPENPAAKEKCEGKEEEEETDGSGKESKQECEAEASSVKNELKGVEVGADTGSKSISEKGSEEDEEEKLEDDDKSEESSQPEAGAVSRGKNFDEESNASMSTARDETRDGFYMEDGDPSVAQLLHERTFAFSFWPKDRVMINRLDNICEAVLKGKWPVNRRQMFDFQGLIPGYTPTTVDSPLQKRSFAELSMVGQASISGSEDITTSPQLSKEDALNLSVPRQRRRRRRKIEIEAERAAKRRNLMEMVAQLRESQVVSENGQEKVVDLSKASREATSSTSNFSSLSSKFILPNVSTPVSDAFKTQMELLQAGLSRTPTRHLLNGSLVDGEPPMKRRRGRRKNVEGLDLLFMSHKRTSLSAEDAEVTKAFEEDIETPPTRNIPSPGQLDPDTRIPVINLEDGTRLVGEDAPKNKDLVEWLKLHPTYTVDMPSYVPKNADVLFSSFQKPKQKRHRCRNPNKLDINTLTGEERVPVVNKRNGKKMGGAMAPPMKDLPRWLEENPEFAVAPDWTDIVKQSGFVPESMFDRLLTGPVVRGEGASRRGRRPKSEIARAAAAAAAVASTSGINPLLVNSLFAGMDLTSLQNLQNLQSLQLAGLMGFPPGLATAATAGGDAKNPAAVLPLMLPGMAGLPNVFGLGGLLNNPLSAATGNTTTASSQGEPEDSTSKGEEKGNENEDENKDSEKSTDAVSAADSANGSVGAATAPAGLPSNPLAFNPFLLSTMAPGLFYPSMFLPPGLGGLTLPGFPALAGLQNAVGSSEEKAADKAEGGPFKDGETLEGSDAEESLDKTAESSLLEDEIAQGEELDSLDGGDEIENNENDE

SEQ ID NO: 36776 - protein, 18 aa, Artificial Sequence
  Synthetic polypeptide
FQLCHVQGSCCVSACCTT

SEQ ID NO: 36777 - protein, 27 aa, Artificial Sequence
  Synthetic polypeptide
NKGKKEKLEHFARCLQRCSFSCPRRCR

SEQ ID NO: 36778 - protein, 187 aa, Artificial Sequence
  Synthetic polypeptide
HCPKCVATLESAQSLHGPGDPPLLGLPGGAKGEPSRGKCRHPRPLQSFLCVQQQFTGHATRQDHSTENHEKKRAVEPQWERPMLSDKEPKIRGKRKNWSISPGVSRDAASAALADAAEELLDRLASHSMLPSDVSILYHMKTLLLLQDTERLKHALEMFPEHCTMPPGVLSRLKAKKIRRGKREGLP

SEQ ID NO: 36779 - protein, 48 aa, Artificial Sequence
  Synthetic polypeptide
GEKGKIGAFRQVSPEMQLQLPSQMPLRSCWTALRHTACCPQTCPSCTT

SEQ ID NO: 36780 - protein, 213 aa, Artificial Sequence
  Synthetic polypeptide
HCPKCVATLESAQSLHGPGDPPLLGLPGGAKGEPSRGKCRHPRPLQSFLCVQQQFTGHATRQDHSTENHEKKRAVEPQWERPMLSDKEPKIRGKRKNWSISPGVSRDAASAALADAAEELLDRLASHSMLPSDVSILYHMKTLLLLQDTERLKHALEMFPEHCTMPPGGKSEAQRAWANGTGHTAHQWLHVSSDLGLLLSVFPISMTLTDAGV

SEQ ID NO: 36781 - protein, 191 aa, Artificial Sequence
  Synthetic polypeptide
HCPKCVATLESAQSLHGPGDPPLLGLPGGAKGEPSRGKCRHPRPLQSFLCVQQQFTGHATRQDHSTENHEKKRAVEPQWERPMLSDKEPKIRGKRKNWSISPGVSRDAASAALADAAEELLDRLASHSMLPSDVSILYHMKTLLLLQDTERLKHALEMFPEHCTMPPDHARVISAFFSYWITHILPEKSSD

SEQ ID NO: 36782 - protein, 202 aa, Artificial Sequence
  Synthetic polypeptide
HCPKCVATLESAQSLHGPGDPPLLGLPGGAKGEPSRGKCRHPRPLQSFLCVQQQFTGHATRQDHSTENHEKKRAVEPQWERPMLSDKEPKIRGKRKNWSISPGVSRDAASAALADAAEELLDRLASHSMLPSDVSILYHMKTLLLLQDTERLKHALEMFPEHCTMPPGKYRTIYSRSCLRYSHRGLPLKDLHATKTAMSWKI

SEQ ID NO: 36783 - protein, 132 aa, Artificial Sequence
  Synthetic polypeptide
DEDRPDPRAQQSRAAQKQMTLSQMCGHPGVSSVPARSRGSPSTRSAWRSKGDAASAALADAAEELLDRLASHSMLPSDVSILYHMKTLLLLQDTERLKHALEMFPEHCTMPPGVLSRLKAKKIRRGKREGLP

SEQ ID NO: 36784 - protein, 65 aa, Artificial Sequence
  Synthetic polypeptide
HCPKCVATLESAQSLHGPGDPPLLGLPGGAKEMQLQLPSQMPLRSCWTALRHTACCPQTCPSCTT

SEQ ID NO: 36785 - protein, 56 aa, Artificial Sequence
  Synthetic polypeptide
PSSPAEQGSPEADDTVPNVWPPWSQLSPCTVQGIPLYSVCLAEQRRCSFSCPRRCR

SEQ ID NO: 36786 - protein, 158 aa, Artificial Sequence
  Synthetic polypeptide
DEDRPDPRAQQSRAAQKQMTLSQMCGHPGVSSVPARSRGSPSTRSAWRSKGDAASAALADAAEELLDRLASHSMLPSDVSILYHMKTLLLLQDTERLKHALEMFPEHCTMPPGGKSEAQRAWANGTGHTAHQWLHVSSDLGLLLSVFPISMTLTDAGV

SEQ ID NO: 36787 - protein, 136 aa, Artificial Sequence
  Synthetic polypeptide
DEDRPDPRAQQSRAAQKQMTLSQMCGHPGVSSVPARSRGSPSTRSAWRSKGDAASAALADAAEELLDRLASHSMLPSDVSILYHMKTLLLLQDTERLKHALEMFPEHCTMPPDHARVISAFFSYWITHILPEKSSD

SEQ ID NO: 36788 - protein, 147 aa, Artificial Sequence
  Synthetic polypeptide
DEDRPDPRAQQSRAAQKQMTLSQMCGHPGVSSVPARSRGSPSTRSAWRSKGDAASAALADAAEELLDRLASHSMLPSDVSILYHMKTLLLLQDTERLKHALEMFPEHCTMPPGKYRTIYSRSCLRYSHRGLPLKDLHATKTAMSWKI

SEQ ID NO: 36789 - protein, 65 aa, Artificial Sequence
  Synthetic polypeptide
DEDRPDPRAQQSRAAQKQMTLSQMCGHPGVSSVPARSRGSPSTRSAWRSKGCLQRCSFSCPRRCR

SEQ ID NO: 36790 - protein, 116 aa, Artificial Sequence
  Synthetic polypeptide
HCPKCVATLESAQSLHGPGDPPLLGLPGGAKGVSRDAASAALADAAEELLDRLASHSMLPSDVSILYHMKTLLLLQDTERLKHALEMFPEHCTMPPGVLSRLKAKKIRRGKREGLP

SEQ ID NO: 36791 - protein, 82 aa, Artificial Sequence
  Synthetic polypeptide
PSSPAEQGSPEADDTVPNVWPPWSQLSPCTVQGIPLYSVCLAEQRVSPEMQLQLPSQMPLRSCWTALRHTACCPQTCPSCTT

SEQ ID NO: 36792 - protein, 142 aa, Artificial Sequence
  Synthetic polypeptide
HCPKCVATLESAQSLHGPGDPPLLGLPGGAKGVSRDAASAALADAAEELLDRLASHSMLPSDVSILYHMKTLLLLQDTERLKHALEMFPEHCTMPPGGKSEAQRAWANGTGHTAHQWLHVSSDLGLLLSVFPISMTLTDAGV

SEQ ID NO: 36793 - protein, 120 aa, Artificial Sequence
  Synthetic polypeptide
HCPKCVATLESAQSLHGPGDPPLLGLPGGAKGVSRDAASAALADAAEELLDRLASHSMLPSDVSILYHMKTLLLLQDTERLKHALEMFPEHCTMPPDHARVISAFFSYWITHILPEKSSD

SEQ ID NO: 36794 - protein, 131 aa, Artificial Sequence
  Synthetic polypeptide
HCPKCVATLESAQSLHGPGDPPLLGLPGGAKGVSRDAASAALADAAEELLDRLASHSMLPSDVSILYHMKTLLLLQDTERLKHALEMFPEHCTMPPGKYRTIYSRSCLRYSHRGLPLKDLHATKTAMSWKI

SEQ ID NO: 36795 - protein, 159 aa, Artificial Sequence
  Synthetic polypeptide
FYSVCDRAAWGRPTVMPGVTRKPGWETPVEGIRKLLRKTAHRKMELLEPSRGDYHGNICSHLSSGICKSCVWALGVSRDAASAALADAAEELLDRLASHSMLPSDVSILYHMKTLLLLQDTERLKHALEMFPEHCTMPPGVLSRLKAKKIRRGKREGLP

SEQ ID NO: 36796 - protein, 92 aa, Artificial Sequence
  Synthetic polypeptide
PESQDGKHLLKGSGSYSGKQLIERWNSWNPHGEIIMETSAATCLQESASPVCGRWVSPEMQLQLPSQMPLRSCWTALRHTACCPQTCPSCTT

SEQ ID NO: 36797 - protein, 47 aa, Artificial Sequence
  Synthetic polypeptide
KDGTPGTLTGRLSWKHLQPLVFRNLQVLCVGVGCLQRCSFSCPRRCR

SEQ ID NO: 36798 - protein, 185 aa, Artificial Sequence
  Synthetic polypeptide
FYSVCDRAAWGRPTVMPGVTRKPGWETPVEGIRKLLRKTAHRKMELLEPSRGDYHGNICSHLSSGICKSCVWALGVSRDAASAALADAAEELLDRLASHSMLPSDVSILYHMKTLLLLQDTERLKHALEMFPEHCTMPPGGKSEAQRAWANGTGHTAHQWLHVSSDLGLLLSVFPISMTLTDAGV

SEQ ID NO: 36799 - protein, 163 aa, Artificial Sequence
  Synthetic polypeptide
FYSVCDRAAWGRPTVMPGVTRKPGWETPVEGIRKLLRKTAHRKMELLEPSRGDYHGNICSHLSSGICKSCVWALGVSRDAASAALADAAEELLDRLASHSMLPSDVSILYHMKTLLLLQDTERLKHALEMFPEHCTMPPDHARVISAFFSYWITHILPEKSSD

SEQ ID NO: 36800 - protein, 174 aa, Artificial Sequence
  Synthetic polypeptide
FYSVCDRAAWGRPTVMPGVTRKPGWETPVEGIRKLLRKTAHRKMELLEPSRGDYHGNICSHLSSGICKSCVWALGVSRDAASAALADAAEELLDRLASHSMLPSDVSILYHMKTLLLLQDTERLKHALEMFPEHCTMPPGKYRTIYSRSCLRYSHRGLPLKDLHATKTAMSWKI

SEQ ID NO: 36801 - protein, 154 aa, Artificial Sequence
  Synthetic polypeptide
FYSVCDRAAWGRPTVMPGVTRKPGWETPVEGIRKLLRKTAHRKMELLEPSRGDYHGNICSHLSSGICKSCVSRDAASAALADAAEELLDRLASHSMLPSDVSILYHMKTLLLLQDTERLKHALEMFPEHCTMPPGVLSRLKAKKIRRGKREGLP

SEQ ID NO: 36802 - protein, 87 aa, Artificial Sequence
  Synthetic polypeptide
PESQDGKHLLKGSGSYSGKQLIERWNSWNPHGEIIMETSAATCLQESASPVSPEMQLQLPSQMPLRSCWTALRHTACCPQTCPSCTT

SEQ ID NO: 36803 - protein, 42 aa, Artificial Sequence
  Synthetic polypeptide
KDGTPGTLTGRLSWKHLQPLVFRNLQVLCLQRCSFSCPRRCR

SEQ ID NO: 36804 - protein, 180 aa, Artificial Sequence
  Synthetic polypeptide
FYSVCDRAAWGRPTVMPGVTRKPGWETPVEGIRKLLRKTAHRKMELLEPSRGDYHGNICSHLSSGICKSCVSRDAASAALADAAEELLDRLASHSMLPSDVSILYHMKTLLLLQDTERLKHALEMFPEHCTMPPGGKSEAQRAWANGTGHTAHQWLHVSSDLGLLLSVFPISMTLTDAGV

SEQ ID NO: 36805 - protein, 158 aa, Artificial Sequence
  Synthetic polypeptide
FYSVCDRAAWGRPTVMPGVTRKPGWETPVEGIRKLLRKTAHRKMELLEPSRGDYHGNICSHLSSGICKSCVSRDAASAALADAAEELLDRLASHSMLPSDVSILYHMKTLLLLQDTERLKHALEMFPEHCTMPPDHARVISAFFSYWITHILPEKSSD

SEQ ID NO: 36806 - protein, 169 aa, Artificial Sequence
  Synthetic polypeptide
FYSVCDRAAWGRPTVMPGVTRKPGWETPVEGIRKLLRKTAHRKMELLEPSRGDYHGNICSHLSSGICKSCVSRDAASAALADAAEELLDRLASHSMLPSDVSILYHMKTLLLLQDTERLKHALEMFPEHCTMPPGKYRTIYSRSCLRYSHRGLPLKDLHATKTAMSWKI

SEQ ID NO: 36807 - protein, 38 aa, Artificial Sequence
  Synthetic polypeptide
TLIALLHSSPGNTRQSMEDTRMGGKADSQELHSSRGLW

SEQ ID NO: 36808 - protein, 51 aa, Artificial Sequence
  Synthetic polypeptide
LHYCTPARETQDKAWRTQEWEERRTLRNFILHVVYGDCIAGRLDICSCRLV

SEQ ID NO: 36809 - protein, 743 aa, Artificial Sequence
  Synthetic polypeptide
EFKATVNSDCTTALQPGKHKTKHGGHKNGRKGGLSGTSFFTWFMVIALLGVWTSVAVVWFDLVDYEEVLGKLGIYDADGDGDFDVDDAKVLLGLKERSTSEPAVPPEEAEPHTEPEEQVPVEAEPQNIEDEAKEQIQSLLHEMVHAEHVEGEDLQQEDGPTGEPQQEDDEFLMATDVDDRFETLEPEVSHEETEHSYHVEETVSQDCNQDMEEMMSEQENPDSSEPVVEDERLHHDTDDVTYQVYEEQAVYEPLENEGIEITEVTAPPEDNPVEDSQVIVEEVSIFPVEEQQEVPPETNRKTDDPEQKAKVKKKKPKLLNKFDKTIKAELDAAEKLRKRGKIEEAVNAFKELVRKYPQSPRARYGKAQCEDDLAEKRRSNEVLRGAIETYQEVASLPDVPADLLKLSLKRRSDRQQFLGHMRGSLLTLQRLVQLFPNDTSLKNDLGVGYLLIGDNDNAKKVYEEVLSVTPNDGFAKVHYGFILKAQNKIAESIPYLKEGIESGDPGTDDGRFYFHLGDAMQRVGNKEAYKWYELGHKRGHFASVWQRSLYNVNGLKAQPWWTPKETGYTELVKSLERNWKLIRDEGLAVMDKAKGLFLPEDENLREKGDWSQFTLWQQGRRNENACKGAPKTCTLLEKFPETTGCRRGQIKYSIMHPGTHVWPHTGPTNCRLRMHLGLVIPKEGCKIRCANETKTWEEGKVLIFDDSFEHEVWQDASSFRLIFIVDVWHPELTPQQRRSLPAI

SEQ ID NO: 36810 - protein, 150 aa, Artificial Sequence
  Synthetic polypeptide
EFKATVNSDCTTALQPGKHKTKHGGHKNGRKGGLSGTSFFTWFMVIALLGVWTSVAVVWFDLVDYEEVLGKLGIYDADGDGDFDVDDAKVLLVKKKKPKLLNKFDKTIKAELDAAEKLRKRGKIEEAVNAFKELVRKYPQSPRARYGKAQ

SEQ ID NO: 36811 - protein, 298 aa, Artificial Sequence
  Synthetic polypeptide
EFKATVNSDCTTALQPGKHKTKHGGHKNGRKGGLSGTSFFTWFMVIALLGVWTSVAVVWFDLVDYEEVLGKLGIYDADGDGDFDVDDAKVLLGLKERSTSEPAVPPEEAEPHTEPEEQVPVEAEPQNIEDEAKEQIQSLLHEMVHAEHVEGEDLQQEDGPTGEPQQEDDEFLMATDVDDRFETLEPEVSHEETEHSYHVEETVSQDCNQDMEEMMSEQENPDSSEPVVEDERLHHDTDDVTYQVYEEQAVYEPLENEGIEITEVTAPPEDNPVEDSQVIVEEVSIFPVEEQQEVPPDT

SEQ ID NO: 36812 - protein, 312 aa, Artificial Sequence
  Synthetic polypeptide
EFKATVNSDCTTALQPGKHKTKHGGHKNGRKGGLSGTSFFTWFMVIALLGVWTSVAVVWFDLVDYEEVLAKAKDFRYNLSEVLQGKLGIYDADGDGDFDVDDAKVLLGLKERSTSEPAVPPEEAEPHTEPEEQVPVEAEPQNIEDEAKEQIQSLLHEMVHAEHVEGEDLQQEDGPTGEPQQEDDEFLMATDVDDRFETLEPEVSHEETEHSYHVEETVSQDCNQDMEEMMSEQENPDSSEPVVEDERLHHDTDDVTYQVYEEQVYEPLENEGIEITEVTAPPEDNPVEDSQVIVEEVSIFPVEEQQEVPPDT

SEQ ID NO: 36813 - protein, 255 aa, Artificial Sequence
  Synthetic polypeptide
EFKATVNSDCTTALQPGKHKTKHGGHKNGRKGGLSGTSFFTWFMVIALLGVWTSVAVVWFDLVDYEEVLGKLGIYDADGDGDFDVDDAKVLLGLKERSTSEPAVPPEEAEPHTEPEEQVPVEAEPQNIEDEAKEQIQSLLHEMVHAEHETEHSYHVEETVSQDCNQDMEEMMSEQENPDSSEPVVEDERLHHDTDDVTYQVYEEQAVYEPLENEGIEITEVTAPPEDNPVEDSQVIVEEVSIFPVEEQQEVPPDT

SEQ ID NO: 36814 - protein, 313 aa, Artificial Sequence
  Synthetic polypeptide
EFKATVNSDCTTALQPGKHKTKHGGHKNGRKGGLSGTSFFTWFMVIALLGVWTSVAVVWFDLVDYEEVLAKAKDFRYNLSEVLQGKLGIYDADGDGDFDVDDAKVLLGLKERSTSEPAVPPEEAEPHTEPEEQVPVEAEPQNIEDEAKEQIQSLLHEMVHAEHVEGEDLQQEDGPTGEPQQEDDEFLMATDVDDRFETLEPEVSHEETEHSYHVEETVSQDCNQDMEEMMSEQENPDSSEPVVEDERLHHDTDDVTYQVYEEQAVYEPLENEGIEITEVTAPPEDNPVEDSQVIVEEVSIFPVEEQQEVPPDT

SEQ ID NO: 36815 - protein, 270 aa, Artificial Sequence
  Synthetic polypeptide
EFKATVNSDCTTALQPGKHKTKHGGHKNGRKGGLSGTSFFTWFMVIALLGVWTSVAVVWFDLVDYEEVLAKAKDFRYNLSEVLQGKLGIYDADGDGDFDVDDAKVLLGLKERSTSEPAVPPEEAEPHTEPEEQVPVEAEPQNIEDEAKEQIQSLLHEMVHAEHETEHSYHVEETVSQDCNQDMEEMMSEQENPDSSEPVVEDERLHHDTDDVTYQVYEEQAVYEPLENEGIEITEVTAPPEDNPVEDSQVIVEEVSIFPVEEQQEVPPDT

SEQ ID NO: 36816 - protein, 212 aa, Artificial Sequence
  Synthetic polypeptide
EFKATVNSDCTTALQPGKHKTKHGGHKNGRKGGLSGTSFFTWFMVIALLGVWTSVAVVWFDLVDYEEVLGKLGIYDADGDGDFDVDDAKVLLGLKERSTSEPAVPPEEAEPHTEPEEQVPVEAEPQNIEDEAKEQIQSLLHEMVHAEHETEHSYHVEETDSSEPVVEDERLHHDTDDVTYQVYEEQAVYEPLENEGIEITEVTAPPEDNPVE

SEQ ID NO: 36817 - protein, 98 aa, Artificial Sequence
  Synthetic polypeptide
EFKATVNSDCTTALQPGKHKTKHGGHKNGRKGGLSGTSFFTWFMVIALLGVWTSVAVVWFDLVDYEEVLGKLGIYDADGDGDFDVDDAKVLLGNLHCI

SEQ ID NO: 36818 - protein, 239 aa, Artificial Sequence
  Synthetic polypeptide
EFKATVNSDCTTALQPGKHKTKHGGHKNGRKGGLSGTSFFTWFMVIALLGVWTSVAVVWFDLVDYEEVLAKAKDFRYNLSEVLQGKLGIYDADGDGDFDVDDAKVLLEGPSGVAKRKTKAKVKELTKEELKKEKEKPESRKESKNEERKKGKKEDVRKDKKIADADLSRKESPKGKKDREKEKVDLEKSAKTKENRKKSTNMKDVSSKMASRDKDDRKESRSSTRYAHLTKGNTQKRNG

SEQ ID NO: 36819 - protein, 224 aa, Artificial Sequence
  Synthetic polypeptide
EFKATVNSDCTTALQPGKHKTKHGGHKNGRKGGLSGTSFFTWFMVIALLGVWTSVAVVWFDLVDYEEVLGKLGIYDADGDGDFDVDDAKVLLEGPSGVAKRKTKAKVKELTKEELKKEKEKPESRKESKNEERKKGKKEDVRKDKKIADADLSRKESPKGKKDREKEKVDLEKSAKTKENRKKSTNMKDVSSKMASRDKDDRKESRSSTRYAHLTKGNTQKRNG

SEQ ID NO: 36820 - protein, 188 aa, Artificial Sequence
  Synthetic polypeptide
EFKATVNSDCTTALQPGKHKTKHGGHKNGRKGGLSGTSFFTWFMVIALLGVWTSVAVVWFDLVDYEEVLAKAKDFRYNLSEVLQGKLGIYDADGDGDFDVDDAKVLLGLTKDGSNENIDSLEEVLNILAEESSDWFYGFLSFLYDIMTPFEMLEEEEEESETADGVDGTSQNEGVQGKTCVILDLHNQ

SEQ ID NO: 36821 - protein, 68 aa, Artificial Sequence
  Synthetic polypeptide
SQEEFKTSVGNKARLCLYKTFFFFLISCIWRCMPVVPATQEAERQSMEDTRMGGKADSQELHSSRGLW

SEQ ID NO: 36822 - protein, 58 aa, Artificial Sequence
  Synthetic polypeptide
LAAYGGACLWSQLLRRLRDKAWRTQEWEERRTLRNFILHVVYGDCIAGRLDICSCRLV

SEQ ID NO: 36823 - protein, 49 aa, Artificial Sequence
  Synthetic polypeptide
SWNSQLQELDKAWRTQEWEERRTLRNFILHVVYGDCIAGRLDICSCRLV

SEQ ID NO: 36824 - protein, 39 aa, Artificial Sequence
  Synthetic polypeptide
PAGSLILEFPASGTRQSMEDTRMGGKADSQELHSSRGLW

SEQ ID NO: 36825 - protein, 45 aa, Artificial Sequence
  Synthetic polypeptide
TAIIGDKAWRTQEWEERRTLRNFILHVVYGDCIAGRLDICSCRLV

SEQ ID NO: 36826 - protein, 725 aa, Artificial Sequence
  Synthetic polypeptide
LETKHGGHKNGRKGGLSGTSFFTWFMVIALLGVWTSVAVVWFDLVDYEEVLGKLGIYDADGDGDFDVDDAKVLLGLKERSTSEPAVPPEEAEPHTEPEEQVPVEAEPQNIEDEAKEQIQSLLHEMVHAEHVEGEDLQQEDGPTGEPQQEDDEFLMATDVDDRFETLEPEVSHEETEHSYHVEETVSQDCNQDMEEMMSEQENPDSSEPVVEDERLHHDTDDVTYQVYEEQAVYEPLENEGIEITEVTAPPEDNPVEDSQVIVEEVSIFPVEEQQEVPPETNRKTDDPEQKAKVKKKKPKLLNKFDKTIKAELDAAEKLRKRGKIEEAVNAFKELVRKYPQSPRARYGKAQCEDDLAEKRRSNEVLRGAIETYQEVASLPDVPADLLKLSLKRRSDRQQFLGHMRGSLLTLQRLVQLFPNDTSLKNDLGVGYLLIGDNDNAKKVYEEVLSVTPNDGFAKVHYGFILKAQNKIAESIPYLKEGIESGDPGTDDGRFYFHLGDAMQRVGNKEAYKWYELGHKRGHFASVWQRSLYNVNGLKAQPWWTPKETGYTELVKSLERNWKLIRDEGLAVMDKAKGLFLPEDENLREKGDWSQFTLWQQGRRNENACKGAPKTCTLLEKFPETTGCRRGQIKYSIMHPGTHVWPHTGPTNCRLRMHLGLVIPKEGCKIRCANETKTWEEGKVLIFDDSFEHEVWQDASSFRLIFIVDVWHPELTPQQRRSLPAI

SEQ ID NO: 36827 - protein, 48 aa, Artificial Sequence
  Synthetic polypeptide
VPLCTLSCQNRLWPPVTLNCNNWRQSMEDTRMGGKADSQELHSSRGLW

SEQ ID NO: 36828 - protein, 132 aa, Artificial Sequence
  Synthetic polypeptide
LETKHGGHKNGRKGGLSGTSFFTWFMVIALLGVWTSVAVVWFDLVDYEEVLGKLGIYDADGDGDFDVDDAKVLLVKKKKPKLLNKFDKTIKAELDAAEKLRKRGKIEEAVNAFKELVRKYPQSPRARYGKAQ

SEQ ID NO: 36829 - protein, 280 aa, Artificial Sequence
  Synthetic polypeptide
LETKHGGHKNGRKGGLSGTSFFTWFMVIALLGVWTSVAVVWFDLVDYEEVLGKLGIYDADGDGDFDVDDAKVLLGLKERSTSEPAVPPEEAEPHTEPEEQVPVEAEPQNIEDEAKEQIQSLLHEMVHAEHVEGEDLQQEDGPTGEPQQEDDEFLMATDVDDRFETLEPEVSHEETEHSYHVEETVSQDCNQDMEEMMSEQENPDSSEPVVEDERLHHDTDDVTYQVYEEQAVYEPLENEGIEITEVTAPPEDNPVEDSQVIVEEVSIFPVEEQQEVPPDT

SEQ ID NO: 36830 - protein, 294 aa, Artificial Sequence
  Synthetic polypeptide
LETKHGGHKNGRKGGLSGTSFFTWFMVIALLGVWTSVAVVWFDLVDYEEVLAKAKDFRYNLSEVLQGKLGIYDADGDGDFDVDDAKVLLGLKERSTSEPAVPPEEAEPHTEPEEQVPVEAEPQNIEDEAKEQIQSLLHEMVHAEHVEGEDLQQEDGPTGEPQQEDDEFLMATDVDDRFETLEPEVSHEETEHSYHVEETVSQDCNQDMEEMMSEQENPDSSEPVVEDERLHHDTDDVTYQVYEEQVYEPLENEGIEITEVTAPPEDNPVEDSQVIVEEVSIFPVEEQQEVPPDT

SEQ ID NO: 36831 - protein, 237 aa, Artificial Sequence
  Synthetic polypeptide
LETKHGGHKNGRKGGLSGTSFFTWFMVIALLGVWTSVAVVWFDLVDYEEVLGKLGIYDADGDGDFDVDDAKVLLGLKERSTSEPAVPPEEAEPHTEPEEQVPVEAEPQNIEDEAKEQIQSLLHEMVHAEHETEHSYHVEETVSQDCNQDMEEMMSEQENPDSSEPVVEDERLHHDTDDVTYQVYEEQAVYEPLENEGIEITEVTAPPEDNPVEDSQVIVEEVSIFPVEEQQEVPPDT

SEQ ID NO: 36832 - protein, 295 aa, Artificial Sequence
  Synthetic polypeptide
LETKHGGHKNGRKGGLSGTSFFTWFMVIALLGVWTSVAVVWFDLVDYEEVLAKAKDFRYNLSEVLQGKLGIYDADGDGDFDVDDAKVLLGLKERSTSEPAVPPEEAEPHTEPEEQVPVEAEPQNIEDEAKEQIQSLLHEMVHAEHVEGEDLQQEDGPTGEPQQEDDEFLMATDVDDRFETLEPEVSHEETEHSYHVEETVSQDCNQDMEEMMSEQENPDSSEPVVEDERLHHDTDDVTYQVYEEQAVYEPLENEGIEITEVTAPPEDNPVEDSQVIVEEVSIFPVEEQQEVPPDT

SEQ ID NO: 36833 - protein, 252 aa, Artificial Sequence
  Synthetic polypeptide
LETKHGGHKNGRKGGLSGTSFFTWFMVIALLGVWTSVAVVWFDLVDYEEVLAKAKDFRYNLSEVLQGKLGIYDADGDGDFDVDDAKVLLGLKERSTSEPAVPPEEAEPHTEPEEQVPVEAEPQNIEDEAKEQIQSLLHEMVHAEHETEHSYHVEETVSQDCNQDMEEMMSEQENPDSSEPVVEDERLHHDTDDVTYQVYEEQAVYEPLENEGIEITEVTAPPEDNPVEDSQVIVEEVSIFPVEEQQEVPPDT

SEQ ID NO: 36834 - protein, 194 aa, Artificial Sequence
  Synthetic polypeptide
LETKHGGHKNGRKGGLSGTSFFTWFMVIALLGVWTSVAVVWFDLVDYEEVLGKLGIYDADGDGDFDVDDAKVLLGLKERSTSEPAVPPEEAEPHTEPEEQVPVEAEPQNIEDEAKEQIQSLLHEMVHAEHETEHSYHVEETDSSEPVVEDERLHHDTDDVTYQVYEEQAVYEPLENEGIEITEVTAPPEDNPVE

SEQ ID NO: 36835 - protein, 80 aa, Artificial Sequence
  Synthetic polypeptide
LETKHGGHKNGRKGGLSGTSFFTWFMVIALLGVWTSVAVVWFDLVDYEEVLGKLGIYDADGDGDFDVDDAKVLLGNLHCI

SEQ ID NO: 36836 - protein, 221 aa, Artificial Sequence
  Synthetic polypeptide
LETKHGGHKNGRKGGLSGTSFFTWFMVIALLGVWTSVAVVWFDLVDYEEVLAKAKDFRYNLSEVLQGKLGIYDADGDGDFDVDDAKVLLEGPSGVAKRKTKAKVKELTKEELKKEKEKPESRKESKNEERKKGKKEDVRKDKKIADADLSRKESPKGKKDREKEKVDLEKSAKTKENRKKSTNMKDVSSKMASRDKDDRKESRSSTRYAHLTKGNTQKRNG

SEQ ID NO: 36837 - protein, 206 aa, Artificial Sequence
  Synthetic polypeptide
LETKHGGHKNGRKGGLSGTSFFTWFMVIALLGVWTSVAVVWFDLVDYEEVLGKLGIYDADGDGDFDVDDAKVLLEGPSGVAKRKTKAKVKELTKEELKKEKEKPESRKESKNEERKKGKKEDVRKDKKIADADLSRKESPKGKKDREKEKVDLEKSAKTKENRKKSTNMKDVSSKMASRDKDDRKESRSSTRYAHLTKGNTQKRNG

SEQ ID NO: 36838 - protein, 170 aa, Artificial Sequence
  Synthetic polypeptide
LETKHGGHKNGRKGGLSGTSFFTWFMVIALLGVWTSVAVVWFDLVDYEEVLAKAKDFRYNLSEVLQGKLGIYDADGDGDFDVDDAKVLLGLTKDGSNENIDSLEEVLNILAEESSDWFYGFLSFLYDIMTPFEMLEEEEEESETADGVDGTSQNEGVQGKTCVILDLHNQ

SEQ ID NO: 36839 - protein, 31 aa, Artificial Sequence
  Synthetic polypeptide
AGGRARCRGGDLKGKEIKFQYKTVRFIKKML

SEQ ID NO: 36840 - protein, 11 aa, Artificial Sequence
  Synthetic polypeptide
RAGGRGAAAET

SEQ ID NO: 36841 - protein, 585 aa, Artificial Sequence
  Synthetic polypeptide
GRAGAVPRRRPKGQGNKVSVQNGSIHQKDAVNDDDFEPYLSSQTNQVSLLTVSDPYMPSYYAPSIGFPYSLGEAAWSTAGDQPMPYLTTYGQMSNGEHHYIPDGVFSQPGALGNTPPFLGQHGFNFFPGNADFSTWGTSGSQGQSTQSSAYSSSYGYPPSSLGRAITDGQAGFGNDTLSKVPGISSIEQGMTGLKIGGDLTAAVTKTVGTALSSSGMTSIATNSVPPVSSAAPKPTSWAAIARKPAKPQPKLKPKGNVGIGGSAVPPPPIKHNMNIGTWDEKGSVVKAPPTQPVLPPQTIIQQPQPLIQPPPLVQSQLPQQQPQPPQPQQQQGPQPQAQPHQVQPQQQQLQNRWVAPRNRGAGFNQNNGAGSENFGLGVVPVSASPSSVEVHPVLEKLKAINNYNPKDFDWNLKNGRVFIIKSYSEDDIHRSIKYSIWCSTEHGNKRLDAAYRSLNGKGPLYLLFSVNGSGHFCGVAEMKSVVDYNAYAGVWSQDKWKGKFEVKWIFVKDVPNNQLRHIRLENNDNKPVTNSRDTQEVPLEKAKQVLKIIATFKHTTSIFDDFAHYEKRQEEEEAMRRERNRNKQ

SEQ ID NO: 36842 - protein, 53 aa, Artificial Sequence
  Synthetic polypeptide
GRAGAVPRRRPKGQGNKVSVQNGSIHQKDAVNDDDFEPYLSSQTNQERNRNKQ

SEQ ID NO: 36843 - protein, 20 aa, Artificial Sequence
  Synthetic polypeptide
AGGRARCRGGDLKGKEIKEQ

SEQ ID NO: 36844 - protein, 42 aa, Artificial Sequence
  Synthetic polypeptide
GRAGAVPRRRPKGQGNKGAVKPVSEENSFSTKRFDSSKRCCK

SEQ ID NO: 36845 - protein, 57 aa, Artificial Sequence
  Synthetic polypeptide
MENSRSKQFISFELHTIVSSVMKSHCILNRVGYQISHVGITVLVYDSRRLPQSKSLP

SEQ ID NO: 36846 - protein, 299 aa, Artificial Sequence
  Synthetic polypeptide
TVLVIRSAMLVSQCLFMIQEDYHSQNPYHNAVHAADVTQAMHCYLKEPKLANSVTPWDILLSLIAAATHDLDHPGVNQPFLIKTNHYLATLYKNTSVLENHHWRSAVGLLRESGLFSHLPLESRQQMETQIGALILATDISRQNEYLSLFRSHLDRGDLCLEDTRHRHLVLQMALKCADICNPCRTWELSKQWSEKVTEEFFHQGDIEKKYHLGVSPLCDRHTESIANIQIGFMTYLVEPLFTEWARFSNTRLSQTMLGHVGLNKASWKGLQREQSSSEDTDAAFELNSQLLPQENRLS

SEQ ID NO: 36847 - protein, 32 aa, Artificial Sequence
  Synthetic polypeptide
IAHHCEQRDEISLHPEPCWLSDQPCWYHSACL

SEQ ID NO: 36848 - protein, 241 aa, Artificial Sequence
  Synthetic polypeptide
TVLVIRSAMLVSQCLFMIQEDYHSQNPYHNAVHAADVTQAMHCYLKEPKLANSVTPWDILLSLIAAATHDLDHPGVNQPFLIKTNHYLATLYKNTSVLENHHWRSAVGLLRESGLFSHLPLESRQQMETQIGALILATDISRQNEYLSLFRSHLDRGDLCLEDTRHRHLVLQMALKCADICNPCRTWELSKQWSEKVTEEFFHQGDIEKKYHLGVSPLCDRHTESIANIQIGNYTYLDIAG

SEQ ID NO: 36849 - protein, 38 aa, Artificial Sequence
  Synthetic polypeptide
MENSRSKQFISFELHTIVSSVMKSHCILNRVGYQISHL

SEQ ID NO: 36850 - protein, 22 aa, Artificial Sequence
  Synthetic polypeptide
TVLVIRSAIYDSRRLPQSKSLP

SEQ ID NO: 36851 - protein, 308 aa, Artificial Sequence
  Synthetic polypeptide
IAHHCEQRDEISLHPEPCWLSDQPFMIQEDYHSQNPYHNAVHAADVTQAMHCYLKEPKLANSVTPWDILLSLIAAATHDLDHPGVNQPFLIKTNHYLATLYKNTSVLENHHWRSAVGLLRESGLFSHLPLESRQQMETQIGALILATDISRQNEYLSLFRSHLDRGDLCLEDTRHRHLVLQMALKCADICNPCRTWELSKQWSEKVTEEFFHQGDIEKKYHLGVSPLCDRHTESIANIQIGFMTYLVEPLFTEWARFSNTRLSQTMLGHVGLNKASWKGLQREQSSSEDTDAAFELNSQLLPQENRLS

SEQ ID NO: 36852 - protein, 250 aa, Artificial Sequence
  Synthetic polypeptide
IAHHCEQRDEISLHPEPCWLSDQPFMIQEDYHSQNPYHNAVHAADVTQAMHCYLKEPKLANSVTPWDILLSLIAAATHDLDHPGVNQPFLIKTNHYLATLYKNTSVLENHHWRSAVGLLRESGLFSHLPLESRQQMETQIGALILATDISRQNEYLSLFRSHLDRGDLCLEDTRHRHLVLQMALKCADICNPCRTWELSKQWSEKVTEEFFHQGDIEKKYHLGVSPLCDRHTESIANIQIGNYTYLDIAG

SEQ ID NO: 36853 - protein, 484 aa, Artificial Sequence
  Synthetic polypeptide
KIRTVFLFLKRFPCQRVLSIDAELKWTSLSYLENSFMWMEHQLFQGCQRRGAISYDSSDQTALYIRMLGDVRVRSRAGFESERRGSHPYIDFRIFHSQSEIEVSVSARNIRRLLSFQRYLRSSRFFRGTAVSNSLNILDDDYNGQAKCMLEKVGNWNFDIFLFDRLTNGNSLVSLTFHLFSLHGLIEYFHLDMMKLRRFLVMIQEDYHSQNPYHNAVHAADVTQAMHCYLKEPKLANSVTPWDILLSLIAAATHDLDHPGVNQPFLIKTNHYLATLYKNTSVLENHHWRSAVGLLRESGLFSHLPLESRQQMETQIGALILATDISRQNEYLSLFRSHLDRGDLCLEDTRHRHLVLQMALKCADICNPCRTWELSKQWSEKVTEEFFHQGDIEKKYHLGVSPLCDRHTESIANIQIGFMTYLVEPLFTEWARFSNTRLSQTMLGHVGLNKASWKGLQREQSSSEDTDAAFELNSQLLPQENRLS

SEQ ID NO: 36854 - protein, 38 aa, Artificial Sequence
  Synthetic polypeptide
VTWKIHLCGWNTSSSKDAKGVELFPMTVLIRLHYTFVC

SEQ ID NO: 36855 - protein, 32 aa, Artificial Sequence
  Synthetic polypeptide
TEMDKLELPGKFIYVDGTPALPRMPKAWSYFL

SEQ ID NO: 36856 - protein, 426 aa, Artificial Sequence
  Synthetic polypeptide
KIRTVFLFLKRFPCQRVLSIDAELKWTSLSYLENSFMWMEHQLFQGCQRRGAISYDSSDQTALYIRMLGDVRVRSRAGFESERRGSHPYIDFRIFHSQSEIEVSVSARNIRRLLSFQRYLRSSRFFRGTAVSNSLNILDDDYNGQAKCMLEKVGNWNFDIFLFDRLTNGNSLVSLTFHLFSLHGLIEYFHLDMMKLRRFLVMIQEDYHSQNPYHNAVHAADVTQAMHCYLKEPKLANSVTPWDILLSLIAAATHDLDHPGVNQPFLIKTNHYLATLYKNTSVLENHHWRSAVGLLRESGLFSHLPLESRQQMETQIGALILATDISRQNEYLSLFRSHLDRGDLCLEDTRHRHLVLQMALKCADICNPCRTWELSKQWSEKVTEEFFHQGDIEKKYHLGVSPLCDRHTESIANIQIGNYTYLDIAG

SEQ ID NO: 36857 - protein, 113 aa, Artificial Sequence
  Synthetic polypeptide
KIRTVFLFLKRFPCQRVLSIDAELKWTSLSYLENSFMWMEHQLFQGCQRRGAISYDSSDQTALYIRMLGDVRVRSRAGFESERRGSHPYIDFRIFHSQSEIEVSVSARNIRRL

SEQ ID NO: 36858 - protein, 322 aa, Artificial Sequence
  Synthetic polypeptide
CSAGEDVWSYAKGLPHMFQQGGVFYSIMKKTMGMADGKHCTFPHLPGKTFVYNASEDRLELCVDAAGHFPIGPDVEDLVKEAVSQVRAEATTRSRESSPSHGLLKLGSGGVVKKKSEQLHNVTAFQGKGHSLGTASGNPHLDPRARETSVVRKHNTGTDFSNSSTKTEPSVFTASSSNSELIRIAPGVVTMRDGRQLDPDLVEAQRKKLQEMVSSIQASMDRHLRDQSTEQSPSDLPQRKTEVVSSSAKSGSLQTGLPESFPLTGGTENLNTETTDGCVADALGAAFATRSKAQRGNSVEELEEMDSQDAEMTNTTEPMDHS

SEQ ID NO: 36859 - protein, 51 aa, Artificial Sequence
  Synthetic polypeptide
LNRRWTLENVALTFILVCTEPDNSAQQEKMYGLMQRDFLTCFSRVVYSTVL

SEQ ID NO: 36860 - protein, 58 aa, Artificial Sequence
  Synthetic polypeptide
SIEDGLLRMWLLPLSLYAQNLIIVLSRRRCMVLCKGTSSHVSAGWCILQYYEENHGYG

SEQ ID NO: 36861 - protein, 32 aa, Artificial Sequence
  Synthetic polypeptide
TIARTKNQTPHILTHRNGPCDQDCTSVLLVSF

SEQ ID NO: 36862 - protein, 151 aa, Artificial Sequence
  Synthetic polypeptide
FNHCGKSVWRFLKDLELEIPFDPAIPLLGIYPKDYKSCCYKETCTRMFIAALFTIAKTWNQPKCPTMIDWIKKICHIYTMEYYAAIKNDEFMSFVGTWMKLEIIILSKLSQEQKTKHRIFSLIEMAHAIKIVHRCYWSVSEAFCFWRKNKS

SEQ ID NO: 36863 - protein, 52 aa, Artificial Sequence
  Synthetic polypeptide
GTGFISLGSARQWAQKWPMRSRLYIGATGQFLKHSVSGEKTNHDNTPTDSQP

SEQ ID NO: 36864 - protein, 24 aa, Artificial Sequence
  Synthetic polypeptide
AVPDSGRRNGPCDQDCTSVLLVSF

SEQ ID NO: 36865 - protein, 49 aa, Artificial Sequence
  Synthetic polypeptide
FLHSHLRYRVHLTRQCQTVGAEMAHAIKIVHRCYWSVSEAFCFWRKNKS

SEQ ID NO: 36866 - protein, 69 aa, Artificial Sequence
  Synthetic polypeptide
GRSQDGRIGTAPVYSSQRERRRRRVISAFPSEKWPMRSRLYIGATGQFLKHSVSGEKTNHDNTPTDSQP

SEQ ID NO: 36867 - protein, 23 aa, Artificial Sequence
  Synthetic polypeptide
FLHSHLRNGPCDQDCTSVLLVSF

SEQ ID NO: 36868 - protein, 890 aa, Artificial Sequence
  Synthetic polypeptide
SQHFGRPRREITRLGDRDYPGQHGETLSLLKYKKLARMHRNKRGNMPPMEHDGDVIEQSNIRISSAENKSAPDNETSKSANQDTCSPFAGMLFGGEDRELIQRRKEKYRLELLEQMAEQQRNKRREKDLELRVAASGAQDPEKSPDRLKQFSVAPRHFEEMIPPERPRIAFQTPLPPLSAPSVPPIPSVHPVPSQNEDLRSGLSSALGEMVSPRIAPLPPPPLLPPLATNYRTPYDDAYYFYGSRNTFDPSLAYYGSGMMGVQPAAYVSAPVTHQLAQPVVNTVGQNELKITSDQVINSGLIFEDKPKPSKQSLQSYQEALQQQIREREERRKKEREEKEEYEAKLEAEMRTYNPWGKGGGGAPLRDAKGNLISHMQTQSSPFARGNVFGEPPTELQIKQQELYKNFLRFQIEEKKQREEAERERLRIAEEKEERRLAEQRARIQQEYEEEQEKKREKEEEQRLKNEEHIRLAEERQKEAERKKKEEEEKYNLQLQHYCERDNLIGEETKHMRQPSPIVPALQNKIASKLQRPPSVDSIIRSFIHESSMSRAQSPPVPARKNQLRAEEEKKNVIMELSEMRKQLRSEERRLQERLLHMDSDDEIPIRKKERNPMDIFDMARHRLQAPVRRQSPKGLDAATFQNVHDFNELKDRDSETRVDLKFMYLDPPRDHHTLEIQQQALLREQQKRLNRIKMQEGAKVDLDAIPSAKVREQRMPRDDTSDFLKNSLLESDSAFIGAYGETYPAIEDDVLPPPSQLPSARERRRNKWKGLDIDSSRPNVAPDGLSLKSISSVNVDELRVRNEERMRRLNEFHNKPINTDDESSLVDPDDIMKHIGDDGSNSVATEPWLRPGTSETLKRFMAEQLNQEQQQIPGKPGTFTWQGLSTAHG

SEQ ID NO: 36869 - protein, 20 aa, Artificial Sequence
  Synthetic polypeptide
PGCTGTNEGICLLWNMMGML

SEQ ID NO: 36870 - protein, 26 aa, Artificial Sequence
  Synthetic polypeptide
NPVSTKIQKISQDAQEQTREYASYGT

SEQ ID NO: 36871 - protein, 941 aa, Artificial Sequence
  Synthetic polypeptide
SQHFGRPRREITRLGDRDYPGQHGETLSLLKYKKLARMHRNKRGNMPPMEHDGDVIEQSNIRISSAENKSAPDNETSKSANQDTCSPFAGMLFGGEDRELIQRRKEKYRLELLEQMAEQQRNKRREKDLELRVAASGAQDPEKSPDRLKQFSVAPRHFEEMIPPERPRIAFQTPLPPLSAPSVPPIPSVHPVPSQNEDLRSGLSSALGEMVSPRIAPLPPPPLLPPLATNYRTPYDDAYYFYGSRNTFDPSLAYYGSGMMGVQPAAYVSAPVTHQLAQPVVNTVGQNELKITSDQVINSGLIFEDKPKPSKQSLQSYQEALQQQIREREERRKKEREEKEEYEAKLEAEMRTYNPWGKGGGGAPLRDAKGNLITDLNRMHRQNIDAYHNPDARTYEDKRAVVSLDPNLATSNAENLEDAANKSSGHMQTQSSPFARGNVFGEPPTELQIKQQELYKNFLRFQIEEKKQREEAERERLRIAEEKEERRLAEQRARIQQEYEEEQEKKREKEEEQRLKNEEHIRLAEERQKEAERKKKEEEEKYNLQLQHYCERDNLIGEETKHMRQPSPIVPALQNKIASKLQRPPSVDSIIRSFIHESSMSRAQSPPVPARKNQLRAEEEKKNVIMELSEMRKQLRSEERRLQERLLHMDSDDEIPIRKKERNPMDIFDMARHRLQAPVRRQSPKGLDAATFQNVHDFNELKDRDSETRVDLKFMYLDPPRDHHTLEIQQQALLREQQKRLNRIKMQEGAKVDLDAIPSAKVREQRMPRDDTSDFLKNSLLESDSAFIGAYGETYPAIEDDVLPPPSQLPSARERRRNKWKGLDIDSSRPNVAPDGLSLKSISSVNVDELRVRNEERMRRLNEFHNKPINTDDESSLVDPDDIMKHIGDDGSNSVATEPWLRPGTSETLKRFMAEQLNQEQQQIPGKPGTFTWQGLSTAHG

SEQ ID NO: 36872 - protein, 125 aa, Artificial Sequence
  Synthetic polypeptide
SQHFGRPRREITRLGDRDYPGQHGETLSLLKYKKLARMHRNKRGNMPPMEHDGDVIEQSNIRISSAENKSAPDNETSKSANQDTCSPFAGMLFGGEDRELIQRRKEKYRLELLEQMAEQQRNKRR

SEQ ID NO: 36873 - protein, 8 aa, Artificial Sequence
  Synthetic polypeptide
KEYYSLID

SEQ ID NO: 36874 - protein, 12 aa, Artificial Sequence
  Synthetic polypeptide
HGVLVHKKNTTA

SEQ ID NO: 36875 - protein, 753 aa, Artificial Sequence
  Synthetic polypeptide
YIKRILQPDRLKQFSVAPRHFEEMIPPERPRIAFQTPLPPLSAPSVPPIPSVHPVPSQNEDLRSGLSSALGEMVSPRIAPLPPPPLLPPLATNYRTPYDDAYYFYGSRNTFDPSLAYYGSGMMGVQPAAYVSAPVTHQLAQPVVNTVGQNELKITSDQVINSGLIFEDKPKPSKQSLQSYQEALQQQIREREERRKKEREEKEEYEAKLEAEMRTYNPWGKGGGGAPLRDAKGNLISHMQTQSSPFARGNVFGEPPTELQIKQQELYKNFLRFQIEEKKQREEAERERLRIAEEKEERRLAEQRARIQQEYEEEQEKKREKEEEQRLKNEEHIRLAEERQKEAERKKKEEEEKYNLQLQHYCERDNLIGEETKHMRQPSPIVPALQNKIASKLQRPPSVDSIIRSFIHESSMSRAQSPPVPARKNQLRAEEEKKNVIMELSEMRKQLRSEERRLQERLLHMDSDDEIPIRKKERNPMDIFDMARHRLQAPVRRQSPKGLDAATFQNVHDFNELKDRDSETRVDLKFMYLDPPRDHHTLEIQQQALLREQQKRLNRIKMQEGAKVDLDAIPSAKVREQRMPRDDTSDFLKNSLLESDSAFIGAYGETYPAIEDDVLPPPSQLPSARERRRNKWKGLDIDSSRPNVAPDGLSLKSISSVNVDELRVRNEERMRRLNEFHNKPINTDDESSLVDPDDIMKHIGDDGSNSVATEPWLRPGTSETLKRFMAEQLNQEQQQIPGKPGTFTWQGLSTAHG

SEQ ID NO: 36876 - protein, 804 aa, Artificial Sequence
  Synthetic polypeptide
YIKRILQPDRLKQFSVAPRHFEEMIPPERPRIAFQTPLPPLSAPSVPPIPSVHPVPSQNEDLRSGLSSALGEMVSPRIAPLPPPPLLPPLATNYRTPYDDAYYFYGSRNTFDPSLAYYGSGMMGVQPAAYVSAPVTHQLAQPVVNTVGQNELKITSDQVINSGLIFEDKPKPSKQSLQSYQEALQQQIREREERRKKEREEKEEYEAKLEAEMRTYNPWGKGGGGAPLRDAKGNLITDLNRMHRQNIDAYHNPDARTYEDKRAVVSLDPNLATSNAENLEDAANKSSGHMQTQSSPFARGNVFGEPPTELQIKQQELYKNFLRFQIEEKKQREEAERERLRIAEEKEERRLAEQRARIQQEYEEEQEKKREKEEEQRLKNEEHIRLAEERQKEAERKKKEEEEKYNLQLQHYCERDNLIGEETKHMRQPSPIVPALQNKIASKLQRPPSVDSIIRSFIHESSMSRAQSPPVPARKNQLRAEEEKKNVIMELSEMRKQLRSEERRLQERLLHMDSDDEIPIRKKERNPMDIFDMARHRLQAPVRRQSPKGLDAATFQNVHDFNELKDRDSETRVDLKFMYLDPPRDHHTLEIQQQALLREQQKRLNRIKMQEGAKVDLDAIPSAKVREQRMPRDDTSDFLKNSLLESDSAFIGAYGETYPAIEDDVLPPPSQLPSARERRRNKWKGLDIDSSRPNVAPDGLSLKSISSVNVDELRVRNEERMRRLNEFHNKPINTDDESSLVDPDDIMKHIGDDGSNSVATEPWLRPGTSETLKRFMAEQLNQEQQQIPGKPGTFTWQGLSTAHG

SEQ ID NO: 36877 - protein, 12 aa, Artificial Sequence
  Synthetic polypeptide
INEKGKESHGYI

SEQ ID NO: 36878 - protein, 9 aa, Artificial Sequence
  Synthetic polypeptide
QDSENSRFS

SEQ ID NO: 36879 - protein, 75 aa, Artificial Sequence
  Synthetic polypeptide
KTKLCPNHLGHMSSGLTEAVSQDESLKQLQVVHQPWILPSDTESEGVEAEQEKRSADLLLCVPCSSCPTLVYSGL

SEQ ID NO: 36880 - protein, 35 aa, Artificial Sequence
  Synthetic polypeptide
LMSHVSLKCRKPSCAPTTSGTCRQDLLRLCHRMNP

SEQ ID NO: 36881 - protein, 5 aa, Artificial Sequence
  Synthetic polypeptide
GCVTG

SEQ ID NO: 36882 - protein, 80 aa, Artificial Sequence
  Synthetic polypeptide
KTKLCPNHLGHMSSGLTEAVSQDESLKQLQVVHQPWILPSDTESEGVEAEQEKHLLNQNLCGWDSEFCIFHTLASFLIYK

SEQ ID NO: 36883 - protein, 23 aa, Artificial Sequence
  Synthetic polypeptide
TCHLPQSKIFAIPATSKVQLRPM

SEQ ID NO: 36884 - protein, 70 aa, Artificial Sequence
  Synthetic polypeptide
YEWVSSNQMKAVIENDSPSRKKRAFCQQTAFRLERSSSLVSILPGYPPEFRLAIFHNRKYLQYLPRPRFS

SEQ ID NO: 36885 - protein, 41 aa, Artificial Sequence
  Synthetic polypeptide
NAALLWSPSCQATLQSLDLPSSTIENICNTCHVQGSAEANV

SEQ ID NO: 36886 - protein, 38 aa, Artificial Sequence
  Synthetic polypeptide
HEVWNWICRHLAGEENTIMSAMEDTGKYLQYLPRPRFS

SEQ ID NO: 36887 - protein, 23 aa, Artificial Sequence
  Synthetic polypeptide
VPWKIQENICNTCHVQGSAEANV

SEQ ID NO: 36888 - protein, 28 aa, Artificial Sequence
  Synthetic polypeptide
REYHHECHGRYRKIFAIPATSKVQLRPM

SEQ ID NO: 36889 - protein, 37 aa, Artificial Sequence
  Synthetic polypeptide
KSCRPGSQSAGVQIQTLWLPGKIFAIPATSKVQLRPM

SEQ ID NO: 36890 - protein, 33 aa, Artificial Sequence
  Synthetic polypeptide
RVADLEASLLGFKSRLCGFLGKYLQYLPRPRFS

SEQ ID NO: 36891 - protein, 37 aa, Artificial Sequence
  Synthetic polypeptide
ELQTWKPVCWGSNPDSVASWENICNTCHVQGSAEANV

SEQ ID NO: 36892 - protein, 24 aa, Artificial Sequence
  Synthetic polypeptide
GLNEPIHENICNTCHVQGSAEANV

SEQ ID NO: 36893 - protein, 21 aa, Artificial Sequence
  Synthetic polypeptide
MNQSMKIFAIPATSKVQLRPM

SEQ ID NO: 36894 - protein, 40 aa, Artificial Sequence
  Synthetic polypeptide
EGGCLQARKGLSPGTESTGILILDFTSFRTTSNHPNTREH

SEQ ID NO: 36895 - protein, 19 aa, Artificial Sequence
  Synthetic polypeptide
SWTSHPSELLQIIPTPENT

SEQ ID NO: 36896 - protein, 25 aa, Artificial Sequence
  Synthetic polypeptide
INWHLDLGLHILQNYFKSSQHQRTL

SEQ ID NO: 36897 - protein, 15 aa, Artificial Sequence
  Synthetic polypeptide
ILSVRLQIIPTPENT

SEQ ID NO: 36898 - protein, 13 aa, Artificial Sequence
  Synthetic polypeptide
VFDFKSSQHQRTL

SEQ ID NO: 36899 - protein, 21 aa, Artificial Sequence
  Synthetic polypeptide
HSAWHMNTKCSTSNHPNTREH

SEQ ID NO: 36900 - protein, 17 aa, Artificial Sequence
  Synthetic polypeptide
MAHTLQYFKSSQHQRTL

SEQ ID NO: 36901 - protein, 43 aa, Artificial Sequence
  Synthetic polypeptide
QYVVFSWDAGQWQRGTEPSQPHDQEGKWHILYSTSNHPNTREH

SEQ ID NO: 36902 - protein, 74 aa, Artificial Sequence
  Synthetic polypeptide
LMIFDFMMCESDAYSVESVLQILNFDLFWASSMWYSPGMPGSGSEEQNPVSHMIRRVNGTYFTVLQIIPTPENT

SEQ ID NO: 36903 - protein, 85 aa, Artificial Sequence
  Synthetic polypeptide
SPSLHLSPMLDAACPQTSDCKFFSFWTLGLTPVICQELSGLQQQTEGCAVGFPTFEVLGLRLASWLFSLQMAYCGTSPCDHFLPL

SEQ ID NO: 36904 - protein, 83 aa, Artificial Sequence
  Synthetic polypeptide
FARSSQAFSNRLKAVLSASLLLRFWDSDWLPGSSACRWPIVGLHLVIISCLYNYLCIQQGENTTSYVSTLVYTHRGCWILYGV

SEQ ID NO: 36905 - protein, 129 aa, Artificial Sequence
  Synthetic polypeptide
SFPAFITTSAFNKERTRQATSPHWSTHTEDAGYCMEFKTESLTPHCALENWPLTRWMQYLREGYTVCVDCQPPAMNSVSLRCSGDGLDSDGNQTLHWQAIGNPRCQGTWKKVRRVDQCSCPAVHSFIFI

SEQ ID NO: 36906 - protein, 6 aa, Artificial Sequence
  Synthetic polypeptide
GLPRQP

SEQ ID NO: 36907 - protein, 22 aa, Artificial Sequence
  Synthetic polypeptide
KAIGQEDSKGFQGSLKCLETIF

SEQ ID NO: 36908 - protein, 87 aa, Artificial Sequence
  Synthetic polypeptide
YKKQDSGSHSEGESERQLDRRILRASKAALSALKQFSEQGLDPIDGAMNIEKGSLEKQAKHLREKADNNQAPPGSIAQDCKKSNSAV

SEQ ID NO: 36909 - protein, 14 aa, Artificial Sequence
  Synthetic polypeptide
EELYGSLKCLETIF

SEQ ID NO: 36910 - protein, 64 aa, Artificial Sequence
  Synthetic polypeptide
KNFMAALSALKQFSEQGLDPIDGAMNIEKGSLEKQAKHLREKADNNQAPPGSIAQDCKKSNSAV

SEQ ID NO: 36911 - protein, 6 aa, Artificial Sequence
  Synthetic polypeptide
RTLWQP

SEQ ID NO: 36912 - protein, 449 aa, Artificial Sequence
  Synthetic polypeptide
DCLGSNVSSSRVALGRYHCPVPKIFYVQLTVGNNEFFGEGKTRQAARHNAAMKALQALQNEPIPERSPQNGESGKDVDDDKDANKSEISLVFEIALKRNMPVSFEVIKESGPPHMKSFVTRVSVGEFSAEGEGNSKKLSKKRAATTVLQELKKLPPLPVVEKPKLFFKKRPKTIVKAGPEYGQGMNPISRLAQIQQAKKEKEPDYVLLSERGMPRRREFVMQVKVGNEVATGTGPNKKIAKKNAAEAMLLQLGYKASTNLQDQLEKTGENKGWSGPKPGFPEPTNNTPKGILHLSPDVYQEMEASRHKVISGTTLGYLSPKDMNQPSSSFFSISPTSNSSATIARELLMNGTSSTAEAIGLKGSSPTPPCSPVQPSKQLEYLARIQGFQAALSALKQFSEQGLDPIDGAMNIEKGSLEKQAKHLREKADNNQAPPGSIAQDCKKSNSAV

SEQ ID NO: 36913 - protein, 23 aa, Artificial Sequence
  Synthetic polypeptide
AQVGWPWEGIIAQCLRSFMFSSL

SEQ ID NO: 36914 - protein, 36 aa, Artificial Sequence
  Synthetic polypeptide
RQHGIAVMSMGSGVRLPGLKCELKSGGPGKVSLPSA

SEQ ID NO: 36915 - protein, 487 aa, Artificial Sequence
  Synthetic polypeptide
DCLGSNVSSSRVALGRYHCPVPKIFYVQLTVGNNEFFGEGKTRQAARHNAAMKALQALQNEPIPERSPQNGESGKDVDDDKDANKSEISLVFEIALKRNMPVSFEVIKESGPPHMKSFVTRVSVGEFSAEGEGNSKKLSKKRAATTVLQELKKLPPLPVVEKPKLFFKKRPKTIVKAGPEYGQGMNPISRLAQIQQAKKEKEPDYVLLSERGMPRRREFVMQVKVGNEVATGTGPNKKIAKKNAAEAMLLQLGYKASTNLQDQLEKTGENKGWSGPKPGFPEPTNNTPKGILHLSPDVYQEMEASRHKVISGTTLGYLSPKDMNQPSSSFFSISPTSNSSATIARELLMNGTSSTAEAIGLKGSSPTPPCSPVQPSKQLEYLARIQGFQVHYCDRQSGKECVTCLTLAPVQMTFHAIGSSIEASHDQAALSALKQFSEQGLDPIDGAMNIEKGSLEKQAKHLREKADNNQAPPGSIAQDCKKSNSAV

SEQ ID NO: 36916 - protein, 390 aa, Artificial Sequence
  Synthetic polypeptide
DCLGSNVSSSRVALGRYHCPVPKIFYVQLTVGNNEFFGEGKTRQAARHNAAMKALQALQNEPIPERSPQNGESGKDVDDDKDANKSEISLVFEIALKRNMPVSFEVIKESGPPHMKSFVTRVSVGEFSAEGEGNSKKLSKKRAATTVLQELKKLPPLPVVEKPKLFFKKRPKTIVKAGPEYGQGMNPISRLAQIQQAKKEKEPDYVLLSERGMPRRREFVMQVKVGNEVATGTGPNKKIAKKNAAEAMLLQLGYKASTNLQDQLEKTGENKGWSGPKPGFPEPTNNTPKGILHLSPDVYQEMEASRHKVISGTTLGYLSPKDMNQPSSSFFSISPTSNSSATIARELLMNGTSSTAEAIGLKGSSPTPPCSPVQPSKQLEYLARIQGFQV

SEQ ID NO: 36917 - protein, 289 aa, Artificial Sequence
  Synthetic polypeptide
DCLGSNVSSSRVALGRYHCPVPKIFYVQLTVGNNEFFGEGKTRQAARHNAAMKALQALQNEPIPERSPQNGESGKDVDDDKDANKSEISLVFEIALKRNMPVSFEVIKESGPPHMKSFVTRVSVGEFSAEGEGNSKKLSKKRAATTVLQELKKLPPLPVVEKPKLFFKKRPKTIVKAGPEYGQGMNPISRLAQIQQAKKEKEPDYVLLSERGMPRRREFVMQVKVGNEVATGTGPNKKIAKKNAAEAMLLQLGYKASTNLQDQLEKTGENKGWSGPKPGFPEPTNNRKS

SEQ ID NO: 36918 - protein, 115 aa, Artificial Sequence
  Synthetic polypeptide
DCLGSNVSSSRVALGRYHCPVPKIFYVQLTVGNNEFFGEGKTRQAARHNAAMKALQALQNEPIPERSPQNGESGKDVDDDKDANKSEISLVFEIALKRNMPVSFEVIKESGPPHM

SEQ ID NO: 36919 - protein, 18 aa, Artificial Sequence
  Synthetic polypeptide
LMPVIPALRETEAGGSQD

SEQ ID NO: 36920 - protein, 14 aa, Artificial Sequence
  Synthetic polypeptide
SQHFGRLRRADHKM

SEQ ID NO: 36921 - protein, 6 aa, Artificial Sequence
  Synthetic polypeptide
GGRITR

SEQ ID NO: 36922 - protein, 435 aa, Artificial Sequence
  Synthetic polypeptide
CRYHCPVPKIFYVQLTVGNNEFFGEGKTRQAARHNAAMKALQALQNEPIPERSPQNGESGKDVDDDKDANKSEISLVFEIALKRNMPVSFEVIKESGPPHMKSFVTRVSVGEFSAEGEGNSKKLSKKRAATTVLQELKKLPPLPVVEKPKLFFKKRPKTIVKAGPEYGQGMNPISRLAQIQQAKKEKEPDYVLLSERGMPRRREFVMQVKVGNEVATGTGPNKKIAKKNAAEAMLLQLGYKASTNLQDQLEKTGENKGWSGPKPGFPEPTNNTPKGILHLSPDVYQEMEASRHKVISGTTLGYLSPKDMNQPSSSFFSISPTSNSSATIARELLMNGTSSTAEAIGLKGSSPTPPCSPVQPSKQLEYLARIQGFQAALSALKQFSEQGLDPIDGAMNIEKGSLEKQAKHLREKADNNQAPPGSIAQDCKKSNSAV

SEQ ID NO: 36923 - protein, 50 aa, Artificial Sequence
  Synthetic polypeptide
LGILFNSKTCDSSNDMHESQKQYAEQKKTGQIHSVGIIAQCLRSFMFSSL

SEQ ID NO: 36924 - protein, 473 aa, Artificial Sequence
  Synthetic polypeptide
CRYHCPVPKIFYVQLTVGNNEFFGEGKTRQAARHNAAMKALQALQNEPIPERSPQNGESGKDVDDDKDANKSEISLVFEIALKRNMPVSFEVIKESGPPHMKSFVTRVSVGEFSAEGEGNSKKLSKKRAATTVLQELKKLPPLPVVEKPKLFFKKRPKTIVKAGPEYGQGMNPISRLAQIQQAKKEKEPDYVLLSERGMPRRREFVMQVKVGNEVATGTGPNKKIAKKNAAEAMLLQLGYKASTNLQDQLEKTGENKGWSGPKPGFPEPTNNTPKGILHLSPDVYQEMEASRHKVISGTTLGYLSPKDMNQPSSSFFSISPTSNSSATIARELLMNGTSSTAEAIGLKGSSPTPPCSPVQPSKQLEYLARIQGFQVHYCDRQSGKECVTCLTLAPVQMTFHAIGSSIEASHDQAALSALKQFSEQGLDPIDGAMNIEKGSLEKQAKHLREKADNNQAPPGSIAQDCKKSNSAV

SEQ ID NO: 36925 - protein, 376 aa, Artificial Sequence
  Synthetic polypeptide
CRYHCPVPKIFYVQLTVGNNEFFGEGKTRQAARHNAAMKALQALQNEPIPERSPQNGESGKDVDDDKDANKSEISLVFEIALKRNMPVSFEVIKESGPPHMKSFVTRVSVGEFSAEGEGNSKKLSKKRAATTVLQELKKLPPLPVVEKPKLFFKKRPKTIVKAGPEYGQGMNPISRLAQIQQAKKEKEPDYVLLSERGMPRRREFVMQVKVGNEVATGTGPNKKIAKKNAAEAMLLQLGYKASTNLQDQLEKTGENKGWSGPKPGFPEPTNNTPKGILHLSPDVYQEMEASRHKVISGTTLGYLSPKDMNQPSSSFFSISPTSNSSATIARELLMNGTSSTAEAIGLKGSSPTPPCSPVQPSKQLEYLARIQGFQV

SEQ ID NO: 36926 - protein, 275 aa, Artificial Sequence
  Synthetic polypeptide
CRYHCPVPKIFYVQLTVGNNEFFGEGKTRQAARHNAAMKALQALQNEPIPERSPQNGESGKDVDDDKDANKSEISLVFEIALKRNMPVSFEVIKESGPPHMKSFVTRVSVGEFSAEGEGNSKKLSKKRAATTVLQELKKLPPLPVVEKPKLFFKKRPKTIVKAGPEYGQGMNPISRLAQIQQAKKEKEPDYVLLSERGMPRRREFVMQVKVGNEVATGTGPNKKIAKKNAAEAMLLQLGYKASTNLQDQLEKTGENKGWSGPKPGFPEPTNNRKS

SEQ ID NO: 36927 - protein, 101 aa, Artificial Sequence
  Synthetic polypeptide
CRYHCPVPKIFYVQLTVGNNEFFGEGKTRQAARHNAAMKALQALQNEPIPERSPQNGESGKDVDDDKDANKSEISLVFEIALKRNMPVSFEVIKESGPPHM

SEQ ID NO: 36928 - protein, 471 aa, Artificial Sequence
  Synthetic polypeptide
CNHDLAYYSTAKLVIHPMICMNLRNNMLSKRRQDRYIVYHCPVPKIFYVQLTVGNNEFFGEGKTRQAARHNAAMKALQALQNEPIPERSPQNGESGKDVDDDKDANKSEISLVFEIALKRNMPVSFEVIKESGPPHMKSFVTRVSVGEFSAEGEGNSKKLSKKRAATTVLQELKKLPPLPVVEKPKLFFKKRPKTIVKAGPEYGQGMNPISRLAQIQQAKKEKEPDYVLLSERGMPRRREFVMQVKVGNEVATGTGPNKKIAKKNAAEAMLLQLGYKASTNLQDQLEKTGENKGWSGPKPGFPEPTNNTPKGILHLSPDVYQEMEASRHKVISGTTLGYLSPKDMNQPSSSFFSISPTSNSSATIARELLMNGTSSTAEAIGLKGSSPTPPCSPVQPSKQLEYLARIQGFQAALSALKQFSEQGLDPIDGAMNIEKGSLEKQAKHLREKADNNQAPPGSIAQDCKKSNSAV

SEQ ID NO: 36929 - protein, 40 aa, Artificial Sequence
  Synthetic polypeptide
LGILFNSKTCDSSNDMHESQKQYAEQKKTGQIHSVSLPSA

SEQ ID NO: 36930 - protein, 509 aa, Artificial Sequence
  Synthetic polypeptide
CNHDLAYYSTAKLVIHPMICMNLRNNMLSKRRQDRYIVYHCPVPKIFYVQLTVGNNEFFGEGKTRQAARHNAAMKALQALQNEPIPERSPQNGESGKDVDDDKDANKSEISLVFEIALKRNMPVSFEVIKESGPPHMKSFVTRVSVGEFSAEGEGNSKKLSKKRAATTVLQELKKLPPLPVVEKPKLFFKKRPKTIVKAGPEYGQGMNPISRLAQIQQAKKEKEPDYVLLSERGMPRRREFVMQVKVGNEVATGTGPNKKIAKKNAAEAMLLQLGYKASTNLQDQLEKTGENKGWSGPKPGFPEPTNNTPKGILHLSPDVYQEMEASRHKVISGTTLGYLSPKDMNQPSSSFFSISPTSNSSATIARELLMNGTSSTAEAIGLKGSSPTPPCSPVQPSKQLEYLARIQGFQVHYCDRQSGKECVTCLTLAPVQMTFHAIGSSIEASHDQAALSALKQFSEQGLDPIDGAMNIEKGSLEKQAKHLREKADNNQAPPGSIAQDCKKSNSAV

SEQ ID NO: 36931 - protein, 412 aa, Artificial Sequence
  Synthetic polypeptide
CNHDLAYYSTAKLVIHPMICMNLRNNMLSKRRQDRYIVYHCPVPKIFYVQLTVGNNEFFGEGKTRQAARHNAAMKALQALQNEPIPERSPQNGESGKDVDDDKDANKSEISLVFEIALKRNMPVSFEVIKESGPPHMKSFVTRVSVGEFSAEGEGNSKKLSKKRAATTVLQELKKLPPLPVVEKPKLFFKKRPKTIVKAGPEYGQGMNPISRLAQIQQAKKEKEPDYVLLSERGMPRRREFVMQVKVGNEVATGTGPNKKIAKKNAAEAMLLQLGYKASTNLQDQLEKTGENKGWSGPKPGFPEPTNNTPKGILHLSPDVYQEMEASRHKVISGTTLGYLSPKDMNQPSSSFFSISPTSNSSATIARELLMNGTSSTAEAIGLKGSSPTPPCSPVQPSKQLEYLARIQGFQV

SEQ ID NO: 36932 - protein, 311 aa, Artificial Sequence
  Synthetic polypeptide
CNHDLAYYSTAKLVIHPMICMNLRNNMLSKRRQDRYIVYHCPVPKIFYVQLTVGNNEFFGEGKTRQAARHNAAMKALQALQNEPIPERSPQNGESGKDVDDDKDANKSEISLVFEIALKRNMPVSFEVIKESGPPHMKSFVTRVSVGEFSAEGEGNSKKLSKKRAATTVLQELKKLPPLPVVEKPKLFFKKRPKTIVKAGPEYGQGMNPISRLAQIQQAKKEKEPDYVLLSERGMPRRREFVMQVKVGNEVATGTGPNKKIAKKNAAEAMLLQLGYKASTNLQDQLEKTGENKGWSGPKPGFPEPTNNRKS

SEQ ID NO: 36933 - protein, 137 aa, Artificial Sequence
  Synthetic polypeptide
CNHDLAYYSTAKLVIHPMICMNLRNNMLSKRRQDRYIVYHCPVPKIFYVQLTVGNNEFFGEGKTRQAARHNAAMKALQALQNEPIPERSPQNGESGKDVDDDKDANKSEISLVFEIALKRNMPVSFEVIKESGPPHM

SEQ ID NO: 36934 - protein, 167 aa, Artificial Sequence
  Synthetic polypeptide
GQEFTTSLSNKKRLQKELLALQNDPPPGMTLNEKSVQNSITQWIVDMEGAPGTLYEGEKFQLLFKFSSRYPFDSPQVMFTGENIPVHPHVYSNGHICLSILTEDWSPALSVQSVCLSIISMLSSCKEKRRPPDNSFYVRTCNKNPKKTKWWYHEAAYHKDFSLLFKD

SEQ ID NO: 36935 - protein, 20 aa, Artificial Sequence
  Synthetic polypeptide
ATKNDYRKNCWLCKMTHLLE

SEQ ID NO: 36936 - protein, 29 aa, Artificial Sequence
  Synthetic polypeptide
GWENCLRPGVHYQPEQQKTTTERTVGFAK

SEQ ID NO: 36937 - protein, 165 aa, Artificial Sequence
  Synthetic polypeptide
GQEFTTSLSNKKRLQKELLALQNDPPPGMTLNEKSVQNSITQWIVDMEGAPGTLYEGEKFQLLFKFSSRYPFDSPQVMFTGENIPVHPHVYSNGHICLSILTEDWSPALSVQSVCLSIISMLSSCKEKRRPPDNSFYVRTCNKNPKKTKWWYHELKSAFILSITD

SEQ ID NO: 36938 - protein, 157 aa, Artificial Sequence
  Synthetic polypeptide
GQEFTTSLSNKKRLQKELLALQNDPPPGMTLNEKSVQNSITQWIVDMEGAPGTLYEGEKFQLLFKFSSRYPFDSPQVMFTGENIPVHPHVYSNGHICLSILTEDWSPALSVQSVCLSIISMLSSCKEKRRPPDNSFYVRTCNKNPKKTKWWYHDDTC

SEQ ID NO: 36939 - protein, 66 aa, Artificial Sequence
  Synthetic polypeptide
GQEFTTSLSNKKRLQKELLALQNDPPPGMTLNEKSVQNSITQSCLLVKIFLFILMFIAMVISVYPF

SEQ ID NO: 36940 - protein, 417 aa, Artificial Sequence
  Synthetic polypeptide
KDSSAPETSMNTTDNGVNCLCAICGDRATGKHYGASSCDGCKGFFRRSIRKSHVYSCRFSRQCVVDKDKRNQCRYCRLRKCFRAGMKKEAVQNERDRISTRRSTFDGSNIPSINTLAQAEVRSRQISVSSPGSSTDINVKKIASIGDVCESMKQQLLVLVEWAKYIPAFCELPLDDQVALLRAHAGEHLLLGATKRSMMYKDILLLGNNYVIHRNSCEVEISRVANRVLDELVRPFQEIQIDDNEYACLKAIVFFDPDAKGLSDPVKIKNMRFQVQIGLEDYINDRQYDSRGRFGELLLLLPTLQSITWQMIEQIQFVKLFGMVKIDNLLQEMLLGGASNDGSHLHHPMHPHLSQDPLTGQTILLGPMSTLVHADQISTPETPLPSPPQGSGQEQYKIAANQASVISHQHLSKQKQL

SEQ ID NO: 36941 - protein, 35 aa, Artificial Sequence
  Synthetic polypeptide
NMQKRKFNNKRTQLNDPHFPISKLTRKIVLPQRQV

SEQ ID NO: 36942 - protein, 13 aa, Artificial Sequence
  Synthetic polypeptide
MTHTFQFQNLLER

SEQ ID NO: 36943 - protein, 31 aa, Artificial Sequence
  Synthetic polypeptide
ACGTKLEFGSRFHVPNYIFPDFGQKKTERNN

SEQ ID NO: 36944 - protein, 287 aa, Artificial Sequence
  Synthetic polypeptide
GRLAVLPVKPVELNLSSALGSMSPTTSSQILARKRRRGIIEKRRRDRINNSLSELRRLVPSAFEKQGSAKLEKAEILQMTVDHLKMLHTAGGKGYFDAHALAMDYRSLGFRECLAEVARYLSIIEGLDASDPLRVRLVSHLNNYASQREAASGAHAGLGHIPWGTVFGHHPHIAHPLLLPQNGHGNAGTTASPTEPHHQGRLGSAHPEAPALRAPPSGSLGPVLPVVTSASKLSPPLLSSVASLSAFPFSFGSFHLLSPNALSPSAPTQAANLGKPYRPWGTEIGAF

SEQ ID NO: 36945 - protein, 291 aa, Artificial Sequence
  Synthetic polypeptide
GRLAVLPVKPVELNLSSALGSMSPTTSSQILARKRRRGIIEKRRRDRINNSLSELRRLVPSAFEKQVMEQGSAKLEKAEILQMTVDHLKMLHTAGGKGYFDAHALAMDYRSLGFRECLAEVARYLSIIEGLDASDPLRVRLVSHLNNYASQREAASGAHAGLGHIPWGTVFGHHPHIAHPLLLPQNGHGNAGTTASPTEPHHQGRLGSAHPEAPALRAPPSGSLGPVLPVVTSASKLSPPLLSSVASLSAFPFSFGSFHLLSPNALSPSAPTQAANLGKPYRPWGTEIGAF

SEQ ID NO: 36946 - protein, 28 aa, Artificial Sequence
  Synthetic polypeptide
AFVFTSDRLGLKSDLHQRFRSAENRPSP

SEQ ID NO: 36947 - protein, 240 aa, Artificial Sequence
  Synthetic polypeptide
NLTSTKDLGLLRTDPVPEEGEDVAATISATETLSEEEQEELRRELAKVEEEIQTLSQVLAAKEKHLAEIKRKLGINSLQELKQNIAKGWQDVTATSAYKKTSETLSQAGQKASAAFSSVGSVITKKLEDVKNSPTFKSFEEKVENLKGSPKNVESFASMLRHSPLTQMGPAKDKLVIGRIFHIVENDLYIDFGGKFHCVCRRPEVDGESPISWYAVWRRFSQVMITCFSSNSDFGKHRKR

SEQ ID NO: 36948 - protein, 186 aa, Artificial Sequence
  Synthetic polypeptide
NLTSTKDLGLLRTDPVPEEGEDVAATISATETLSEEEQEELRRELAKVEEEIQTLSQVLAAKEKHLAEIKRKLGINSLQELKQNIAKGWQDVTATSAYKKTSETLSQAGQKASAAFSSVGSVITKKLEDVKNSPTFKSFEEKVENLKSKVGGTKPAGGDFGEVLNSAANASATTTEPLPEKTQESL

SEQ ID NO: 36949 - protein, 209 aa, Artificial Sequence
  Synthetic polypeptide
NLTSTKDLGLLRTDPVPEEGEDVAATISATETLSEEEQEELRRELAKVEEEIQTLSQVLAAKEKHLAEIKRKLGINSLQELKQNIAKGWQDVTATSAYKKTSETLSQAGQKASAAFSSVGSVITKKLEDVKLQAFSHSFSIRSIQHSISMPAMRNSPTFKSFEEKVENLKSKVGGTKPAGGDFGEVLNSAANASATTTEPLPEKTQESL

SEQ ID NO: 36950 - protein, 195 aa, Artificial Sequence
  Synthetic polypeptide
NLTSTKDLGLLRTDPVPEEGEDVAATISATETLSEEEQEELRRELAKVEEEIQTLSQVLAAKEKHLAEIKRKLGINSLQELKQNIAKGWQDVTATSAYKKTSETLSQAGQKASAAFSSVGSVITKKLEDVKLQAFSHSFRNSPTFKSFEEKVENLKSKVGGTKPAGGDFGEVLNSAANASATTTEPLPEKTQESL

SEQ ID NO: 36951 - protein, 200 aa, Artificial Sequence
  Synthetic polypeptide
NLTSTKDLGLLRTDPVPEEGEDVAATISATETLSEEEQEELRRELAKVEEEIQTLSQVLAAKEKHLAEIKRKLGINSLQELKQNIAKGWQDVTATSAYKKTSETLSQAGQKASAAFSSVGSVITKKLEDVNIRSIQHSISMPAMRNSPTFKSFEEKVENLKSKVGGTKPAGGDFGEVLNSAANASATTTEPLPEKTQESL

SEQ ID NO: 36952 - protein, 113 aa, Artificial Sequence
  Synthetic polypeptide
NLTSTKDLGLLRTDPVPEEGEDVAATISATETLSEEEQEELRRELAKVEEEIQTLSQVLAAKEKHLAEIKRKLGINSLQELKQNIAKGWQDVTATSARSKLLAAETELLCLLY

SEQ ID NO: 36953 - protein, 17 aa, Artificial Sequence
  Synthetic polypeptide
NLTSTKDLGLLRTDPVP

SEQ ID NO: 36954 - protein, 97 aa, Artificial Sequence
  Synthetic polypeptide
NLTSTKDLGLLRTDPVPEEGEDVAATISATETLSEEEQEELRRELAKVEEEIQTLSQVLAAKEKHLAEIKRKLGINSLQELKQNIAKGWQDVTATSA

SEQ ID NO: 36955 - protein, 235 aa, Artificial Sequence
  Synthetic polypeptide
FLNCLLRTDPVPEEGEDVAATISATETLSEEEQEELRRELAKVEEEIQTLSQVLAAKEKHLAEIKRKLGINSLQELKQNIAKGWQDVTATSAYKKTSETLSQAGQKASAAFSSVGSVITKKLEDVKNSPTFKSFEEKVENLKGSPKNVESFASMLRHSPLTQMGPAKDKLVIGRIFHIVENDLYIDFGGKFHCVCRRPEVDGESPISWYAVWRRFSQVMITCFSSNSDFGKHRKR

SEQ ID NO: 36956 - protein, 5 aa, Artificial Sequence
  Synthetic polypeptide
FLIVC

SEQ ID NO: 36957 - protein, 181 aa, Artificial Sequence
  Synthetic polypeptide
FLNCLLRTDPVPEEGEDVAATISATETLSEEEQEELRRELAKVEEEIQTLSQVLAAKEKHLAEIKRKLGINSLQELKQNIAKGWQDVTATSAYKKTSETLSQAGQKASAAFSSVGSVITKKLEDVKNSPTFKSFEEKVENLKSKVGGTKPAGGDFGEVLNSAANASATTTEPLPEKTQESL

SEQ ID NO: 36958 - protein, 204 aa, Artificial Sequence
  Synthetic polypeptide
FLNCLLRTDPVPEEGEDVAATISATETLSEEEQEELRRELAKVEEEIQTLSQVLAAKEKHLAEIKRKLGINSLQELKQNIAKGWQDVTATSAYKKTSETLSQAGQKASAAFSSVGSVITKKLEDVKLQAFSHSFSIRSIQHSISMPAMRNSPTFKSFEEKVENLKSKVGGTKPAGGDFGEVLNSAANASATTTEPLPEKTQESL

SEQ ID NO: 36959 - protein, 190 aa, Artificial Sequence
  Synthetic polypeptide
FLNCLLRTDPVPEEGEDVAATISATETLSEEEQEELRRELAKVEEEIQTLSQVLAAKEKHLAEIKRKLGINSLQELKQNIAKGWQDVTATSAYKKTSETLSQAGQKASAAFSSVGSVITKKLEDVKLQAFSHSFRNSPTFKSFEEKVENLKSKVGGTKPAGGDFGEVLNSAANASATTTEPLPEKTQESL

SEQ ID NO: 36960 - protein, 195 aa, Artificial Sequence
  Synthetic polypeptide
FLNCLLRTDPVPEEGEDVAATISATETLSEEEQEELRRELAKVEEEIQTLSQVLAAKEKHLAEIKRKLGINSLQELKQNIAKGWQDVTATSAYKKTSETLSQAGQKASAAFSSVGSVITKKLEDVNIRSIQHSISMPAMRNSPTFKSFEEKVENLKSKVGGTKPAGGDFGEVLNSAANASATTTEPLPEKTQESL

SEQ ID NO: 36961 - protein, 108 aa, Artificial Sequence
  Synthetic polypeptide
FLNCLLRTDPVPEEGEDVAATISATETLSEEEQEELRRELAKVEEEIQTLSQVLAAKEKHLAEIKRKLGINSLQELKQNIAKGWQDVTATSARSKLLAAETELLCLLY

SEQ ID NO: 36962 - protein, 12 aa, Artificial Sequence
  Synthetic polypeptide
FLNCLLRTDPVP

SEQ ID NO: 36963 - protein, 92 aa, Artificial Sequence
  Synthetic polypeptide
FLNCLLRTDPVPEEGEDVAATISATETLSEEEQEELRRELAKVEEEIQTLSQVLAAKEKHLAEIKRKLGINSLQELKQNIAKGWQDVTATSA

SEQ ID NO: 36964 - protein, 35 aa, Artificial Sequence
  Synthetic polypeptide
FLNSFYFIWNFWLELGKDLSFLHSYKMSAENRPSP

SEQ ID NO: 36965 - protein, 14 aa, Artificial Sequence
  Synthetic polypeptide
FLILFISSGISGLN

SEQ ID NO: 36966 - protein, 50 aa, Artificial Sequence
  Synthetic polypeptide
SCYCTPAWATSLQTRRCSAVQLLAWQQMLLPAVSRMGHSPMGTFFQRTVL

SEQ ID NO: 36967 - protein, 39 aa, Artificial Sequence
  Synthetic polypeptide
GRRISWAQEFETSVSYNHATALQPGQQAFRQGDVQPFSY

SEQ ID NO: 36968 - protein, 386 aa, Artificial Sequence
  Synthetic polypeptide
AIIMLLHSSLGNKPSDKEMFSRSVTSLATDAPASSEQNGALTNGDILSEDSTLTCMQHYEEVQTSASDLLDSQDSTGKPKCHQSRELPRIPPESAVDTMLTARSVDGDQGLGMEGPYEVLKDSSSQENMVEDCLYETVKEIKEVAAAAHLEKGHSGKAKSTSASKELPGPQTEGKAEFAEYASVDRNKKCRQSVNVESILGNSCDPEEEAPPPVPVKLLDENENLQEKEGGEAEESATDTTSETNKRFSSLSYKSREEDPTLTEEEISAMYSSVNKPGQLVNKSGQSLTVPESTYTSIQGDPQRSPSSCNDLYATVKDFEKTPNSTLPPAGRPSEEPEPDYEAIQTLNREEEKATLGTNGHHGLVPKENDYESISDLQQGRDITRL

SEQ ID NO: 36969 - protein, 37 aa, Artificial Sequence
  Synthetic polypeptide
PTSHPSADPIFFHLCVMIVQEYFALNTEAGSLMVVLR

SEQ ID NO: 36970 - protein, 46 aa, Artificial Sequence
  Synthetic polypeptide
HLISPILLLYLLVNNSRLPFSQAKNLGVNLDPHPIHQQIPFSSICV

SEQ ID NO: 36971 - protein, 270 aa, Artificial Sequence
  Synthetic polypeptide
LITPGFLFLRPKTLESTLTHIPSISRSHFLPFVCDDCSGIFCLEHRSRESHGCPEVTVINERLKTDQHTSYPCSFKDCAERELVAVICPYCEKNFCLRHRHQSDHECEKLEIPKPRMAATQKLVKDIIDSKTGETASKRWKGAKNSETAAKVALMKLKMHADGDKSLPQVFLPKGSKEKSKPMFFCHRWSIGKAIDFAASLARLKNDNNKFTAKKLRLCHITSGEALPLDHTLETWIAKEDCPLYNGGNIILEYLNDEEQFCKNVESYLE

SEQ ID NO: 36972 - protein, 277 aa, Artificial Sequence
  Synthetic polypeptide
LITPGFLFLRPKTLESTLTHIPSISRSHFLPFVCDDCSGIFCLEHRSRESHGCPEVTVINERLKTDQHTSYPCSFKDCAERELVAVICPYCEKNFCLRHRHQSDHECEKLEIPKPRMAATQKLVKDIIDSKTGETASKRWKGAKNSETAAKVALMKLKMHADGDKSLPQTERIYFQVFLPKGSKEKSKPMFFCHRWSIGKAIDFAASLARLKNDNNKFTAKKLRLCHITSGEALPLDHTLETWIAKEDCPLYNGGNIILEYLNDEEQFCKNVESYLE

SEQ ID NO: 36973 - protein, 174 aa, Artificial Sequence
  Synthetic polypeptide
LITPGFLFLRPKTLESTLTHIPSISRSHFLPFVCDDCSGIFCLEHRSRESHGCPEVTVINERLKTDQHTSYPCSFKDCAERELVAVICPYCEKNFCLRHRHQSDHECEKLEIPKPRMAATQKLVKDIIDSKTGETASKRWKGAKNSETAAKVALMKLKMHADGDKSLPQMSNLE

SEQ ID NO: 36974 - protein, 236 aa, Artificial Sequence
  Synthetic polypeptide
LITPGFLFLRPKTLESTLTHIPSISRSHFLPFVCDDCSGIFCLEHRSRESHGCPEVTVINERLKTDQHTSYPCSFKDCAERELVAVICPYCEKNFCLRHRHQSDHECEKLEIPKPRMAATQKLVKDIIDSKTGETASKRWKGAKNSETAAKVALMKLKMHADGDKSLPQTERIYFQVFLPKGSKEKSKPMFFCHRWSIGKAIDFAASLARLKNDNNKFTAKVTSHYNNISILIKVL

SEQ ID NO: 36975 - protein, 45 aa, Artificial Sequence
  Synthetic polypeptide
AAHSPSSLWYPVLRCNPLRGPLWQPSLIQSSSRSSLEFCKVLQPC

SEQ ID NO: 36976 - protein, 204 aa, Artificial Sequence
  Synthetic polypeptide
GQRPCPKARQNYANYSKLFNLANPTLFAVHKLPIPPPACGTQSSGATPCVVLCGSLLSFRALHVAHWNSAKYSSLAEAASKADGLAVIGVLMKVGEANPKLQKVLDALQAIKTKGKRAPFTNFDPSTLLPSSLDFWTYPGSLTHPPLYESVTWIICKESISVSSEQLAQFRSLLSNVEGDNAVPMQHNNRPTQPLKGRTVRASF

SEQ ID NO: 36977 - protein, 42 aa, Artificial Sequence
  Synthetic polypeptide
LTPPFLLYISCPFPLQPVVPSPQVQPPAWSSVAAFSHSELFT

SEQ ID NO: 36978 - protein, 183 aa, Artificial Sequence
  Synthetic polypeptide
GQRPCPKARQNYANYSKLFNLANPTLFAVHKLPIPPPACGTQSSGATPCVVLCGSLLSFRALHVAHWNSAKYSSLAEAASKADGLAVIGVLMKGKRAPFTNFDPSTLLPSSLDFWTYPGSLTHPPLYESVTWIICKESISVSSEQLAQFRSLLSNVEGDNAVPMQHNNRPTQPLKGRTVRASF

SEQ ID NO: 36979 - protein, 184 aa, Artificial Sequence
  Synthetic polypeptide
GQRPCPKARQNYANYSKLFNLANPTLFAVHKLPIPPPACGTQSSGATPCVVLCGSLLSFRALHVAHWNSAKYSSLAEAASKADGLAVIGVLMKVGEANPKLQKVLDALQAIKTKGKRAPFTNFDPSTLLPSSLDFWTYPGSLTHPPLYESVTWIICKESISVSSEQHNNRPTQPLKGRTVRASF

SEQ ID NO: 36980 - protein, 203 aa, Artificial Sequence
  Synthetic polypeptide
GQRPCPKARQNYANYSKLFNLANPTLFAVHKLPIPPPACGTQSSGATPCVVLCGSLLSFRALHVAHWNSAKYSSLAEAASKADGLAVIGVLMKVGEANPKLQKVLDALQAIKTKGKRAPFTNFDPSTLLPSSLDFWTYPGSLTHPPLYESVTWIICKESISVSSEQLAQFRSLLSNVEGDNAVPMQHNNRPTQPLKGRTVRAS

SEQ ID NO: 36981 - protein, 194 aa, Artificial Sequence
  Synthetic polypeptide
GQRPCPKARQNYANYSKLFNLANPTLFAVHKLPIPPPACGTQSSGATPCVVLCGSLLSFRALHVAHWNSAKYSSLAEAASKADGLAVIGVLMKVGEANPKLQKVLDALQAIKTKGKRAPFTNFDPSTLLPSSLDFWTYPGSLTHPPLYESVTWIICKESISVSSEQLAQFRSLLSNVEGDNAVPMQHNNRPTQP

SEQ ID NO: 36982 - protein, 193 aa, Artificial Sequence
  Synthetic polypeptide
GQRPCPKARQNYANYSKLFNLANPTLFAVHKLPIPPPACGTQSSGATPCVVLCGSLLSFRALHVAHWNSAKYSSLAEAASKADGLAVIGVLMKVGEANPKLQKVLDALQAIKTKGKRAPFTNFDPSTLLPSSLDFWTYPGSLTHPPLYESVTWIICKESISVSSEQLAQFRSLLSNVEGDNAVPMQHNNRPTQ

SEQ ID NO: 36983 - protein, 143 aa, Artificial Sequence
  Synthetic polypeptide
GQRPCPKARQNYANYSKLFNLANPTLFAVHKLPIPPPACGTQSSGATPCVVLCGSLLSFRALHVAHWNSAKYSSLAEAASKADGLAVIGVLMKVGEANPKLQKVLDALQAIKTKGKRAPFTNFDPSTLLPSSLDFWTYPGSLT

SEQ ID NO: 36984 - protein, 118 aa, Artificial Sequence
  Synthetic polypeptide
GQRPCPKARQNYANYSKLFNLANPTLFAVHKLPIPPPACGTQSSGATPCVVLCGSLLSFRALHVAHWNSAKYSSLAEAASKADGLAVIGVLMKVGEANPKLQKVLDALQAIKTKGKRA

SEQ ID NO: 36985 - protein, 92 aa, Artificial Sequence
  Synthetic polypeptide
GQRPCPKARQNYANYSKLFNLANPTLFAVHKLPIPPPACGTQSSGATPCVVLCGSLLSFRALHVAHWNSAKYSSLAEAASKADGLAVIGVLM

SEQ ID NO: 36986 - protein, 91 aa, Artificial Sequence
  Synthetic polypeptide
GQRPCPKARQNYANYSKLFNLANPTLFAVHKLPIPPPACGTQSSGATPCVVLCGSLLSFRALHVAHWNSAKYSSLAEAASKADGLAVIGVL

SEQ ID NO: 36987 - protein, 213 aa, Artificial Sequence
  Synthetic polypeptide
AAHSPSSLWYPVLRCNPLRGPLWQPSLIQSLLKGGPFSDSYRLFQFHFHWGSTNEHGSEHTVDGVKYSAELHVAHWNSAKYSSLAEAASKADGLAVIGVLMKVGEANPKLQKVLDALQAIKTKGKRAPFTNFDPSTLLPSSLDFWTYPGSLTHPPLYESVTWIICKESISVSSEQLAQFRSLLSNVEGDNAVPMQHNNRPTQPLKGRTVRASF

SEQ ID NO: 36988 - protein, 62 aa, Artificial Sequence
  Synthetic polypeptide
GQRPCPKARQNYANYSKLFNLANPTLFAVHKLPIPPPACGTQSSGATPCVVLCGSLLSFRAC

SEQ ID NO: 36989 - protein, 47 aa, Artificial Sequence
  Synthetic polypeptide
LTPPFLLYISCPFPLQPVVPSPQVQPPAWSSVAAFSHSELAERWSFL

SEQ ID NO: 36990 - protein, 193 aa, Artificial Sequence
  Synthetic polypeptide
AAHSPSSLWYPVLRCNPLRGPLWQPSLIQSLLKGGPFSDSYRLFQFHFHWGSTNEHGSEHTVDGVKYSAELHVAHWNSAKYSSLAEAASKADGLAVIGVLMKVGEANPKLQKVLDALQAIKTKGKRAPFTNFDPSTLLPSSLDFWTYPGSLTHPPLYESVTWIICKESISVSSEQHNNRPTQPLKGRTVRASF

SEQ ID NO: 36991 - protein, 212 aa, Artificial Sequence
  Synthetic polypeptide
AAHSPSSLWYPVLRCNPLRGPLWQPSLIQSLLKGGPFSDSYRLFQFHFHWGSTNEHGSEHTVDGVKYSAELHVAHWNSAKYSSLAEAASKADGLAVIGVLMKVGEANPKLQKVLDALQAIKTKGKRAPFTNFDPSTLLPSSLDFWTYPGSLTHPPLYESVTWIICKESISVSSEQLAQFRSLLSNVEGDNAVPMQHNNRPTQPLKGRTVRAS

SEQ ID NO: 36992 - protein, 203 aa, Artificial Sequence
  Synthetic polypeptide
AAHSPSSLWYPVLRCNPLRGPLWQPSLIQSLLKGGPFSDSYRLFQFHFHWGSTNEHGSEHTVDGVKYSAELHVAHWNSAKYSSLAEAASKADGLAVIGVLMKVGEANPKLQKVLDALQAIKTKGKRAPFTNFDPSTLLPSSLDFWTYPGSLTHPPLYESVTWIICKESISVSSEQLAQFRSLLSNVEGDNAVPMQHNNRPTQP

SEQ ID NO: 36993 - protein, 127 aa, Artificial Sequence
  Synthetic polypeptide
AAHSPSSLWYPVLRCNPLRGPLWQPSLIQSLLKGGPFSDSYRLFQFHFHWGSTNEHGSEHTVDGVKYSAELHVAHWNSAKYSSLAEAASKADGLAVIGVLMKVGEANPKLQKVLDALQAIKTKGKRA

SEQ ID NO: 36994 - protein, 101 aa, Artificial Sequence
  Synthetic polypeptide
AAHSPSSLWYPVLRCNPLRGPLWQPSLIQSLLKGGPFSDSYRLFQFHFHWGSTNEHGSEHTVDGVKYSAELHVAHWNSAKYSSLAEAASKADGLAVIGVLM

SEQ ID NO: 36995 - protein, 100 aa, Artificial Sequence
  Synthetic polypeptide
AAHSPSSLWYPVLRCNPLRGPLWQPSLIQSLLKGGPFSDSYRLFQFHFHWGSTNEHGSEHTVDGVKYSAELHVAHWNSAKYSSLAEAASKADGLAVIGVL

SEQ ID NO: 36996 - protein, 70 aa, Artificial Sequence
  Synthetic polypeptide
AAHSPSSLWYPVLRCNPLRGPLWQPSLIQSLLKGGPFSDSYRLFQFHFHWGSTNEHGSEHTVDGVKYSAE

SEQ ID NO: 36997 - protein, 51 aa, Artificial Sequence
  Synthetic polypeptide
AAHSPSSLWYPVLRCNPLRGPLWQPSLIQSLLKGGPFSDSYRLFQFHFHWG

SEQ ID NO: 36998 - protein, 279 aa, Artificial Sequence
  Synthetic polypeptide
AAHSPSSLWYPVLRCNPLRGPLWQPSLIQSCPEQWSKLYPIANGNNQSPVDIKTSETKHDTSLKPISVSYNPATAKEIINVGHSFHVNFEDNDNRSVLKGGPFSDSYRLFQFHFHWGSTNEHGSEHTVDGVKYSAELHVAHWNSAKYSSLAEAASKADGLAVIGVLMKVGEANPKLQKVLDALQAIKTKGKRAPFTNFDPSTLLPSSLDFWTYPGSLTHPPLYESVTWIICKESISVSSEQLAQFRSLLSNVEGDNAVPMQHNNRPTQPLKGRTVRASF

SEQ ID NO: 36999 - protein, 93 aa, Artificial Sequence
  Synthetic polypeptide
GQRPCPKARQNYANYSKLFNLANPTLFAVHKLPIPPPACGTQSSGATPCVVLCGSLLSFRAVLNNGASCIPLPMEITSPLLILKPVKPNMTPL

SEQ ID NO: 37000 - protein, 41 aa, Artificial Sequence
  Synthetic polypeptide
LTPPFLLYISCPFPLQPVVPSPQVQPPAWSSVAAFSHSELS

SEQ ID NO: 37001 - protein, 269 aa, Artificial Sequence
  Synthetic polypeptide
AAHSPSSLWYPVLRCNPLRGPLWQPSLIQSCPEQWSKLYPIANGNNQSPVDIKTSETKHDTSLKPISVSYNPATAKEIINVGHSFHVNFEDNDNRSVLKGGPFSDSYRLFQFHFHWGSTNEHGSEHTVDGVKYSAELHVAHWNSAKYSSLAEAASKADGLAVIGVLMKVGEANPKLQKVLDALQAIKTKGKRAPFTNFDPSTLLPSSLDFWTYPGSLTHPPLYESVTWIICKESISVSSEQLAQFRSLLSNVEGDNAVPMQHNNRPTQP

SEQ ID NO: 37002 - protein, 193 aa, Artificial Sequence
  Synthetic polypeptide
AAHSPSSLWYPVLRCNPLRGPLWQPSLIQSCPEQWSKLYPIANGNNQSPVDIKTSETKHDTSLKPISVSYNPATAKEIINVGHSFHVNFEDNDNRSVLKGGPFSDSYRLFQFHFHWGSTNEHGSEHTVDGVKYSAELHVAHWNSAKYSSLAEAASKADGLAVIGVLMKVGEANPKLQKVLDALQAIKTKGKRA

SEQ ID NO: 37003 - protein, 99 aa, Artificial Sequence
  Synthetic polypeptide
AAHSPSSLWYPVLRCNPLRGPLWQPSLIQSCPEQWSKLYPIANGNNQSPVDIKTSETKHDTSLKPISVSYNPATAKEIINVGHSFHVNFEDNDNRSALL

SEQ ID NO: 37004 - protein, 167 aa, Artificial Sequence
  Synthetic polypeptide
AAHSPSSLWYPVLRCNPLRGPLWQPSLIQSCPEQWSKLYPIANGNNQSPVDIKTSETKHDTSLKPISVSYNPATAKEIINVGHSFHVNFEDNDNRSVLKGGPFSDSYRLFQFHFHWGSTNEHGSEHTVDGVKYSAELHVAHWNSAKYSSLAEAASKADGLAVIGVLM

SEQ ID NO: 37005 - protein, 166 aa, Artificial Sequence
  Synthetic polypeptide
AAHSPSSLWYPVLRCNPLRGPLWQPSLIQSCPEQWSKLYPIANGNNQSPVDIKTSETKHDTSLKPISVSYNPATAKEIINVGHSFHVNFEDNDNRSVLKGGPFSDSYRLFQFHFHWGSTNEHGSEHTVDGVKYSAELHVAHWNSAKYSSLAEAASKADGLAVIGVL

SEQ ID NO: 37006 - protein, 136 aa, Artificial Sequence
  Synthetic polypeptide
AAHSPSSLWYPVLRCNPLRGPLWQPSLIQSCPEQWSKLYPIANGNNQSPVDIKTSETKHDTSLKPISVSYNPATAKEIINVGHSFHVNFEDNDNRSVLKGGPFSDSYRLFQFHFHWGSTNEHGSEHTVDGVKYSAE

SEQ ID NO: 37007 - protein, 117 aa, Artificial Sequence
  Synthetic polypeptide
AAHSPSSLWYPVLRCNPLRGPLWQPSLIQSCPEQWSKLYPIANGNNQSPVDIKTSETKHDTSLKPISVSYNPATAKEIINVGHSFHVNFEDNDNRSVLKGGPFSDSYRLFQFHFHWG

SEQ ID NO: 37008 - protein, 40 aa, Artificial Sequence
  Synthetic polypeptide
AAHSPSSLWYPVLRCNPLRGPLWQPSLIQSCPEQWSKLYP

SEQ ID NO: 37009 - protein, 71 aa, Artificial Sequence
  Synthetic polypeptide
GQRPCPKARQNYANYSKLFNLANPTLFAVHKLPIPPPACGTQSSGATPCVVLCGSLLSFRAVLNNGASCIP

SEQ ID NO: 37010 - protein, 4 aa, Artificial Sequence
  Synthetic polypeptide
WGSC

SEQ ID NO: 37011 - protein, 78 aa, Artificial Sequence
  Synthetic polypeptide
ALWDNGREYRLWSQPNVFQILNPPPKVCSPDGGVAESAQTGRSGRDHLPQERQRASKCCLGLPTHADCDQPLFQEECW

SEQ ID NO: 37012 - protein, 63 aa, Artificial Sequence
  Synthetic polypeptide
ILHLRYAVLMGELLSQPRPEGVAEIICPKNGSERVNVALVYPPTPTVISPCSKKNVGEKHRNQ

SEQ ID NO: 37013 - protein, 29 aa, Artificial Sequence
  Synthetic polypeptide
ALWDNGREYRLWSQPNVFQILNPPPKGSC

SEQ ID NO: 37014 - protein, 51 aa, Artificial Sequence
  Synthetic polypeptide
ILHLRGVAESAQTGRSGRDHLPQERQRASKCCLGLPTHADCDQPLFQEECW

SEQ ID NO: 37015 - protein, 27 aa, Artificial Sequence
  Synthetic polypeptide
NGISPGDSSRSSLKDIQLQEFSTQGSV

SEQ ID NO: 37016 - protein, 17 aa, Artificial Sequence
  Synthetic polypeptide
RTYSYKSFPLRVLCSLT

SEQ ID NO: 37017 - protein, 27 aa, Artificial Sequence
  Synthetic polypeptide
QLTVLLKGHTVTRVFHSGFCVASPSAS

SEQ ID NO: 37018 - protein, 55 aa, Artificial Sequence
  Synthetic polypeptide
GTGFISLGSARQWAQPSSSRRRKPSNCQCGGPRVCQSFNSRQKDPPRNSSALSRF

SEQ ID NO: 37019 - protein, 223 aa, Artificial Sequence
  Synthetic polypeptide
GVPDSGHSLLAAGGGNRRTANVVAHGFANLLTLDKKTLQEILVHYPDSERILMKKARVLLKQKAKTAEATPPRKDLALLFPPKEETPKLFKTLLGGTGKASLARLLKLKREQAAQKKENSEGGEEEGKENEDKQKENEDKQKENEDKGKENEDKDKGREPEEKPLDRPECTASPIAVEEEPHSVRRTVLPRGTSRQSLIISMAPSAEGGEEVLTIEVKEKAKQ

SEQ ID NO: 37020 - protein, 23 aa, Artificial Sequence
  Synthetic polypeptide
FLHFHLRYRVHLTRECQTVGTAF

SEQ ID NO: 37021 - protein, 39 aa, Artificial Sequence
  Synthetic polypeptide
GRSQDGRIGTVPVYSSQPERRRRRVISAFPSESAFKAEG

SEQ ID NO: 37022 - protein, 84 aa, Artificial Sequence
  Synthetic polypeptide
FLHFHLRVLLKQKAKTAEATPPRKDLALLFPPKEETPKLFKTLLGGTGKASLARLLKLKREQAAQGQFLPVSFTAGIFLGHLRL

SEQ ID NO: 37023 - protein, 173 aa, Artificial Sequence
  Synthetic polypeptide
FLHFHLRVLLKQKAKTAEATPPRKDLALLFPPKEETPKLFKTLLGGTGKASLARLLKLKREQAAQKKENSEGGEEEGKENEDKQKENEDKQKENEDKGKENEDKDKGREPEEKPLDRPECTASPIAVEEEPHSVRRTVLPRGTSRQSLIISMAPSAEGGEEVLTIEVKEKAKQ

SEQ ID NO: 37024 - protein, 72 aa, Artificial Sequence
  Synthetic polypeptide
GRSQDGRIGTVPVYSSQPERRRRRVISAFPSEPSSSRRRKPSNCQCGGPRVCQSFNSRQKDPPRNSSALSRF

SEQ ID NO: 37025 - protein, 222 aa, Artificial Sequence
  Synthetic polypeptide
FLHFHLSLLAAGGGNRRTANVVAHGFANLLTLDKKTLQEILVHYPDSERILMKKARVLLKQKAKTAEATPPRKDLALLFPPKEETPKLFKTLLGGTGKASLARLLKLKREQAAQKKENSEGGEEEGKENEDKQKENEDKQKENEDKGKENEDKDKGREPEEKPLDRPECTASPIAVEEEPHSVRRTVLPRGTSRQSLIISMAPSAEGGEEVLTIEVKEKAKQ

SEQ ID NO: 37026 - protein, 549 aa, Artificial Sequence
  Synthetic polypeptide
PNSTVFIKSTVVYSNVLGLQSLTTRSLTHPEQVPVLQAPFMLDVASIIPFDICYLFFGFNPMFRANRMLKYTSFFEFNHHLESIMDKAYIYRVIRTTGYLLFILHINACVYYWASNYEGIGTTRWVYDGEGNEYLRCYYWAVRTLITIGGLPEPQTLFEIVFQLLNFFSGVFVFSSLIGQMRDVIGAATANQNYFRACMDDTIAYMNNYSIPKLVQKRVRTWYEYTWDSQRMLDESDLLKTLPTTVQLALAIDVNFSIISKVDLFKGCDTQMIYDMLLRLKSVLYLPGDFVCKKGEIGKEMYIIKHGEVQVLGGPDGTKVLVTLKAGSVFGEISLLAAGGGNRRTANVVAHGFANLLTLDKKTLQEILVHYPDSERILMKKARVLLKQKAKTAEATPPRKDLALLFPPKEETPKLFKTLLGGTGKASLARLLKLKREQAAQKKENSEGGEEEGKENEDKQKENEDKQKENEDKGKENEDKDKGREPEEKPLDRPECTASPIAVEEEPHSVRRTVLPRGTSRQSLIISMAPSAEGGEEVLTIEVKEKAKQ

SEQ ID NO: 37027 - protein, 19 aa, Artificial Sequence
  Synthetic polypeptide
LTQSKFQSCKLHSCWMSHQ

SEQ ID NO: 37028 - protein, 35 aa, Artificial Sequence
  Synthetic polypeptide
CPRPSVTHYSLIDSPRASSSPASSIHVGCRINNTI

SEQ ID NO: 37029 - protein, 5 aa, Artificial Sequence
  Synthetic polypeptide
PCATT

SEQ ID NO: 37030 - protein, 15 aa, Artificial Sequence
  Synthetic polypeptide
VSSGLPSHVQLLEKV

SEQ ID NO: 37031 - protein, 451 aa, Artificial Sequence
  Synthetic polypeptide
WFYKTPFFLRFFLSLLQPREEGVCFPFTSHRDCEFPQVSLAMCNYLKKSKHINYGQLNALCHIRGQHSRSMSNILSAHDTFMKQYPKVFLHQKPRLPKLFKQEEQRELNEGKEESQHQQPDDSNNIAVHVQRAHGGHILYRPKRATEKFEEFLAILKKLPIHRTPYEHKTVWKFLKTIPDLTFQLNDKHLKTLSKTVFSETWLKGSTVVANDGFYVILKGLARPQTNVYKNLIEGSDSPDSFISQSFHSFIWSEEFKNSTLAEMYLPSYDSMLSKWSTFGTLEVMPQNESETQMFSVVTEDDCEILKIPAKGYAKIKEEKIKLENMQKLKLIRMCPYYEEWPTLSIYELIALLKWKKFPPGHVIVESGNIISFVGYINSGCCNIYRSIIGFVKLRSNKVKRSQKLVYMGKLKEKESFGEISVLLQVPFTCTIITKKEVEMAIIEDKDLFVA

SEQ ID NO: 37032 - protein, 22 aa, Artificial Sequence
  Synthetic polypeptide
PCATPEYEQYLISSRYIYEAIS

SEQ ID NO: 37033 - protein, 394 aa, Artificial Sequence
  Synthetic polypeptide
VSSGLPSHVQLRSMSNILSAHDTFMKQYPKVFLHQKPRLPKLFKQEEQRELNEGKEESQHQQPDDSNNIAVHVQRAHGGHILYRPKRATEKFEEFLAILKKLPIHRTPYEHKTVWKFLKTIPDLTFQLNDKHLKTLSKTVFSETWLKGSTVVANDGFYVILKGLARPQTNVYKNLIEGSDSPDSFISQSFHSFIWSEEFKNSTLAEMYLPSYDSMLSKWSTFGTLEVMPQNESETQMFSVVTEDDCEILKIPAKGYAKIKEEKIKLENMQKLKLIRMCPYYEEWPTLSIYELIALLKWKKFPPGHVIVESGNIISFVGYINSGCCNIYRSIIGFVKLRSNKVKRSQKLVYMGKLKEKESFGEISVLLQVPFTCTIITKKEVEMAIIEDKDLFVA

SEQ ID NO: 37034 - protein, 47 aa, Artificial Sequence
  Synthetic polypeptide
WFYKTPFFLRFFLSLLQPREEGVCFPFTSHRDCEFPQVSLAMCNSGV

SEQ ID NO: 37035 - protein, 126 aa, Artificial Sequence
  Synthetic polypeptide
LRGRVQQARKIPAQYGFTYFYKGKEYWKFNNQILKVEPGYPRSILKDFMGCDGPTDRVKEGHSPPDDVDIVIKLDNTASTVKAIAIVIPCILALCLLVLVYTVFQFKRKGTPRHILYCKRSMQEWV

SEQ ID NO: 37036 - protein, 48 aa, Artificial Sequence
  Synthetic polypeptide
CMLRIIILYLFFSLEEESSKQGRFQLNMALRISTKERSIGNSTTRYSR

SEQ ID NO: 37037 - protein, 49 aa, Artificial Sequence
  Synthetic polypeptide
RKSPASKEDSSSIWLYVFLQRKGVLEIQQPDTQGRTWISKIHPQGFYGL

SEQ ID NO: 37038 - protein, 57 aa, Artificial Sequence
  Synthetic polypeptide
MSSALNALPNILCIFITFSFFRFWCISSERSSLTFLLKVTNIGCSRIQLFNLVTLMT

SEQ ID NO: 37039 - protein, 5 aa, Artificial Sequence
  Synthetic polypeptide
PFYLK

SEQ ID NO: 37040 - protein, 17 aa, Artificial Sequence
  Synthetic polypeptide
LSQWRVMVTWKERSCRT

SEQ ID NO: 37041 - protein, 249 aa, Artificial Sequence
  Synthetic polypeptide
TITDAKLPVTLTVEGNGYLEGKELQNLIQELQQARKKAGLELSPEMKTFVDQYGQRDDGKIGIVELAHVLPTEENFLLLFRCQQLKSCEEFMKTWRKYDTDHSGFIETEELKNFLKDLLEKANKTVDDTKLAEYTDLMLKLFDSNNDGKLELTEMARLLPVQENFLLKFQGIKMCGKEFNKAFELYDQDGNGYIDENELDALLKDLCEKNKQDLDINNITTYKKNIMALSDGGKLYRTDLALILCAGDN

SEQ ID NO: 37042 - protein, 245 aa, Artificial Sequence
  Synthetic polypeptide
KGGWSQRHSQGSGYLEGKELQNLIQELQQARKKAGLELSPEMKTFVDQYGQRDDGKIGIVELAHVLPTEENFLLLFRCQQLKSCEEFMKTWRKYDTDHSGFIETEELKNFLKDLLEKANKTVDDTKLAEYTDLMLKLFDSNNDGKLELTEMARLLPVQENFLLKFQGIKMCGKEFNKAFELYDQDGNGYIDENELDALLKDLCEKNKQDLDINNITTYKKNIMALSDGGKLYRTDLALILCAGDN

SEQ ID NO: 37043 - protein, 85 aa, Artificial Sequence
  Synthetic polypeptide
SSFSTDPSDPSPPRQAKLGPNSSSASAPLPCNLFIASPPHTWSGLQFLSVTSPPPPAQQFTLKKVAGAKGIVKEVVTWKERSCRT

SEQ ID NO: 37044 - protein, 31 aa, Artificial Sequence
  Synthetic polypeptide
SRKWLPGRKGAAELDPGAPAGAKEGWIGVIT

SEQ ID NO: 37045 - protein, 47 aa, Artificial Sequence
  Synthetic polypeptide
ERSTYDLRSSDRPAQETSHQFQIWESKCVGKSSIRLLSCMIRTAMDT

SEQ ID NO: 37046 - protein, 54 aa, Artificial Sequence
  Synthetic polypeptide
LRSGDLPWEINPLSSCSLLCEKDPPTTSGPQTDQPKKHLTNFKSGNQNVWERVQ

SEQ ID NO: 37047 - protein, 113 aa, Artificial Sequence
  Synthetic polypeptide
IPCPPALCSVRKIHLRPQVLRPTSPRNISPISNLGIKMCGKEFNKAFELYDQDGNGYIDENELDALLKDLCEKNKQDLDINNITTYKKNIMALSDGGKLYRTDLALILCAGDN

SEQ ID NO: 37048 - protein, 257 aa, Artificial Sequence
  Synthetic polypeptide
ERSTYDLRSSDRPAQETSHQFQICGYLEGKELQNLIQELQQARKKAGLELSPEMKTFVDQYGQRDDGKIGIVELAHVLPTEENFLLLFRCQQLKSCEEFMKTWRKYDTDHSGFIETEELKNFLKDLLEKANKTVDDTKLAEYTDLMLKLFDSNNDGKLELTEMARLLPVQENFLLKFQGIKMCGKEFNKAFELYDQDGNGYIDENELDALLKDLCEKNKQDLDINNITTYKKNIMALSDGGKLYRTDLALILCAGDN

SEQ ID NO: 37049 - protein, 55 aa, Artificial Sequence
  Synthetic polypeptide
LRSGDLPWEINPLSSCSLLCEKDPPTTSGPQTDQPKKHLTNFKSVVTWKERSCRT

SEQ ID NO: 37050 - protein, 62 aa, Artificial Sequence
  Synthetic polypeptide
IPCPPALCSVRKIHLRPQVLRPTSPRNISPISNLWLPGRKGAAELDPGAPAGAKEGWIGVIT

SEQ ID NO: 37051 - protein, 20 aa, Artificial Sequence
  Synthetic polypeptide
MTNKVNRIIKKLNLFYEQPN

SEQ ID NO: 37052 - protein, 3 aa, Artificial Sequence
  Synthetic polypeptide
PIR

SEQ ID NO: 37053 - protein, 265 aa, Artificial Sequence
  Synthetic polypeptide
PERNAQTKQLQTAVSNVEKHFGELCQIFAAYVRKTARLRDKADLLVNEINAYAATETPHLKLGLMNFADEFAKLQDYRQAEVERLEAKVVEPLKTYGTIVKMKRDDLKATLTARNREAKQLTQLERTRQRNPSDRHVISQAETELQRAAMDASRTSRHLEETINNFERQKMKDIKTIFSEFITIEMLFHGKALEVYTAAYQNIQNIDEDEDLEVFRNSLYAPDYSSRLDIVRANSKSPLQRSLSAKCVSGTGQEAGWAATCQTLI

SEQ ID NO: 37054 - protein, 44 aa, Artificial Sequence
  Synthetic polypeptide
IIQPPADQKGTLKRNNCKQLSQMWRSILENCAKSSLPMCGKLPG

SEQ ID NO: 37055 - protein, 76 aa, Artificial Sequence
  Synthetic polypeptide
TIRNTWPLLTTCQCRDTEVRPLRSSSRQLTRKERSNETTANSCLKCGEAFWRTVPNLRCLCAENCQAERQSRPPGE

SEQ ID NO: 37056 - protein, 283 aa, Artificial Sequence
  Synthetic polypeptide
PERNAQTKQLQTAVSNVEKHFGELCQIFAAYVRKTARLRDKADLLVNEINAYAATETPHLKLGLMNFADEFAKLQDYRQAEVERLEAKVVEPLKTYGTIVKMKRDDLKATLTARNREAKQLTQLERTRQRNPSDRHVISQAETELQRAAMDASRTSRHLEETINNFERQKMKDIKTIFSEFITIEMLFHGKALEVYTAAYQNIQNIDEDEDLEVFRNSLYAPDYSSRLDIVRANSKSPLQRSLSAKCVSGTGQVSTCRLRKDQQAEDDEDDELDVTEEENFLK

SEQ ID NO: 37057 - protein, 156 aa, Artificial Sequence
  Synthetic polypeptide
PERNAQTKQLQTAVSNVEKHFGELCQIFAAYVRKTARLRDKADLLVNEINAYAATETPHLKLGLMNFADEFAKLQDYRQAEVERLEAKVVEPLKTYGTIVKMKRDDLKATLTARNREAKQLTQLERTRQRNPSDRHVIVSFEFGSLKKCLRYGVQK

SEQ ID NO: 37058 - protein, 157 aa, Artificial Sequence
  Synthetic polypeptide
PERNAQTKQLQTAVSNVEKHFGELCQIFAAYVRKTARLRDKADLLVNEINAYAATETPHLKLGLMNFADEFAKLQDYRQAEVERLEAKVVEPLKTYGTIVKMKRDDLKATLTARNREAKQLTQLERTRQRNPSDRHVINFEEFSVKRRNIRNLYSLC

SEQ ID NO: 37059 - protein, 162 aa, Artificial Sequence
  Synthetic polypeptide
PERNAQTKQLQTAVSNVEKHFGELCQIFAAYVRKTARLRDKADLLVNEINAYAATETPHLKLGLMNFADEFAKLQDYRQAEVLMNNDKKVERLEAKVVEPLKTYGTIVKMKRDDLKATLTARNREAKQLTQLERTRQRNPSDRHVISQAETELQRAAMDASR

SEQ ID NO: 37060 - protein, 245 aa, Artificial Sequence
  Synthetic polypeptide
PERNAQTKQLQTAVSNVEKHFGELCQIFAAYVRKTARLRDKADLLVNEINAYAATETPHLKLGLMNFADEFAKLQDYRQAEVERLEAKVVEPLKTYGTIVKMKRDDLKATLTARNREAKQLTQLERTRQRNPSDRHVISQAETELQRAAMDASRTSRHLEETINNFERQKMKDIKVFRNSLYAPDYSSRLDIVRANSKSPLQRSLSAKCVSGTGQVSTCRLRKDQQAEDDEDDELDVTEEENFLK

SEQ ID NO: 37061 - protein, 126 aa, Artificial Sequence
  Synthetic polypeptide
PERNAQTKQLQTAVSNVEKHFGELCQIFAAYVRKTARLRDKADLLVNEINAYAATETPHLKLGLMNFADEFAKLQDYRQAENLKREFQFSKNRMSIKKIELIIAIHTNLKSNHIWRYFWKNVEFLS

SEQ ID NO: 37062 - protein, 256 aa, Artificial Sequence
  Synthetic polypeptide
PERNAQTKQLQTAVSNVEKHFGELCQIFAAYVRKTARLRDKADLLVNEINAYAATETPHLKLGLMNFADEFAKLQDYRQAEVERLEAKVVEPLKTYGTIVKMKRDDLKATLTARNREAKQLTQLERTRQRNPSDRHVISQAETELQRAAMDASRTSRHLEETINNFERQKMKDIKTIFSEFITIEMLFHGKALEVYTAAYQNIQNIDEDEDLERWSFAMLPRLVLNSWGSSDPPALASQSVRFSEILCMHQIIHLV

SEQ ID NO: 37063 - protein, 171 aa, Artificial Sequence
  Synthetic polypeptide
PERNAQTKQLQTAVSNVEKHFGELCQIFAAYVRKTARLRDKADLLVNEINAYAATETPHLKLGLMNFADEFAKLQDYRQAEVERLEAKVVEPLKTYGTIVKMKRDDLKATLTARNREAKQLTQLERTRQRNPSDRHVISQAETELQRAAMDASRTSRHLEETINNFERQKM

SEQ ID NO: 37064 - protein, 18 aa, Artificial Sequence
  Synthetic polypeptide
RSHSQRNPSQKFQPATVL

SEQ ID NO: 37065 - protein, 563 aa, Artificial Sequence
  Synthetic polypeptide
TDYAAKEATHKGIPVRSSSLPLFSDAMPAPTQLFFPLIRNCELSRIYGTACYCHHKHLCCSSSYIPQSRLRYTPHPAYATFCRPKENWWQYTQGRRYASTPQKFYLTPPQVNSILKANEYSFKVPEFDGKNVSSILGFDSNQLPANAPIEDRRSAATCLQTRGMLLGVFDGHAGCACSQAVSERLFYYIAVSLLPHETLLEIENAVESGRALLPILQWHKHPNDYFSKEASKLYFNSLRTYWQELIDLNTGESTDIDVKEALINAFKRLDNDISLEAQVGDPNSFLNYLVLRVAFSGATACVAHVDGVDLHVANTGDSRAMLGVQEEDGSWSAVTLSNDHNAQNERELERLKLEHPKSEAKSVVKQDRLLGLLMPFRAFGDVKFKWSIDLQKRVIESGPDQLNDNEYTKFIPPNYHTPPYLTAEPEVTYHRLRPQDKFLVLATDGLWETMHRQDVVRIVGEYLTGMHHQQPIAVGGYKVTLGQMHGLLTERRTKMSSVFEDQNAATHLIRHAVGNNEFGTVDHERLSKMLSLPEELARMYRDDITIIVVQFNSHVVGAYQNQE

SEQ ID NO: 37066 - protein, 58 aa, Artificial Sequence
  Synthetic polypeptide
KRKAILPHAAPWMNLEQIMLLKKPLTKESQSEVPACHCSLMPCQHQLNCFFLSSVTVN

SEQ ID NO: 37067 - protein, 558 aa, Artificial Sequence
  Synthetic polypeptide
CKTIYWGIPVRSSSLPLFSDAMPAPTQLFFPLIRNCELSRIYGTACYCHHKHLCCSSSYIPQSRLRYTPHPAYATFCRPKENWWQYTQGRRYASTPQKFYLTPPQVNSILKANEYSFKVPEFDGKNVSSILGFDSNQLPANAPIEDRRSAATCLQTRGMLLGVFDGHAGCACSQAVSERLFYYIAVSLLPHETLLEIENAVESGRALLPILQWHKHPNDYFSKEASKLYFNSLRTYWQELIDLNTGESTDIDVKEALINAFKRLDNDISLEAQVGDPNSFLNYLVLRVAFSGATACVAHVDGVDLHVANTGDSRAMLGVQEEDGSWSAVTLSNDHNAQNERELERLKLEHPKSEAKSVVKQDRLLGLLMPFRAFGDVKFKWSIDLQKRVIESGPDQLNDNEYTKFIPPNYHTPPYLTAEPEVTYHRLRPQDKFLVLATDGLWETMHRQDVVRIVGEYLTGMHHQQPIAVGGYKVTLGQMHGLLTERRTKMSSVFEDQNAATHLIRHAVGNNEFGTVDHERLSKMLSLPEELARMYRDDITIIVVQFNSHVVGAYQNQE

SEQ ID NO: 37068 - protein, 37 aa, Artificial Sequence
  Synthetic polypeptide
ARPSTGESQSEVPACHCSLMPCQHQLNCFFLSSVTVN

SEQ ID NO: 37069 - protein, 18 aa, Artificial Sequence
  Synthetic polypeptide
QDHLLGNPSQKFQPATVL

SEQ ID NO: 37070 - protein, 15 aa, Artificial Sequence
  Synthetic polypeptide
VWLFLNKVNTRKTNS

SEQ ID NO: 37071 - protein, 7 aa, Artificial Sequence
  Synthetic polypeptide
FGYFLTR

SEQ ID NO: 37072 - protein, 287 aa, Artificial Sequence
  Synthetic polypeptide
QGEYKKDELLEAARSGNEEKLMALLTPLNVNCHASDGRKSTPLHLAAGYNRVRIVQLLLQHGADVHAKDKGGLVPLHNACSYGHYEVTELLLKHGACVNAMDLWQFTPLHEAASKNRVEVCSLLLSHGADPTLVNCHGKSAVDMAPTPELRERLTYEFKGHSLLQAAREADLAKVKKTLALEIINFKQPQSHETALHCAVASLHPKRKQVTELLLRKGANVNEKNKDFMTPLHVAAERAHNDVMEVLHKHGAKVRHTPEQSARLSTEQPAALNTASLSPIFLKKLIL

SEQ ID NO: 37073 - protein, 997 aa, Artificial Sequence
  Synthetic polypeptide
QGEYKKDELLEAARSGNEEKLMALLTPLNVNCHASDGRKSTPLHLAAGYNRVRIVQLLLQHGADVHAKDKGGLVPLHNACSYGHYEVTELLLKHGACVNAMDLWQFTPLHEAASKNRVEVCSLLLSHGADPTLVNCHGKSAVDMAPTPELRERLTYEFKGHSLLQAAREADLAKVKKTLALEIINFKQPQSHETALHCAVASLHPKRKQVTELLLRKGANVNEKNKDFMTPLHVAAERAHNDVMEVLHKHGAKMNALDTLGQTALHRAALAGHLQTCRLLLSYGSDPSIISLQGFTAAQMGNEAVQQILSESTPIRTSDVDYRLLEASKAGDLETVKQLCSSQNVNCRDLEGRHSTPLHFAAGYNRVSVVEYLLHHGADVHAKDKGGLVPLHNACSYGHYEVAELLVRHGASVNVADLWKFTPLHEAAAKGKYEICKLLLKHGADPTKKNRDGNTPLDLVKEGDTDIQDLLRGDAALLDAAKKGCLARVQKLCTPENINCRDTQGRNSTPLHLAAGYNNLEVAEYLLEHGADVNAQDKGGLIPLHNAASYGHVDIAALLIKYNTCVNATDKWAFTPLHEAAQKGRTQLCALLLAHGADPTMKNQEGQTPLDLATADDIRALLIDAMPPEALPTCFKPQATVVSASLISPASTPSCLSAASSIDNLTGPLAELAVGGASNAGDGAAGTERKEGEVAGLDMNISQFLKSLGLEHLRDIFETEQITLDVLADMGHEELKEIGINAYGHRHKLIKGVERLLGGQQGTNPYLTFHCVNQGTILLDLAPEDKEYQSVEEEMQSTIREHRDGGNAGGIFNRYNVIRIQKVVNKKLRERFCHRQKEVSEENHNHHNERMLFHGSPFINAIIHKGFDERHAYIGGMFGAGIYFAENSSKSNQYVYGIGGGTGCPTHKDRSCYICHRQMLFCRVTLGKSFLQFSTMKMAHAPPGHHSVIGRPSVNGLAYAEYVIYRGEQAYPEYLITYQIMKPEAPSQTATAAEQKT

SEQ ID NO: 37074 - protein, 896 aa, Artificial Sequence
  Synthetic polypeptide
GWAQWLMPIIPAPWEAEAGGSLELRTSRPAWGVAINNTFLPSQNDLRICSLNLPSEESTREINNRDNCSGKYCFEAPTLATLDPPHTVHSAPKEVAVSKEQEEKSDSLVKYFSVVWCKPSKKKHKKWEGDAVLIVKGKSFILKNLEGKDIGRGIGYKFKELEKIEEGQTLMICGKEIEVMGVISPDDFSSGRCFQLGGGSTAISHSSQVARKCFSNPFKSVCKPSSKENRQNDFQNCKPRHDPYTPNSLVMPRPDKNHQWVFNKNCFPLVDVVIDPYLVYHLRPHQKEGIIFLYECVMGMRMNGRCGAILADEMGLGKTLQCISLIWTLQCQGPYGGKPVIKKTLIVTPGSLVNNWKKEFQKWLGSERIKIFTVDQDHKVEEFIKSIFYSVLIISYEMLLRSLDQIKNIKFDLLICDEGHRLKNSAIKTTTALISLSCEKRIILTGTPIQNDLQEFFALIDFVNPGILGSLSSYRKIYEEPIILSREPSASEEEKELGERRAAELTCLTGLFILRRTQEIINKYLPPKIENVVFCRPGALQIELYRKLLNSQVVRFCLQGLLENSPHLICIGALKKLCNHPCLLFNSIKEKECSSTCDKNEEKSLYKGLLSVFPADYNPLLFTEKESGKLQVLSKLLAVIHELRPTEKVVLVSNYTQTLNILQEVCKRHGYAYTRLDGQTPISQRQQIVDGFNSQHSSFFIFLLSSKAGGVGLNLIGGSHLILYDIDWNPATDIQAMSRVWRDGQKYPVHIYRLLTTGTIEEKIYQRQISKQGLCGAVVDLTKTSEHIQFSVEELKNLFTLHESSDCVTHDLLDCECTGEEVHTGDSLEKFIVSRDCQLGPHHQKSNSLKPLSMSQLKQWKHFSGDHLNLTDPFLERITENVSFIFQNITTQATGT

SEQ ID NO: 37075 - protein, 26 aa, Artificial Sequence
  Synthetic polypeptide
GRQDLPGVLQLITPFSRHKMILEYAV

SEQ ID NO: 37076 - protein, 12 aa, Artificial Sequence
  Synthetic polypeptide
AKDVKTCLGCCN

SEQ ID NO: 37077 - protein, 107 aa, Artificial Sequence
  Synthetic polypeptide
GWAQWLMPIIPAPWEAEAGGSLELRTSRPAWGVAINNTFLPSQNDLRICSLNLPSEESTREINNRDNCSGKYCFEAPTLATLDPPHTVQTWMRRHRLVPVHYSSFGS

SEQ ID NO: 37078 - protein, 111 aa, Artificial Sequence
  Synthetic polypeptide
GWAQWLMPIIPAPWEAEAGGSLELRTSRPAWGVAINNTFLPSQNDLRICSLNLPSEESTREINNRDNCSGKYCFEAPTLATLDPPHTVHSAPKEVAVSKEQEEKSDSLVKY

SEQ ID NO: 37079 - protein, 103 aa, Artificial Sequence
  Synthetic polypeptide
GWAQWLMPIIPAPWEAEAGGSLELRTSRPAWGVAINNTFLPSQNDLRICSLNLPSEESTREINNRDNCSGKYCFEAPTLATLDPPHTVQTWMRRHRLVPVHYR

SEQ ID NO: 37080 - protein, 63 aa, Artificial Sequence
  Synthetic polypeptide
ARPVSSLLHISSSCCSYSYRSCHLPALCDFESTSTAALHSVLPSRHSALHELHSVLSQPPRFA

SEQ ID NO: 37081 - protein, 114 aa, Artificial Sequence
  Synthetic polypeptide
PGLSPPSYTFPAPAAVIPTEAAIYQPSVILNPRALQPSTAYYPAGTQLFMNYTAYYPSPPGSPNSLGYFPTAANLSGVPPQPGTVVRMQGLAYNTGVKEILNFFQGYQCLKDVW

SEQ ID NO: 37082 - protein, 27 aa, Artificial Sequence
  Synthetic polypeptide
QACLLPPTHFQLLLQLFLQKLPFTSPL

SEQ ID NO: 37083 - protein, 132 aa, Artificial Sequence
  Synthetic polypeptide
PGLSPPSYTFPAPAAVIPTEAAIYQPSVILNPRALQPSTAYYPAGTQLFMNYTAYYPSPPGSPNSLGYFPTAANLSGVPPQPGTVVRMQGLAYNTGVKEILNFFQGYQYATEDGLIHTNDQARTLPKEWVCI

SEQ ID NO: 37084 - protein, 60 aa, Artificial Sequence
  Synthetic polypeptide
ARPVSSLLHISSSCCSYSYRSCHLPALCDFESTSTAALHSVLPSRHSALHELHSVLSQCL

SEQ ID NO: 37085 - protein, 59 aa, Artificial Sequence
  Synthetic polypeptide
PGLSPPSYTFPAPAAVIPTEAAIYQPSVILNPRALQPSTAYYPAGTQLFMNYTAYYPSV

SEQ ID NO: 37086 - protein, 82 aa, Artificial Sequence
  Synthetic polypeptide
ARPVSSLLHISSSCCSYSYRSCHLPALCDFESTSTAALHSVLPSRHSALHELHSVLSQYATEDGLIHTNDQARTLPKEWVCI

SEQ ID NO: 37087 - protein, 87 aa, Artificial Sequence
  Synthetic polypeptide
PGLSPPSYTFPAPAAVIPTEAAIYQPSVILNPRALQPSTAYYPAGTQLFMNYTAYYPSMQPRMDLYTQMTRPGLYPKNGFVFKGPSS

SEQ ID NO: 37088 - protein, 21 aa, Artificial Sequence
  Synthetic polypeptide
VRWLKPVIPTLWEVEAGGSRG

SEQ ID NO: 37089 - protein, 19 aa, Artificial Sequence
  Synthetic polypeptide
SQHFGRSRQVDHEGRYNKN

SEQ ID NO: 37090 - protein, 539 aa, Artificial Sequence
  Synthetic polypeptide
AVAQACNPNTLGGRGRWITRVDTTRIEYSIPLRENWALPYFACQIAALTGYLKSNLNTYGERFCYLLMSASTYTFMMMWEYSHYLLFLQAISLFLLDTFSVEQSDKVYEVYKIYIFSLFLGYLLQFENPALLVSPLLSLVAALMLAKCLQLNVKKGSFVAKIIKVINFYLVCTLTITLNIIMKMFVPHKENGHMLKFLEVKFGLNMTKNFTMNWLLCQESLQAPSQDFFLRLTQSSLLPFYILVLIICFLSMLQVIFRRINGKSLKETVTLEDGRIGERPEIIYHVIHTILLGSLAMVIEGLKYIWIPYVCMLAAFGVCSPELWMTLFKWLRLRTVHPILLALILSMAVPTIIGLSLWKEFFPRLMTELMELQEFYDPDTVELMTWIKRQAPVAAVFAGSPQLMGAIKLCTGWMVTSLPLYNDDDLLKRNENIYQIYSKRSAEDIYKILTSYKANYLIVEDAICNEVGPMRGCRVKDLLDIANGHMVCEEGDKLTYSKYGRFCHEVKINYSPYVNYFTRVYWNRSYFVYKINTVISFQS

SEQ ID NO: 37091 - protein, 248 aa, Artificial Sequence
  Synthetic polypeptide
AVAQACNPNTLGGRGRWITRVDTTRIEYSIPLRENWALPYFACQIAALTGYLKSNLNTYGERFCYLLMSASTYTFMMMWEYSHYLLFLQAISLFLLDTFSVEQSDKLNVKKGSFVAKIIKVINFYLVCTLTITLNIIMKMFVPHKENGHMLKFLEVKFGLNMTKNFTMNWLLCQESLQAPSQDFFLRLTQSSLLPFYILVLIICFLSMLQVIFRRINGKSLKETVTLEDGRIGERPEIIYHVIHTILL

SEQ ID NO: 37092 - protein, 446 aa, Artificial Sequence
  Synthetic polypeptide
SQHFGRLRRADHKVYEVYKIYIFSLFLGYLLQFENPALLVSPLLSLVAALMLAKCLQLNVKKGSFVAKIIKVINFYLVCTLTITLNIIMKMFVPHKENGHMLKFLEVKFGLNMTKNFTMNWLLCQESLQAPSQDFFLRLTQSSLLPFYILVLIICFLSMLQVIFRRINGKSLKETVTLEDGRIGERPEIIYHVIHTILLGSLAMVIEGLKYIWIPYVCMLAAFGVCSPELWMTLFKWLRLRTVHPILLALILSMAVPTIIGLSLWKEFFPRLMTELMELQEFYDPDTVELMTWIKRQAPVAAVFAGSPQLMGAIKLCTGWMVTSLPLYNDDDLLKRNENIYQIYSKRSAEDIYKILTSYKANYLIVEDAICNEVGPMRGCRVKDLLDIANGHMVCEEGDKLTYSKYGRFCHEVKINYSPYVNYFTRVYWNRSYFVYKINTVISFQS

SEQ ID NO: 37093 - protein, 36 aa, Artificial Sequence
  Synthetic polypeptide
GGQITRFMKFIKSTYFPSFWDIYYSLRIQLCWYLLY

SEQ ID NO: 37094 - protein, 23 aa, Artificial Sequence
  Synthetic polypeptide
PGVWLTPVIPALWEAEAGRSQGL

SEQ ID NO: 37095 - protein, 27 aa, Artificial Sequence
  Synthetic polypeptide
MGAVAHTCNLSTLGGQGEWITRYVQDQ

SEQ ID NO: 37096 - protein, 63 aa, Artificial Sequence
  Synthetic polypeptide
WVQWLTPVISALWEAKASGSQGMFKISKFRKSFRVFERKHGCFSKECVSGVGRSAVCFHDFFT

SEQ ID NO: 37097 - protein, 588 aa, Artificial Sequence
  Synthetic polypeptide
SQHFGRPRRVDHKVCSRSVNLEKASESLKGNMAAFLKNVCLGLEDLQYVFMISSHELFITLLKDEERKLLVDQMRKRSPRVNLCIKPVTSFYDIPASASVNIGQLEHQLILSVDPWRIRQILIELHGMTSERQFWTVSNKWEVPSVYSGVILGIKDNLTRDLVYILMAKGLHCSTVKDFSHAKQLFAACLELVTEFSPKLRQVMLNEMLLLDIHTHEAGTGQAGERPPSDLISRVRGYLEMRLPDIPLRQVIAEECVAFMLNWRENEYLTLQVPAFLLQSNPYVKLGQLLAATCKELPGPKESRRTAKDLWEVVVQICSVSSQHKRGNDGRVSLIKQRESTLGIMYRSELLSFIKKLREPLVLTIILSLFVKLHNVREDIVNDITAEHISIWPSSIPNLQSVDFEAVAITVKELVRYTLSINPNNHSWLIIQADIYFATNQYSAALHYYLQAGAVCSDFFNKAVPPDVYTDQVIKRMIKCCSLLNCHTQVAILCQFLREIDYKTAFKSLQEQNSHDAMDSYYDYIWDVTILEYLTYLHHKRGETDKRQIAIKAIGQTELNASNPEEVLQLAAQRRKKKFLQAMAKLYF

SEQ ID NO: 37098 - protein, 571 aa, Artificial Sequence
  Synthetic polypeptide
SQHFGRPRRVDHKVCSRSVNLEKASESLKGNMAAFLKNVCLGLEDLQYVFMISSHELFITLLKDEERKLLVDQMRKRSPRVNLCIKPVTSFYDIPASASVNIGQLEHQLILSVDPWRIRQILIELHGMTSERQFWTVSNKWEVPSVYSGVILGIKDNLTRDLVYILMAKGLHCSTVKDFSHAKQLFAACLELVTEFSPKLRQVMLNEMLLLDIHTHEAGTGQAGERPPSDLISRVRGYLEMRLPDIPLRQVIAEECVAFMLNWRENEYLTLQVPAFLLQSNPYVKLGQLLAATCKELPGPKESRRTAKDLWEVVVQICSVSSQHKRGNDGRVSLIKQRESTLGIMYRSELLSFIKKLREPLVLTIILSLFVKLHNVREDIVNDITAEHISIWPSSIPNLQSVDFEAVAITVKELVRYTLSINPNNHSWLIIQADIYFATNQYSAALHYYLQAGAVCSDFFNKAVPPDVYTDQVAILCQFLREIDYKTAFKSLQEQNSHDAMDSYYDYIWDVTILEYLTYLHHKRGETDKRQIAIKAIGQTELNASNPEEVLQLAAQRRKKKFLQAMAKLYF

SEQ ID NO: 37099 - protein, 351 aa, Artificial Sequence
  Synthetic polypeptide
SQHFGRPRRVDHKVCSRSVNLEKASESLKGNMAAFLKNVCLGLEDLQYVFMISSHELFITLLKDEERKLLVDQMRKRSPRVNLCIKPVTSFYDIPASASVNIGQLEHQLILSVDPWRIRQILIELHGMTSERQFWTVSNKWEVPSVYSGVILGIKDNLTRDLVYILMAKGLHCSTVKDFSHAKQLFAACLELVTEFSPKLRQVMLNEMLLLDIHTHEAGTGQAGERPPSDLISRVRGYLEMRLPDIPLRQVIAEECVAFMLNWRENEYLTLQVPAFLLQSNPYVKLGQLLAATCKELPGPKESRRTAKDLWEVVVQICSVSSQHKRGNDGRVSLIKQRESTLGIMYRYVLE

SEQ ID NO: 37100 - protein, 71 aa, Artificial Sequence
  Synthetic polypeptide
MGAVAHTCNLSTLGGQGEWITRSGVQDQPGMFKISKFRKSFRVFERKHGCFSKECVSGVGRSAVCFHDFFT

SEQ ID NO: 37101 - protein, 604 aa, Artificial Sequence
  Synthetic polypeptide
WVQWLTPVISALWEAKASGSQGQEFKTSLVCSRSVNLEKASESLKGNMAAFLKNVCLGLEDLQYVFMISSHELFITLLKDEERKLLVDQMRKRSPRVNLCIKPVTSFYDIPASASVNIGQLEHQLILSVDPWRIRQILIELHGMTSERQFWTVSNKWEVPSVYSGVILGIKDNLTRDLVYILMAKGLHCSTVKDFSHAKQLFAACLELVTEFSPKLRQVMLNEMLLLDIHTHEAGTGQAGERPPSDLISRVRGYLEMRLPDIPLRQVIAEECVAFMLNWRENEYLTLQVPAFLLQSNPYVKLGQLLAATCKELPGPKESRRTAKDLWEVVVQICSVSSQHKRGNDGRVSLIKQRESTLGIMYRSELLSFIKKLREPLVLTIILSLFVKLHNVREDIVNDITAEHISIWPSSIPNLQSVDFEAVAITVKELVRYTLSINPNNHSWLIIQADIYFATNQYSAALHYYLQAGAVCSDFFNKAVPPDVYTDQVIKRMIKCCSLLNCHTQVAILCQFLREIDYKTAFKSLQEQNSHDAMDSYYDYIWDVTILEYLTYLHHKRGETDKRQIAIKAIGQTELNASNPEEVLQLAAQRRKKKFLQAMAKLYF

SEQ ID NO: 37102 - protein, 26 aa, Artificial Sequence
  Synthetic polypeptide
SQHFGRPRRVDHKVRSSRPAWYVQDQ

SEQ ID NO: 37103 - protein, 587 aa, Artificial Sequence
  Synthetic polypeptide
WVQWLTPVISALWEAKASGSQGQEFKTSLVCSRSVNLEKASESLKGNMAAFLKNVCLGLEDLQYVFMISSHELFITLLKDEERKLLVDQMRKRSPRVNLCIKPVTSFYDIPASASVNIGQLEHQLILSVDPWRIRQILIELHGMTSERQFWTVSNKWEVPSVYSGVILGIKDNLTRDLVYILMAKGLHCSTVKDFSHAKQLFAACLELVTEFSPKLRQVMLNEMLLLDIHTHEAGTGQAGERPPSDLISRVRGYLEMRLPDIPLRQVIAEECVAFMLNWRENEYLTLQVPAFLLQSNPYVKLGQLLAATCKELPGPKESRRTAKDLWEVVVQICSVSSQHKRGNDGRVSLIKQRESTLGIMYRSELLSFIKKLREPLVLTIILSLFVKLHNVREDIVNDITAEHISIWPSSIPNLQSVDFEAVAITVKELVRYTLSINPNNHSWLIIQADIYFATNQYSAALHYYLQAGAVCSDFFNKAVPPDVYTDQVAILCQFLREIDYKTAFKSLQEQNSHDAMDSYYDYIWDVTILEYLTYLHHKRGETDKRQIAIKAIGQTELNASNPEEVLQLAAQRRKKKFLQAMAKLYF

SEQ ID NO: 37104 - protein, 367 aa, Artificial Sequence
  Synthetic polypeptide
WVQWLTPVISALWEAKASGSQGQEFKTSLVCSRSVNLEKASESLKGNMAAFLKNVCLGLEDLQYVFMISSHELFITLLKDEERKLLVDQMRKRSPRVNLCIKPVTSFYDIPASASVNIGQLEHQLILSVDPWRIRQILIELHGMTSERQFWTVSNKWEVPSVYSGVILGIKDNLTRDLVYILMAKGLHCSTVKDFSHAKQLFAACLELVTEFSPKLRQVMLNEMLLLDIHTHEAGTGQAGERPPSDLISRVRGYLEMRLPDIPLRQVIAEECVAFMLNWRENEYLTLQVPAFLLQSNPYVKLGQLLAATCKELPGPKESRRTAKDLWEVVVQICSVSSQHKRGNDGRVSLIKQRESTLGIMYRYVLE

SEQ ID NO: 37105 - protein, 309 aa, Artificial Sequence
  Synthetic polypeptide
GQARWLTPVIPALWEAKTGRSRGQEIETILANTITLDVLADMGHEELKEIGINAYGHRHKLIKGVERLLGGQQGTNPYLTFHCVNQGTILLDLAPEDKEYQSVEEEMQSTIREHRDGGNAGGIFNRYNVIRIQKVVNKKLRERFCHRQKEVSEENHNHHNERMLFHGSPFINAIIHKGFDERHAYIGGMFGAGIYFAENSSKSNQYVYGIGGGTGCPTHKDRSCYICHRQMLFCRVTLGKSFLQFSTMKMAHAPPGHHSVIGRPSVNGLAYAEYVIYRGEQAYPEYLITYQIMKPEAPSQTATAAEQKT

SEQ ID NO: 37106 - protein, 26 aa, Artificial Sequence
  Synthetic polypeptide
SQHFGRPRRADHEVRRSRPSWLTRLH

SEQ ID NO: 37107 - protein, 8 aa, Artificial Sequence
  Synthetic polypeptide
HDYTRCVG

SEQ ID NO: 37108 - protein, 35 aa, Artificial Sequence
  Synthetic polypeptide
LTLTLGGITSFQHQASGWMVFENGITMLQDSINWG

SEQ ID NO: 37109 - protein, 28 aa, Artificial Sequence
  Synthetic polypeptide
PWVGSLLFSIRQVAGWYSKMVLQCCRIQ

SEQ ID NO: 37110 - protein, 122 aa, Artificial Sequence
  Synthetic polypeptide
TRSQLPLANSDLGWDHFFSASGKWLDGIRKWYYNAAGFNKLGLMRDDTIYEDEDVKEAIRRLPENLYNDRMFRIKRALDLNLKHQILPKEQWTKYEEENFYLEPYLKEVIRERKEREEWAKK

SEQ ID NO: 37111 - protein, 172 aa, Artificial Sequence
  Synthetic polypeptide
TRSQLPLANSDLGWDHFFSASGKWLDGIRKWYYNAAGFNKLGLMRDDTIYEDEDVKEAIRRLPENLYNDRMFRIKRALDLNLKHQILPKEQWTKYEEVFAVPALHSASYLDEKISPLSVPPDPKKSFCEANSHPLNCIETRQRPVDIHFFFFPKRLPPHNLSKQLITPSPQI

SEQ ID NO: 37112 - protein, 151 aa, Artificial Sequence
  Synthetic polypeptide
TRSQLPLANSDLGWDHFFSASGKWLDGIRKWYYNAAGFNKLGLMRDDTIYEDEDVKEAIRRLPENLYNDRMFRIKRALDLNLKHQILPKEQWTKYEEVFAVPALHSASYLDEKISPLSVPPDPKKSFCEANSHPLNCIETRQRKISTLNRI

SEQ ID NO: 37113 - protein, 37 aa, Artificial Sequence
  Synthetic polypeptide
LRSVHSTSSSLMANGFWTQCALLPVPGIPTLPEFRAG

SEQ ID NO: 37114 - protein, 31 aa, Artificial Sequence
  Synthetic polypeptide
KVRSLDLIQPYGEWFLDSVCSTSCSWYSYSS

SEQ ID NO: 37115 - protein, 27 aa, Artificial Sequence
  Synthetic polypeptide
AEITPWQSSLGNKSETPSQKKAKWADC

SEQ ID NO: 37116 - protein, 498 aa, Artificial Sequence
  Synthetic polypeptide
SQLLRRLRQENHLNLGGRGCSEPRSHLGSPAWATRAKLRLKKKPNGRTVEVAEGEAVRTPQSVTAKQPPEIDKKNEKSKKNKKKSKSDAKAVQNSSRHDGKEVDEGAWETKISHREKRQQRKRDKVLTDSGSLDSTIPGIENTITVTTEQLTTASFPVGSKKNKGDSHLNVQVSNFKSGKGDSTLQVSSGLNENLTVNGGGWNEKSVKLSSQISAGEEKWNSVSPASAGKRKTEPSAWSQDTGDANTNGKDWGRSWSDRSIFSGIGSTAEPVSQSTTSDYQWDVSRNQPYIDDEWSGLNGLSSADPNSDWNAPAEEWGNWVDEERASLLKSQEPIPDDQKVSDDDKEKGEGALPTGKSKKKKKKKKKQGEDNSTAQDTEELEKEIREDLPVNTSKTRPKQEKAFSLKTISTSDPAEVLVKNSQPIKTLPPATSTEPSVILSKSDSDKSSSQVPPILQETDKSKSNTKQNSVPPSQTKSETSWESPKQIKKKKKARRET

SEQ ID NO: 37117 - protein, 49 aa, Artificial Sequence
  Synthetic polypeptide
TWEAEVAVSRDHTLAVQPGQQERNSVSKKSQMGGLLKWLRVKLFEHLKV

SEQ ID NO: 37118 - protein, 465 aa, Artificial Sequence
  Synthetic polypeptide
SQLLRRLRQENHLNLGGRGCSEPRSHLGSPAWATRAKLRLKKKPNGRTVEVAEGEAVRTPQSVTAKQPPEIDKKNEKSKKNKKKSKSDAKAVQNSSRHDGKEVDEGAWETKISHREKRQQRKRDKVLTDSGSLDSTIPGIENTITVTTEQLTTASFPVGSKKNKGDSHLNVQVSNFKSGKGDSTLQVSSGLNENLTVNGGGWNEKSVKLSSQISAGEEKWNSVSPASAGKRKTEPSAWSQDTGDANTNGKDWGRSWSDRSIFSGIDGLSSADPNSDWNAPAEEWGNWVDEERASLLKSQEPIPDDQKVSDDDKEKGEGALPTGKSKKKKKKKKKQGEDNSTAQDTEELEKEIREDLPVNTSKTRPKQEKAFSLKTISTSDPAEVLVKNSQPIKTLPPATSTEPSVILSKSDSDKSSSQVPPILQETDKSKSNTKQNSVPPSQTKSETSWESPKQIKKKKKARRET

SEQ ID NO: 37119 - protein, 235 aa, Artificial Sequence
  Synthetic polypeptide
SQLLRRLRQENHLNLGGRGCSEPRSHLGSPAWATRAKLRLKKKPNGRTVEVAEGEAVRTPQSVTAKQPPEIDKKNEKSKKNKKKSKSDAKAVQNSSRHDGKEVDEGAWETKISHREKRQQRKRDKVLTDSGSLDSTIPGIENTITVTTEQLTTASFPVGSKKNKVSSGLNENLTVNGGGWNEKSVKLSSQISAGEEKWNSVSPASAGKRKTEPSAWSQDTGDANTNGKDWGRSWS

SEQ ID NO: 37120 - protein, 174 aa, Artificial Sequence
  Synthetic polypeptide
EVPFTLCHDSEASPAMWNYMCIAIAISLLMILICAMATYGAYKQRAAWIIPFFCYQIFDFALNMLVAITVLIYPNSIQEYIRQLPPNFPYRDDVMSVNPTCLVLIILLFISIILTFKGYLISCVWNCYRYINGRNSSDVLVYVTSNDTTVLLPPYDDATVNGAAKEPPPPYVSA

SEQ ID NO: 37121 - protein, 44 aa, Artificial Sequence
  Synthetic polypeptide
SLLLFLHSVLSPPCKKSLSPFAMILRPPQPCGTTCALPLRFLFS

SEQ ID NO: 37122 - protein, 47 aa, Artificial Sequence
  Synthetic polypeptide
GLPSHVELHVHCHCDFSSHDPDMCYGYLRSVQATRSLDHPILLLPDL

SEQ ID NO: 37123 - protein, 92 aa, Artificial Sequence
  Synthetic polypeptide
EVPFTLCHDSEASPAMWNYMCIAIAISLLMILICAMATYGAYKQRAAWIIPFFCYQIFDFALNMLVAITVLIYPNSIQEYIRQLPPNFPYRD

SEQ ID NO: 37124 - protein, 66 aa, Artificial Sequence
  Synthetic polypeptide
IGGDTIKCTVGSWIRFWKRKRTLKGNRHVHCHCDFSSHDPDMCYGYLRSVQATRSLDHPILLLPDL

SEQ ID NO: 37125 - protein, 159 aa, Artificial Sequence
  Synthetic polypeptide
RGTDMCIAIAISLLMILICAMATYGAYKQRAAWIIPFFCYQIFDFALNMLVAITVLIYPNSIQEYIRQLPPNFPYRDDVMSVNPTCLVLIILLFISIILTFKGYLISCVWNCYRYINGRNSSDVLVYVTSNDTTVLLPPYDDATVNGAAKEPPPPYVSA

SEQ ID NO: 37126 - protein, 23 aa, Artificial Sequence
  Synthetic polypeptide
ILEKKKDIEGEQTCALPLRFLFS

SEQ ID NO: 37127 - protein, 77 aa, Artificial Sequence
  Synthetic polypeptide
RGTDMCIAIAISLLMILICAMATYGAYKQRAAWIIPFFCYQIFDFALNMLVAITVLIYPNSIQEYIRQLPPNFPYRD

SEQ ID NO: 37128 - protein, 36 aa, Artificial Sequence
  Synthetic polypeptide
IVGSRKHRSCLSLLWHLQCLASAWCTTPSCKTAQLR

SEQ ID NO: 37129 - protein, 344 aa, Artificial Sequence
  Synthetic polypeptide
PVPGAQRPPAKRPNYVKLGTLAPFCCPWEQLTQDWESRVQAYEEPSVASSPNGKESDLRRSEVPCAPMPKKTHQPSDEVGTSIEHPREAEEVMDAGCQESAGPERITDQEASENHVAATGSHLCVLRSRKLLKQLSAWCGPSSEDSRGGRRAPGRGQQGLTREACLSILGHFPRALVWVSLSLLSKGSPEPHTMICVPAKEDFLQLHEDWHYCGPQESKHSDPFRSKILKQKEKKKREKRQKPGRASSDGPAGEEPVAGQEALTLGLWSGPLPRVTLHCSRTLLGFVTQGDFSMAVGCGEALGFVSLTGLLDMLSSQPAAQRGLVLLRPPASLQYRFARIAIEV

SEQ ID NO: 37130 - protein, 55 aa, Artificial Sequence
  Synthetic polypeptide
CCPLNCRLPEAQKLSLFIVAFAVSSQCLVHNALLQNGPTTLSLALWHLSAVPGSS

SEQ ID NO: 37131 - protein, 59 aa, Artificial Sequence
  Synthetic polypeptide
EPKLRYDTGICRNIFTGELCSKYNSGNLSKNSTVLPCRMAVPDLCDFRNINFLHSPVFL

SEQ ID NO: 37132 - protein, 268 aa, Artificial Sequence
  Synthetic polypeptide
KPLPIVLPAGTANFTSIYTRKKHLRKNQNSGTTLAFAGTYLLVNFAPNITQAISARTVQYYLVGWQFLIYVILEILIFCILLYFYKRKGMKHMVILLTLVAILASLTVISVKAVSGMITFSVMDKMQLTYPIFYIMFIIMIASCVFQVKFLNQATKLYNTTTVVPVNHIFFTISAIIAGIIFYQEFLGAPFLTVFIYLFGCFLSFLGVFLVTRNREKEHLQQSYIDFGNIPGKQMLDKIQPDSHSLSYGTLPDGSDSTKSQSGEKKEV

SEQ ID NO: 37133 - protein, 51 aa, Artificial Sequence
  Synthetic polypeptide
GSGARWLNRSLYQSSSLQEQQILQVSTHEKSTFVRTKTQVRHWHLQEHIYW

SEQ ID NO: 37134 - protein, 253 aa, Artificial Sequence
  Synthetic polypeptide
KPLPIVLPAGTANFTSIYTRKKHLRKNQNSGTTLAFAGTYLLVNFAPNITQAISARTVQYYLVGWQFLIYVILEILIFCILLYFYKRKGMKHMVILLTLVAILASLTVISVKAVSGMITFSVMDKMQLTYPIFYIMFIIMIASCVFQVKFLNQATKLYNTTTVVPVNHIFFTISAIIAGIIFYQEFLGAPFLTVFIYLFGCFLSFLGVFLVTRNREKEHLQQSYIDFGNIPDTTPERKAWRETNVGQNTTRFT

SEQ ID NO: 37135 - protein, 3 aa, Artificial Sequence
  Synthetic polypeptide
NES

SEQ ID NO: 37136 - protein, 100 aa, Artificial Sequence
  Synthetic polypeptide
EFCIQQNCSINEGEINSFSDKQMLREFVTTRASLREMLKGVLNHETKVEKSKFRRTTDAVKSTGPHDGTGDRRTSSEIHCEKTAHSGCDGCKEKKAAKLL

SEQ ID NO: 37137 - protein, 57 aa, Artificial Sequence
  Synthetic polypeptide
IMKRKLKNLSLEELQMRLKALDPMMEREIEELRQRYTAKRQPILDAMDAKKRRQQNF

SEQ ID NO: 37138 - protein, 417 aa, Artificial Sequence
  Synthetic polypeptide
HFPLHPLSRCAMRIRCLLPLCPSVMIVSLHGLPSHASCTACGTLIEDEIATILKSTLKGLEYLHFMRKIHRDIKAGNILLNTEGHAKLADFGVAGQLTDTMAKRNTVIGTPFWMAPEVIQEIGYNCVADIWSLGITSIEMAEGKPPYADIHPMRAIFMIPTNPPPTFRKPELWSDDFTDFVKKCLVKNPEQRATATQLLQHPFIKNAKPVSILRDLITEAMEIKAKRHEEQQRELEEEEENSDEDELDSHTMVKTSVESVGTMRATSTMSEGAQTMIEHNSTMLESDLGTMVINSEDEEEEDGTMKRNATSPQVQRPSFMDYFDKQDFKNKSHENCNQNMHEPFPMSKNVFPDNWKVPQDGDFDFLKNLSLEELQMRLKALDPMMEREIEELRQRYTAKRQPILDAMDAKKRRQQNF

SEQ ID NO: 37139 - protein, 16 aa, Artificial Sequence
  Synthetic polypeptide
VSMASPAMPPVQPVEL

SEQ ID NO: 37140 - protein, 50 aa, Artificial Sequence
  Synthetic polypeptide
ECVALPPSSSLPLCHENSVFASPLPFRHDCESPWPPQPCLLYSLWNFNRR

SEQ ID NO: 37141 - protein, 41 aa, Artificial Sequence
  Synthetic polypeptide
GQAQRLMPVIPSLLEAKSVHTVEPAGTSINSALLPSAASSF

SEQ ID NO: 37142 - protein, 19 aa, Artificial Sequence
  Synthetic polypeptide
SHHFWRPRVFILWSPLGPV

SEQ ID NO: 37143 - protein, 115 aa, Artificial Sequence
  Synthetic polypeptide
SGTEAHACNPITFGGQECSYCGARWDQYKLCSTPQCRQLVLTCPACQGQGFTACCVTCQDKGSRKVSGPMQDSFKEECECTARRPRIPRELLQHVRQPVSPEPGPDADEDGPVLM

SEQ ID NO: 37144 - protein, 22 aa, Artificial Sequence
  Synthetic polypeptide
CDFGFENLSWTIANQMMEKLRA

SEQ ID NO: 37145 - protein, 15 aa, Artificial Sequence
  Synthetic polypeptide
VTLGSRTCLGQLQIK

SEQ ID NO: 37146 - protein, 235 aa, Artificial Sequence
  Synthetic polypeptide
LWVRELVLDNCKSNDGKIEGLTAEFVNLEFLSLINVGLISVSNLPKLPKLKKLELSENRIFGGLDMLAEKLPNLTHLNLSGNKLKDISTLEPLKKLECLKSLDLFNCEVTNLNDYRESVFKLLPQLTYLDGYDREDQEAPDSDAEVDGVDEEEEDEEGEDEEDEDDEDGEEEEFDEEDDEDEDVEGDEDDDEVSEEEEEFGLDEEDEDEDEDEEEEEGGKGEKRKRETDDEGEDD

SEQ ID NO: 37147 - protein, 107 aa, Artificial Sequence
  Synthetic polypeptide
QHGNNACFCAIYFQEDVHETMLCVLRCQPAPQLQNYSSLLNDYISGKLNWSFCVVYAQMERLPWLDGFLVSLLESERSLLDEKMRKTRTMRMVKKRSLMKKMMKMKM

SEQ ID NO: 37148 - protein, 35 aa, Artificial Sequence
  Synthetic polypeptide
IGHFVSYMHRWSGCHGWTAFWFHYSSQRGRFWMRR

SEQ ID NO: 37149 - protein, 11 aa, Artificial Sequence
  Synthetic polypeptide
SLGAAGDHDGS

SEQ ID NO: 37150 - protein, 271 aa, Artificial Sequence
  Synthetic polypeptide
PPGVLSDQARYLQDPFVSIDLLEQLGIMMAVEFLHELNVPFFKVGSGDTNNFPYLEKTAKKGRPMVISSGMQSMDTMKQVYQIVKPLNPNFCFLQCTSAYPLQPEDVNLRVISEYQKLFPDIPIGYSGHETGIAISVAAVALGAKVLERHITLDKTWKGSDHSASLEPGELAELVRSVRLVERALGSPTKQLLPCEMACNEKLGKSVVAKVKIPEGTILTMDMLTVKVGEPKGYPPEDIFNLVGKKVLVTVEEDDTIMEELVDNHGKKIKS

SEQ ID NO: 37151 - protein, 282 aa, Artificial Sequence
  Synthetic polypeptide
WVYQGFLLLLLPHFLLLLPCKKCLLPPTMILRPAQPCETMAVEFLHELNVPFFKVGSGDTNNFPYLEKTAKKGRPMVISSGMQSMDTMKQVYQIVKPLNPNFCFLQCTSAYPLQPEDVNLRVISEYQKLFPDIPIGYSGHETGIAISVAAVALGAKVLERHITLDKTWKGSDHSASLEPGELAELVRSVRLVERALGSPTKQLLPCEMACNEKLGKSVVAKVKIPEGTILTMDMLTVKVGEPKGYPPEDIFNLVGKKVLVTVEEDDTIMEELVDNHGKKIKS

SEQ ID NO: 37152 - protein, 16 aa, Artificial Sequence
  Synthetic polypeptide
DLPSHVKLWQLNSCMN

SEQ ID NO: 37153 - protein, 4 aa, Artificial Sequence
  Synthetic polypeptide
NYGS

SEQ ID NO: 37154 - protein, 57 aa, Artificial Sequence
  Synthetic polypeptide
SPLHCLHDWKLPCSPYQKQMLVPGFFCLLQNYREVGPPLPKSLRAQRQRFGCQVEPF

SEQ ID NO: 37155 - protein, 508 aa, Artificial Sequence
  Synthetic polypeptide
DLIVENSLGHLPVACGTPDPPFTVCMIGSSPAVLTRSRCWCQASFASCRTTGKLDPHYPKVCGHRGNVLDVKWNPFDDFEIASCSEDATIKIWSIPKQLLTRNLTAYRKELVGHARRVGLVEWHPTAANILFSAGYDYKVMIWNLDTKESVITSPMSTISCHQDVILSMSFNTNGSLLATTCKDRKIRVIDPRAGTVLQEASYKGHRASKVLFLGNLKKLMSTGTSRWNNRQVALWDQDNLSVPLMEEDLDGSSGVLFPFYDADTSMLYVVGKGDGNIRYYEVSADKPHLSYLTEYRSYNPQKGIGVMPKRGLDVSSCEIFRFYKLITTKSLIEPISMIVPRRSESYQEDIYPPTAGAQPSLTAQEWLSGMNRDPILVSLRPGSELLRPHPLPAERPIFNSMAPASPRLLNQTEKLAAEDGWRSSSLLEEKMPRWAAEHRLEEKKTWLTNGFDVFECPPPKTENELLQMFYRQQEEIRRLRELLTQREVQAKQLELEIKNLRMGSEQL

SEQ ID NO: 37156 - protein, 73 aa, Artificial Sequence
  Synthetic polypeptide
LEAPLQSLPEADAGARLLLPPAELQGSWTPTTQKSAGTEATFWMSSGTLLMILRSPPVLKMPQLRSGASPSSC

SEQ ID NO: 37157 - protein, 21 aa, Artificial Sequence
  Synthetic polypeptide
SKTNCKHPRFKLKNDRKRIMR

SEQ ID NO: 37158 - protein, 40 aa, Artificial Sequence
  Synthetic polypeptide
QEKDYEMTWKLTGPRTASSTPRSTRSQRSGERWLRRRRPF

SEQ ID NO: 37159 - protein, 64 aa, Artificial Sequence
  Synthetic polypeptide
THKSEIGDQQKASIWNFHYLQEHLSNPHALPLTQRAHCRVLSVFLVIPSAVQEQWGLQQWHHHR

SEQ ID NO: 37160 - protein, 162 aa, Artificial Sequence
  Synthetic polypeptide
KPINQKLETSKRPPSGTSTTSKSTSPTLTPSPSPKGHTAESSVSSSSSHRQSKSSGGSSSGTITDEDELTGILKKLSLEKYQPIFEEQEVDMEAFLTLTDGDLKELGIKTDGSRQQILAAISELNAGKGRERQILQETIHNFHSSFESSASNTRAPGNSPCA

SEQ ID NO: 37161 - protein, 25 aa, Artificial Sequence
  Synthetic polypeptide
LMPVIPALWEAEAASKRSSPHQTPE

SEQ ID NO: 37162 - protein, 342 aa, Artificial Sequence
  Synthetic polypeptide
SQHFGRRRQLRNGAPLTRLPSDKLKAVIPPFLPPSSFELWSSDRSRTRHNGKADPMKTALPQRASRGHPVGGGGTDTTPVRPVKFPSLPRSPASSANSGNFNHSPHSSGGSSGVGVSRHGGELLNRSGGSIDNVLSQIAAQRKKAAGLLEQKPSHRSSPVGPAPGSSPSELPASPAGGSAPVGKQKLETSKRPPSGTSTTSKSTSPTLTPSPSPKGHTAESSVSSSSSHRQSKSSGGSSSGTITDEDELTGILKKLSLEKYQPIFEEQEVDMEAFLTLTDGDLKELGIKTDGSRQQILAAISELNAGKGRERQILQETIHNFHSSFESSASNTRAPGNSPCA

SEQ ID NO: 37163 - protein, 32 aa, Artificial Sequence
  Synthetic polypeptide
PRTVAHACNPSTLGGGGSFETELPSPDSRVTS

SEQ ID NO: 37164 - protein, 355 aa, Artificial Sequence
  Synthetic polypeptide
SQHFGRRRQLRNGAPLTRLPSDKLKAVIPPFLPPSSFELWSSDRSRTRHNGKADPMKTALPQRASRGHPVGGGGTDTTPVRPVKFPSLPRSPASSANSGNFNHSPHSSGGSSGVGVSRHGGELLNRSGGSIDNVLSQIAAQRKKAAGLLEQKPSHRSSPVGPAPGSSPSELPASPAGGSAPVGKKLETSKRPPSGTSTTSKSTSPTLTPSPSPKGHTAESSVSSSSSHRQSKSSGGSSSGTITDEDELTGILKKLSLEKYQPIFEEQEVDMEAFLTLTDGDLKELGIKTDGSRQQILAAISELNAGKGRERQILQETIHNFHSSFESSASNTRAPGNSPSMVGWVRPEETASGKR

SEQ ID NO: 37165 - protein, 341 aa, Artificial Sequence
  Synthetic polypeptide
SQHFGRRRQLRNGAPLTRLPSDKLKAVIPPFLPPSSFELWSSDRSRTRHNGKADPMKTALPQRASRGHPVGGGGTDTTPVRPVKFPSLPRSPASSANSGNFNHSPHSSGGSSGVGVSRHGGELLNRSGGSIDNVLSQIAAQRKKAAGLLEQKPSHRSSPVGPAPGSSPSELPASPAGGSAPVGKKLETSKRPPSGTSTTSKSTSPTLTPSPSPKGHTAESSVSSSSSHRQSKSSGGSSSGTITDEDELTGILKKLSLEKYQPIFEEQEVDMEAFLTLTDGDLKELGIKTDGSRQQILAAISELNAGKGRERQILQETIHNFHSSFESSASNTRAPGNSPCA

SEQ ID NO: 37166 - protein, 17 aa, Artificial Sequence
  Synthetic polypeptide
AARDEMRRKGDLIFSMH

SEQ ID NO: 37167 - protein, 13 aa, Artificial Sequence
  Synthetic polypeptide
DHCCGSLELPGTK

SEQ ID NO: 37168 - protein, 604 aa, Artificial Sequence
  Synthetic polypeptide
SCRPVHEITAVGALSCQGRNEEKRRPDIFHALKMGNFQLVKEIADEDPSHVNLVNGDGATPLMLAAVTGQLALVQLLVERHADVDKQDSVHGWTALMQATYHGNKEIVKYLLNQGADVTLRAKNGYTAFDLVMLLNDPDTELVRLLASVCMQVNKDKGRPSHQPPLPHSKVRQPWSIPVLPDDKGGLKSWWNRMSNRFRKLKLMQTLPRGLSSNQPLPFSDEPEPALDSTMRAAPQDKTSRSALPDAAPVTKDNGPGSTRGEKEDTLLTTMLRNGAPLTRLPSDKLKAVIPPFLPPSSFELWSSDRSRTRHNGKADPMKTALPQRASRGHPVGGGGTDTTPVRPVKFPSLPRSPASSANSGNFNHSPHSSGGSSGVGVSRHGGELLNRSGGSIDNVLSQIAAQRKKAAGLLEQKPSHRSSPVGPAPGSSPSELPASPAGGSAPVGKQKLETSKRPPSGTSTTSKSTSPTLTPSPSPKGHTAESSVSSSSSHRQSKSSGGSSSGTITDEDELTGILKKLSLEKYQPIFEEQEVDMEAFLTLTDGDLKELGIKTDGSRQQILAAISELNAGKGRERQILQETIHNFHSSFESSASNTRAPGNSPCA

SEQ ID NO: 37169 - protein, 603 aa, Artificial Sequence
  Synthetic polypeptide
SCRPVHEITAVGALSCQGRNEEKRRPDIFHALKMGNFQLVKEIADEDPSHVNLVNGDGATPLMLAAVTGQLALVQLLVERHADVDKQDSVHGWTALMQATYHGNKEIVKYLLNQGADVTLRAKNGYTAFDLVMLLNDPDTELVRLLASVCMQVNKDKGRPSHQPPLPHSKVRQPWSIPVLPDDKGGLKSWWNRMSNRFRKLKLMQTLPRGLSSNQPLPFSDEPEPALDSTMRAAPQDKTSRSALPDAAPVTKDNGPGSTRGEKEDTLLTTMLRNGAPLTRLPSDKLKAVIPPFLPPSSFELWSSDRSRTRHNGKADPMKTALPQRASRGHPVGGGGTDTTPVRPVKFPSLPRSPASSANSGNFNHSPHSSGGSSGVGVSRHGGELLNRSGGSIDNVLSQIAAQRKKAAGLLEQKPSHRSSPVGPAPGSSPSELPASPAGGSAPVGKKLETSKRPPSGTSTTSKSTSPTLTPSPSPKGHTAESSVSSSSSHRQSKSSGGSSSGTITDEDELTGILKKLSLEKYQPIFEEQEVDMEAFLTLTDGDLKELGIKTDGSRQQILAAISELNAGKGRERQILQETIHNFHSSFESSASNTRAPGNSPCA

SEQ ID NO: 37170 - protein, 256 aa, Artificial Sequence
  Synthetic polypeptide
GRARWLTPVIPALWEAEQLRSNIREIEKLCLKVRKDDLVLLKRMIDPVKEEASAATAEFLQLHLESVEELKKQFNDEETLLQPPLTRSMTVGGAFHTTEAEASSQSLTQIYALPEIPQDQNAAESWETLEADLIELSQLVTDFSLLVNSQQEKIDSIADHVNSAAVNVEEGTKNLGKAAKYKLAALPVAGALIGGMVGGPIGLLAGFKVAGIAAALGGGVLGFTGGKLIQRKKQKMMEKLTSSCPDLPSQTDKKCS

SEQ ID NO: 37171 - protein, 21 aa, Artificial Sequence
  Synthetic polypeptide
SQHFGRLSNSDPISEKLRNFV

SEQ ID NO: 37172 - protein, 95 aa, Artificial Sequence
  Synthetic polypeptide
GRARWLTPVIPALWEAEQLRSNIREIEKLCLKVRKDDLVLLKRMIDPVKEEASAATAEFLQLHLESVEELKKQFNDEETLLQPPLTRSMTVGGLN

SEQ ID NO: 37173 - protein, 986 aa, Artificial Sequence
  Synthetic polypeptide
ETTIIQRRETRKGNYRFMKLLLTRRANWMQKDLEEMTPLHLTTRHRSPKCLALLLKFMAPGEVDTQDKNKQTALHWSAYYNNPEHVKLLIKHDSNIGIPDVEGKIPLHWAANHKDPSAVHTVRCILDAAPTESLLNWQDYEGRTPLHFAVADGNVTVVDVLTSYESCNITSYDNLFRTPLHWAALLGHAQIVHLLLERNKSGTIPSDSQGATPLHYAAQSNFAETVKVFLKHPSVKDDSDLEGRTSFMWAAGKGSDDVLRTMLSLKSDIDINMADKYGGTALHAAALSGHVSTVKLLLENNAQVDATDVMKHTPLFRACEMGHKDVIQTLIKGGARVDLVDQDGHSLLHWAALGGNADVCQILIENKINPNVQDYAGRTPLQCAAYGGYINCMAVLMENNADPNIQDKEGRTALHWSCNNGYLDAIKLLLDFAAFPNQMENNEERYTPLDYALLGERHEVIQFMLEHGALSIAAIQDIAAFKIQAVYKGYKVRKAFRDRKNLLMKHEQLRKDAAAKKREEENKRKEAEQQKGRRSPDSCRPQALPCLPSTQDVPSRQSRAPSKQPPAGNVAQGPEPRDSRGSPGGSLGGALQKEQHVSSDLQGTNSRRPNETAREHSKGQSACVHFRPNEGSDGSRHPGVPSVEKSRGETAGDERCAKGKGFVKQPSCIRVAGPDEKGEDSRRAAASLPPHDSHWKPSRRHDTEPKAKCAPQKRRTQELRGGRCSPAGSSRPGSARGEAVHAGQNPPHHRTPRNKVTQAKLTGGLYSHLPQSTEELRSGARRLETSTLSEDFQVSKETDPAPGPLSGQSVNIDLLPVELRLQIIQRERRRKELFRKKNKAAAVIQRAWRSYQLRKHLSHLRHMKQLGAGDVDRWRQESTALLLQVWRKELELKFPQTTAVSKAPKSPSKGTSGTKSTKHSVLKQIYGCSHEGKIHHPTRSVKASSVLRLNSVSNLQCIHLLENSGRSKNFSYNLQSATQPKNKTKP

SEQ ID NO: 37174 - protein, 26 aa, Artificial Sequence
  Synthetic polypeptide
EQSAQAGSKRLQSFKEEKHVKEIIVS

SEQ ID NO: 37175 - protein, 816 aa, Artificial Sequence
  Synthetic polypeptide
ETTIIQRRETRKGNYRFMKLLLTRRANWMQKDLEEMTPLHLTTRHRSPKCLALLLKFMAPGEVDTQDKNKQTALHWSAYYNNPEHVKLLIKHDSNIGIPDVEGKIPLHWAANHKDPSAVHTVRCILDAAPTESLLNWQDYEGRTPLHFAVADGNVTVVDVLTSYESCNITSYDNLFRTPLHWAALLGHAQIVHLLLERNKSGTIPSDSQGATPLHYAAQSNFAETVKVFLKHPSVKDDSDLEGRTSFMWAAGKGSDDVLRTMLSLKSDIDINMADKYGGTALHAAALSGHVSTVKLLLENNAQVDATDVMKHTPLFRACEMGHKDVIQTLIKGGARVDLVDQDGHSLLHWAALGGNADVCQILIENKINPNVQDYAGRTPLQCAAYGGYINCMAVLMENNADPNIQDKEGRTALHWSCNNGYLDAIKLLLDFAAFPNQMENNEERYTPLDYALLGERHEVIQFMLEHGALSIAAIQDIAAFKIQAVYKGYKVRKAFRDRKNLLMKHEQLRKDAAAKKREEENKRKEAEQQKGRRSPDSCRPQALPCLPSTQDVPSRQSRAPSKQPPAGNVAQGPEPRDSRGSPGGSLGGALQKEQHVSSDLQGTNSRRPNETAREHSKGQSACVHFRPNEGSDGSRHPGVPSVEKSRELRLQIIQRERRRKELFRKKNKAAAVIQRAWRSYQLRKHLSHLRHMKQLGAGDVDRWRQESTALLLQVWRKELELKFPQTTAVSKAPKSPSKGTSGTKSTKHSVLKQIYGCSHEGKIHHPTRSVKASSVLRLNSVSNLQCIHLLENSGRSKNFSYNLQSATQPKNKTKP

SEQ ID NO: 37176 - protein, 16 aa, Artificial Sequence
  Synthetic polypeptide
ATQNTVISAFPSEVCM

SEQ ID NO: 37177 - protein, 200 aa, Artificial Sequence
  Synthetic polypeptide
FLHFHLRCVCNIDCSGYSFNPVCASDGSSYNNPCFVREASCIKQEQIDIRHLGHCTDTDDTSLLGKKDDGLQYRPDVKDASDQREDVYIGNHMPCPENLNGYCIHGKCEFIYSTQKASCRCESGYTGQHCEKTDFSILYVVPSRQKLTHVLIAAIIGAVQIAIIVAIVMCITRKCPKNNRGRRQKQNLGHFTSDTSSRMV

SEQ ID NO: 37178 - protein, 201 aa, Artificial Sequence
  Synthetic polypeptide
GVPDSGHRCVCNIDCSGYSFNPVCASDGSSYNNPCFVREASCIKQEQIDIRHLGHCTDTDDTSLLGKKDDGLQYRPDVKDASDQREDVYIGNHMPCPENLNGYCIHGKCEFIYSTQKASCRCESGYTGQHCEKTDFSILYVVPSRQKLTHVLIAAIIGAVQIAIIVAIVMCITRKCPKNNRGRRQKQNLGHFTSDTSSRMV

SEQ ID NO: 37179 - protein, 26 aa, Artificial Sequence
  Synthetic polypeptide
FLHFHLRYQVHLTRECQTVGTGVYVI

SEQ ID NO: 37180 - protein, 18 aa, Artificial Sequence
  Synthetic polypeptide
GTRFISLGSARQWAQVCM

SEQ ID NO: 37181 - protein, 1558 aa, Artificial Sequence
  Synthetic polypeptide
FWLGNLLPYSDPSVVFVFLSVFAVVTILQCFLISTLFSRANLAAACGGIIYFTLYLPYVLCVAWQDYVGFTLKIFASLLSPVAFGFGCEYFALFEEQGIGVQWDNLFESPVEEDGFNLTTSVSMMLFDTFLYGVMTWYIEAVFPGQYGIPRPWYFPCTKSYWFGEESDEKSHPGSNQKRISEICMEEEPTHLKLGVSIQNLVKVYRDGMKVAVDGLALNFYEGQITSFLGHNGAGKTTTMSILTGLFPPTSGTAYILGKDIRSEMSTIRQNLGVCPQHNVLFDMLTVEEHIWFYARLKGLSEKHVKAEMEQMALDVGLPSSKLKSKTSQLSGGMQRKLSVALAFVGGSKVVILDEPTAGVDPYSRRGIWELLLKYRQGRTIILSTHHMDEADVLGDRIAIISHGKLCCVGSSLFLKNQLGTGYYLTLVKKDVESSLSSCRNSSSTVSYLKKEDSVSQSSSDAGLGSDHESDTLTIDVSAISNLIRKHVSEARLVEDIGHELTYVLPYEAAKEGAFVELFHEIDDRLSDLGISSYGISETTLEEIFLKVAEESGVDAETSDGTLPARRNRRAFGDKQSCLRPFTEDDAADPNDSDIDPESRETDLLSGMDGKGSYQVKGWKLTQQQFVALLWKRLLIARRSRKGFFAQIVLPAVFVCIALVFSLIVPPFGKYPSLELQPWMYNEQYTFVSNDAPEDTGTLELLNALTKDPGFGTRCMEGNPIPDTPCQAGEEEWTTAPVPQTIMDLFQNGNWTMQNPSPACQCSSDKIKKMLPVCPPGAGGLPPPQRKQNTADILQDLTGRNISDYLVKTYVQIIAKSLKNKIWVNEFRYGGFSLGVSNTQALPPSQEVNDAIKQMKKHLKLAKDSSADRFLNSLGRFMTGLDTKNNVKVWFNNKGWHAISSFLNVINNAILRANLQKGENPSHYGITAFNHPLNLTKQQLSEVALMTTSVDVLVSICVIFAMSFVPASFVVFLIQERVSKAKHLQFISGVKPVIYWLSNFVWDMCNYVVPATLVIIIFICFQQKSYVSSTNLPVLALLLLLYGWSITPLMYPASFVFKIPSTAYVVLTSVNLFIGINGSVATFVLELFTDNKLNNINDILKSVFLIFPHFCLGRGLIDMVKNQAMADALERFGENRFVSPLSWDLVGRNLFAMAVEGVVFFLITVLIQYRFFIRPRPVNAKLSPLNDEDEDVRRERQRILDGGGQNDILEIKELTKIYRRKRKPAVDRICVGIPPGECFGLLGVNGAGKSSTFKMLTGDTTVTRGDAFLNKNSILSNIHEVHQNMGYCPQFDAITELLTGREHVEFFALLRGVPEKEVGKVGEWAIRKLGLVKYGEKYAGNYSGGNKRKLSTAMALIGGPPVVFLDEPTTGMDPKARRFLWNCALSVVKEGRSVVLTSHSMEECEALCTRMAIMVNGRFRCLGSVQHLKNRFGDGYTIVVRIAGSNPDLKPVQDFFGLAFPGSVLKEKHRNMLQYQLPSSLSSLARIFSILSQSKKRLHIEDYSVSQTTLDQVFVNFAKDQSDDDHLKDLSLHKNQTVVDVAVLTSFLQDEKVKESYV

SEQ ID NO: 37182 - protein, 20 aa, Artificial Sequence
  Synthetic polypeptide
ESPGLCCIHNSAIIFLRSFG

SEQ ID NO: 37183 - protein, 27 aa, Artificial Sequence
  Synthetic polypeptide
KALDSVVFITLPLFFCVVLVRKPAALQ

SEQ ID NO: 37184 - protein, 670 aa, Artificial Sequence
  Synthetic polypeptide
AELMKRGAVFALFIAILVLSWYQYMSSKREWKPLEDRSCTDIPWLLLFILFCIGMGFICGFSIATGAAARLVSGYDSYGNICGQKNTKLEAIPNSGMDHTQRKYVFFLDPCNLDLINRKIKSVALCVAACPRQELKTLSDVQKFAEINGSALCSYNLKPSEYTTSPKSSVLCPKLPVPASAPIPFFHRCAPVNISCYAKFAEALITFVSDNSVLHRLISGVMTSKEIILGLCLLSLVLSMILMVIIRYISRVLVWILTILVILGSLGGTGVLWWLYAKQRRSPKETVTPEQLQIAEDNLRALLIYAISATVFTVILFLIMLVMRKRVALTIALFHVAGKVFIHLPLLVFQPFWTFFALVLFWVYWIMTLLFLGTTGSPVQNEQGFVEFKISGPLQYMWWYHVVGLIWISEFILACQQMTVAGAVVTYYFTRDKRNLPFTPILASVNRLIRYHLGTVAKGSFIITLVKIPRMILMYIHSQLKGKENACARCVLKSCICCLWCLEKCLNYLNQNAYTATAINSTNFCTSAKDAFVILVENALRVATINTVGDFMLFLGKVLIVCSTGLAGIMLLNYQQDYTVWVLPLIIVCLFAFLVAHCFLSIYEMVVDVLFLCFAIDTKYNDGSPGREFYMDKVLMEFVENSRKAMKEAGKGGVADSRELKPMASGASSA

SEQ ID NO: 37185 - protein, 17 aa, Artificial Sequence
  Synthetic polypeptide
LVPIHELQTRMEAAGGP

SEQ ID NO: 37186 - protein, 665 aa, Artificial Sequence
  Synthetic polypeptide
AELMKRGAVFALFIAILVLSWYQYMSSKREWKPLEDRSCTDIPWLLLFILFCIGMGFICGFSIATGAAARLVSGYDSYGNICGQKNTKLEAIPNSGMDHTQRKYVFFLDPCNLDLINRKIKSVALCVAACPRQELKTLSDVQKFAEINGSALCSYNLKPSEYTTSPKSSVLCPKLPVPASAPIPFFHRCAPVNISCYAKFAEALITFVSDNSVLHRLISGVMTSKEIILGLCLLSLVLSMILMVIIRYISRVLVWILTILVILGSLGGTGVLWWLYAKQRRSPKETVTPEQLQIAEDNLRALLIYAISATVFTVILFLIMLVMRKRVALTIALFHVAGKVFIHLPLLVFQPFWTFFALVLFWVYWIMTLLFLGTTGSPVQNEQGFVEFKISGPLQYMWWYHVVGLIWISEFILACQQMTVAGAVVTYYFTRDKRNLPFTPILASVNRLIRYHLGTVAKGSFIITLVKIPRMILMYIHSQLKGKENACARCVLKSCICCLWCLEKCLNYLNQNAYTATAINSTNFCTSAKDAFVILVENALRVATINTVGDFMLFLGKVLIVCSTGLAGIMLLNYQQDYTVWVLPLIIVCLFAFLVAHCFLSIYEMVVDVLFLCFAIDTKYNDGSPGREFYMDKVLMEFVENSRKAMKEAGKGGVADSRELKPMIK

SEQ ID NO: 37187 - protein, 667 aa, Artificial Sequence
  Synthetic polypeptide
AELMKRGAVFALFIAILVLSWYQYMSSKREWKPLEDRSCTDIPWLLLFILFCIGMGFICGFSIATGAAARLVSGYDSYGNICGQKNTKLEAIPNSGMDHTQRKYVFFLDPCNLDLINRKIKSVALCVAACPRQELKTLSDVQKFAEINGSALCSYNLKPSEYTTSPKSSVLCPKLPVPASAPIPFFHRCAPVNISCYAKFAEALITFVSDNSVLHRLISGVMTSKEIILGLCLLSLVLSMILMVIIRYISRVLVWILTILVILGSLGGTGVLWWLYAKQRRSPKETVTPEQLQIAEDNLRALLIYAISATVFTVILFLIMLVMRKRVALTIALFHVAGKVFIHLPLLVFQPFWTFFALVLFWVYWIMTLLFLGTTGSPVQNEQGFVEFKISGPLQYMWWYHVVGLIWISEFILACQQMTVAGAVVTYYFTRDKRNLPFTPILASVNRLIRYHLGTVAKGSFIITLVKIPRMILMYIHSQLKGKENACARCVLKSCICCLWCLEKCLNYLNQNAYTATAINSTNFCTSAKDAFVILVENALRVATINTVGDFMLFLGKVLIVCSTGLAGIMLLNYQQDYTVWVLPLIIVCLFAFLVAHCFLSIYEMVVDVLFLCFAIDTKYNDGSPGREFYMDKVLMEFVENSRKAMKEAGKGGVADSRELKPMLKKR

SEQ ID NO: 37188 - protein, 407 aa, Artificial Sequence
  Synthetic polypeptide
KRAVKKFIMLTSNQNVPVFLIDPLILELINKNFEQVKNTSHGSTSQCKFFCVPRDFTAFALQYHLWKNEEGWFRIAENMGFQCLKIESKDPRLDGIDSLSGTEIPLHYICKLATHAIHLVVFHERSGNYLWHGHLRLKEHIDRKFVPFRKLQFGRYPGAFDRPELQQVTVDGLEVLIPKDPMHFVEEVPHSRFIECRYKEARAFFQQYLDDNTVEAVAFRKSAKELLQLAAKTLNKLGVPFWLSSGTCLGWYRQCNIIPYSKDVDLGIFIQDYKSDIILAFQDAGLPLKHKFGKVEDSLELSFQGKDDVKLDVFFFYEETDHMWNGGTQAKTGKKFKYLFPKFTLCWTEFVDMKVHVPCETLEYIEANYGKTWKIPVKTWDWKRSPPNVQPNGIWPISEWDEVIQLY

SEQ ID NO: 37189 - protein, 32 aa, Artificial Sequence
  Synthetic polypeptide
NQLDTFPRSVNDCIDNNLEDVFRSVQLKNLLC

SEQ ID NO: 37190 - protein, 40 aa, Artificial Sequence
  Synthetic polypeptide
RSDDNSDLELIGFRINWTRFQGALMIVLITTWRMCLEACS

SEQ ID NO: 37191 - protein, 217 aa, Artificial Sequence
  Synthetic polypeptide
KRAVKKFIMLTSNQNVPVFLIDPLILELINKNFEQVKNTSHGSTSQCKFFCVPRDFTAFALQYHLWKNEEGWFRIAENMGFQCLKIESKDPRLDGIDSLSGTEIPLHYICKLATHAIHLVVFHERSGNYLWHGHLRLKEHIDRKFVPFRKLQFGRYPGAFDRPELQQVTVDGLEVLIPKDPMHFVEEVPHSRFIECRYKEARAFFQIPVSEVYTVLD

SEQ ID NO: 37192 - protein, 376 aa, Artificial Sequence
  Synthetic polypeptide
KRAVKKFIMLTSNQNVPVFLIDPLILELINKNFEQVKNTSHGSTSQCKFFCVPRDFTAFALQYHLWKNEEGWFRIAENMGFQCLKIESKDPRLDGIDSLSGTEIPLHYICKLATHAIHLVVFHERSGNYLWHGHLRLKEHIDRKFVPFRKLQFGRYPGAFDRPELQQVTVDGLEVLIPKDPMHFVEEVPHSRFIECRYKEARAFFQQYLDDNTVEAVAFRKSAKELLQLAAKTLNKLGVPFWLSSGTCLGWYRQCNIIPYSKDVDLGIFIQDYKSDIILAFQDAGLPLKHKFGKVEDSLELSFQGKDDVKLDVFFFYEETDHMWNGGTQAKTGKKFKYLFPKFTLCWTEFVDMKVHVPCETLEYIEANYGKNQQGA

SEQ ID NO: 37193 - protein, 204 aa, Artificial Sequence
  Synthetic polypeptide
KRAVKKFIMLTSNQNVPVFLIDPLILELINKNFEQVKNTSHGSTSQCKFFCVPRDFTAFALQYHLWKNEEGWFRIAENMGFQCLKIESKDPRLDGIDSLSGTEIPLHYICKLATHAIHLVVFHERSGNYLWHGHLRLKEHIDRKFVPFRKLQFGRYPGAFDRPELQQVTVDGLEVLIPKDPMHFVEEVPHSRFIECRYKEARAF

SEQ ID NO: 37194 - protein, 261 aa, Artificial Sequence
  Synthetic polypeptide
KDLVSTKNKNTISQAWRCAPVVPTSWEAKVAGFPEPDYEEAVLLLLEGAAWEEALRLVYKYNRLDIIETNVKPSILEAQKNYMAFLDSQTATFSRHKKRLLVVRELKEQAQQAGLDDEVPHGQESDLFSETSSVVSGSEMSGKYSHSNSRISARSSKNRRKAERKKHSLKEGSPLEDLALLEALSEVVQNTENLKDEVYHILKVLFLFEFDEQGRELQKAFEDTLQLMERSLPEIWTLTYQQNSATPTWGEGVLLCCPSWS

SEQ ID NO: 37195 - protein, 24 aa, Artificial Sequence
  Synthetic polypeptide
SQLLGRPRWQDFLSLIMKKLCSCC

SEQ ID NO: 37196 - protein, 294 aa, Artificial Sequence
  Synthetic polypeptide
KDLVSTKNKNTISQAWRCAPVVPTSWEAKVAGFPEPDYEEAVLLLLEGAAWEEALRLVYKYNRLDIIETNVKPSILEAQKNYMAFLDSQTATFSRHKKRLLVVRELKEQAQQAGLDDEVPHGQESDLFSETSSVVSGSEMSGKYSHSNSRISARSSKNRRKAERKKHSLKEGSPLEDLALLEALSEVVQNTENLKDEVYHILKVLFLFEFDEQGRELQKAFEDTLQLMERSLPEIWTLTYQQNSATPVLGPNSTANSIMASYQQQKTSVPVLDAELFIPPKINRRTQWKLSLLD

SEQ ID NO: 37197 - protein, 11 aa, Artificial Sequence
  Synthetic polypeptide
DWGSQRISSIS

SEQ ID NO: 37198 - protein, 493 aa, Artificial Sequence
  Synthetic polypeptide
PLHNVSFNCASLNCVGLSKCGSLSNTVGPLCPRLLHPQSVWIKSTIFAGFETCRYRGPTFCVSRLHGVKCRTGDPKEYLPFLNTLKKMETNYQRFTIDKYLKRYEKAIGHLSKCGPEYFPECLNLIKDKNLYNEALKLYSPSSQQYQDISIAYGEHLMQEHMYEPAGLMFARCGAHEKALSAFLTCGNWKQALCVAAQLNFTKDQLVGLGRTLAGKLVEQRKHIDAAMVLEECAQDYEEAVLLLLEGAAWEEALRLVYKYNRLDIIETNVKPSILEAQKNYMAFLDSQTATFSRHKKRLLVVRELKEQAQQAGLDDEVPHGQESDLFSETSSVVSGSEMSGKYSHSNSRISARSSKNRRKAERKKHSLKEGSPLEDLALLEALSEVVQNTENLKDEVYHILKVLFLFEFDEQGRELQKAFEDTLQLMERSLPEIWTLTYQQNSATPVLGPNSTANSIMASYQQQKTSVPVLDAELFIPPKINRRTQWKLSLLD

SEQ ID NO: 37199 - protein, 84 aa, Artificial Sequence
  Synthetic polypeptide
TVWVYLNVDLSQTQLALCVHGFCIHNQCGSKVQYLQDLKLADTEGQHFVYPGSMGSNVGLGIPKNIFHFLIHLRKWKLIISGLL

SEQ ID NO: 37200 - protein, 725 aa, Artificial Sequence
  Synthetic polypeptide
LGHKGAFMNGISVLIKEASGSLVRTQKTPLVRNGSLVDTKSVGALILDFPASRTITTLINHKDNTKKSDKTLQAIQRVGQAVNLAVGRFVKVGEAIANENWDLKEEINIACIEAKQAGETIAALTDITNLNHLESDGQITIFTDKTGVIKAARLLLSSVTKVLLLADRVVIKQIITSRNKVLATMERLEKVNSFQEFVQIFSQFGNEMVEFAHLSGDRQNDLKDEKKKAKMAAARAVLEKCTMMLLTASKTCLRHPNCESAHKNKEGVFDRMKVALDKVIEIVTDCKPNGETDISSISIFTGIKEFKMNIEALRENLYFQSKENLSVTLEVILERMEDFTDSAYTSHEHRERILELSTQARMELQQLISVWIQAQSKKTKSIAEELELSILKISHSLNELKKELHSTATQLAADLLKYHADHVVLKALKLTGVEGNLEALAEYACKLSEQKEQLVETCRLLRHISGTEPLEITCIHAEETFQVTGQQIISAAETLTLHPSSKIAKENLDVFCEAWESQISDMSTLLREINDVFEGRRGEKYGYLSLPKPMKNNANLKSLKPDKPDSEEQAKIAKLGLKLGLLTSDADCEIEKWEDQENEIVQYGRNMSSMAYSLYLFTRGEGPLKTSQDLIHQLEVFAAEGLKLTSSVQAFSKQLKDDDKLMLLLEINKLIPLCHQLQTVTKTSLQNKVFLKVDKCITKTRSMMALLVQLLSLCYKLLKKSETRY

SEQ ID NO: 37201 - protein, 32 aa, Artificial Sequence
  Synthetic polypeptide
SWTSQPPELSPRLLIIKIIPKSLIKLCKQFSV

SEQ ID NO: 37202 - protein, 90 aa, Artificial Sequence
  Synthetic polypeptide
LWPDCWHSPKIYMLELNPHNDGIKSWGLWEVIRSQGSLHEWDQCSYKRGFREPCEDTEDTTCEEWVLSRHQICWCLDPGLPSLQNYHHAY

SEQ ID NO: 37203 - protein, 741 aa, Artificial Sequence
  Synthetic polypeptide
LGHKGAFMNGISVLIKEASGSLVRTQKTPLVRNGSLVDTKSVGALILDFPASRTITTLINHKDNTKKSDKTLQAIQRVGQAVNLAVGRFVKVGEAIANENWDLKEEINIACIEAKQAGETIAALTDITNLNHLESDGQITIFTDKTGVIKAARLLLSSVTKVLLLADRVVIKQIITSRNKVLATMERLEKVNSFQEFVQIFSQFGNEMVEFAHLSGDRQNDLKDEKKKAKMAAARAVLEKCTMMLLTASKTCLRHPNCESAHKNKEGVFDRMKVALDKVIEIVTDCKPNGETDISSISIFTGIKEFKMNIEALRENLYFQSKENLSVTLEVILERMEDFTDSAYTSHEHRERILELSTQARMELQQLISVWIQAQSKKTKSIAEELELSILKISHSLNELKKELHSTATQLAADLLKYHADHVVLKALKLTGVEGNLEALAEYACKLSEQKEQLVETCRLLRHISGTEPLEITCIHAEETFQVTGQQIISAAETLTLHPSSKIAKENLDVFCEAWESQISDMSTLLREINDVFEGRRGEKYGYLSLPKPMKNNANLKSLKPDKPDSEEQAKIAKLGLKLGLLTSDADCEIEKWEDQENEIVQYGRNMSSMAYSLYLFTRGEGPLKTSQDLIHQLEVFAAEGLKLTSSVQAFSKQLKDDDKLMLLLEINKLIPLCHQLQTVTKTSLQNKVFLKVDKCITKTRSMMALLVQLLSLCYKLLKKLQMENNGWVSVTNKDTMDSKT

SEQ ID NO: 37204 - protein, 657 aa, Artificial Sequence
  Synthetic polypeptide
LGHKGAFMNGISVLIKEASGSLVRTQKTPLVRNGSLVDTKSVGALILDFPASRTITTLINHKDNTKKSDKTLQAIQRVGQAVNLAVGRFVKVGEAIANENWDLKEEINIACIEAKQAGETIAALTDITNLNHLESDGQITIFTDKTGVIKAARLLLSSVTKVLLLADRVVIKQIITSRNKVLATMERLEKVNSFQEFVQIFSQFGNEMVEFAHLSGDRQNDLKDEKKKAKMAAARAVLEKCTMMLLTASKTCLRHPNCESAHKNKEGVFDRMKVALDKVIEIVTDCKPNGETDISSISIFTGIKEFKMNIEALRENLYFQSKENLSVTLEVILERMEDFTDSAYTSHEHRERILELSTQARMELQQLISVWIQAQSKKTKSIAEELELSILKISHSLNELKKEIISAAETLTLHPSSKIAKENLDVFCEAWESQISDMSTLLREINDVFEGRRGEKYGYLSLPKPMKNNANLKSLKPDKPDSEEQAKIAKLGLKLGLLTSDADCEIEKWEDQENEIVQYGRNMSSMAYSLYLFTRGEGPLKTSQDLIHQLEVFAAEGLKLTSSVQAFSKQLKDDDKLMLLLEINKLIPLCHQLQTVTKTSLQNKVFLKVDKCITKTRSMMALLVQLLSLCYKLLKKLQMENNGWVSVTNKDTMDSKT

SEQ ID NO: 37205 - protein, 190 aa, Artificial Sequence
  Synthetic polypeptide
LGHKGAFMNGISVLIKEASGSLVRTQKTPLVRNGSLVDTKSVGALILDFPASRTITTLINHKDNTKKSDKTLQAIQRVGQAVNLAVGRFVKVGEAIANENWDLKEEINIACIEAKQAGETIAALTDITNLNHLESDGQITIFTDKTGVIKAARLLLSSVTKVLLLADRVVIKQIITSRNKRLTIYNLRHS

SEQ ID NO: 37206 - protein, 32 aa, Artificial Sequence
  Synthetic polypeptide
SQHFGSLRQEDCLSPGVQDPRRQHSWSKKYKR

SEQ ID NO: 37207 - protein, 21 aa, Artificial Sequence
  Synthetic polypeptide
AQEFKTHAGNIAGARNTNARK

SEQ ID NO: 37208 - protein, 19 aa, Artificial Sequence
  Synthetic polypeptide
FLHFHLRSVCCREANVPAL

SEQ ID NO: 37209 - protein, 74 aa, Artificial Sequence
  Synthetic polypeptide
GRSQDGRIGTAPVYSSQRERRRRRVISAFPSEECVLSGSQCACSLNTWPMVTSMSSSAACPLTPCAASVTVTCL

SEQ ID NO: 37210 - protein, 384 aa, Artificial Sequence
  Synthetic polypeptide
SLDQQPWHYLGPYLRSTESEVLAGYVSNQCFTNSQFTAMNEPQCFYNESIAFFYNRSGKHLATEWNTVSKLVMGLGITVCIFIMLANLLVMVAIYVNRRFHFPIYYLMANLAAADFFAGLAYFYLMFNTGPNTRRLTVSTWLLRQGLIDTSLTASVANLLAIAIERHITVFRMQLHTRMSNRRVVVVIVVIWTMAIVMGAIPSVGWNCICDIENCSNMAPLYSDSYLVFWAIFNLVTFVVMVVLYAHIFGYVRQRTMRMSRHSSGPRRNRDTMMSLLKTVVIVLGAFIICWTPGLVLLLLDVCCPQCDVLAYEKFFLLLAEFNSAMNPIIYSYRDKEMSATFRQILCCQRSENPTGPTEGSDRSASSLNHTILAGVHSNDHSVV

SEQ ID NO: 37211 - protein, 38 aa, Artificial Sequence
  Synthetic polypeptide
PWTSSLGITWDPTSDLLNQKFLRVMSAISVLQTLSSQP

SEQ ID NO: 37212 - protein, 22 aa, Artificial Sequence
  Synthetic polypeptide
IRSSCGLCQQSVFYKLSVHSHE

SEQ ID NO: 37213 - protein, 202 aa, Artificial Sequence
  Synthetic polypeptide
SLDQQPWHYLGPYLRSTESEVLAGYVSNQCFTNSQFTAMNEPQCFYNESIAFFYNRSGKHLATEWNTVSKLVMGLGITVCIFIMLANLLVMVAIYVNRRFHFPIYYLMANLAAADFFAGLAYFYLMFNTGPNTRRLTVSTWLLRQGLIDTSLTASVANLLAIAIERHITVFRMQLHTRMSNRRVVVVIVVIWTMAIVMGAIP

SEQ ID NO: 37214 - protein, 10 aa, Artificial Sequence
  Synthetic polypeptide
SLSSSASSQP

SEQ ID NO: 37215 - protein, 44 aa, Artificial Sequence
  Synthetic polypeptide
ISCRVLSEKWKEVLKDLQNRIMRQRKERNRQSDLYLHRPVHSHE

SEQ ID NO: 37216 - protein, 366 aa, Artificial Sequence
  Synthetic polypeptide
DRGKKETDNLISIFIGQFTAMNEPQCFYNESIAFFYNRSGKHLATEWNTVSKLVMGLGITVCIFIMLANLLVMVAIYVNRRFHFPIYYLMANLAAADFFAGLAYFYLMFNTGPNTRRLTVSTWLLRQGLIDTSLTASVANLLAIAIERHITVFRMQLHTRMSNRRVVVVIVVIWTMAIVMGAIPSVGWNCICDIENCSNMAPLYSDSYLVFWAIFNLVTFVVMVVLYAHIFGYVRQRTMRMSRHSSGPRRNRDTMMSLLKTVVIVLGAFIICWTPGLVLLLLDVCCPQCDVLAYEKFFLLLAEFNSAMNPIIYSYRDKEMSATFRQILCCQRSENPTGPTEGSDRSASSLNHTILAGVHSNDHSVV

SEQ ID NO: 37217 - protein, 184 aa, Artificial Sequence
  Synthetic polypeptide
DRGKKETDNLISIFIGQFTAMNEPQCFYNESIAFFYNRSGKHLATEWNTVSKLVMGLGITVCIFIMLANLLVMVAIYVNRRFHFPIYYLMANLAAADFFAGLAYFYLMFNTGPNTRRLTVSTWLLRQGLIDTSLTASVANLLAIAIERHITVFRMQLHTRMSNRRVVVVIVVIWTMAIVMGAIP

SEQ ID NO: 37218 - protein, 36 aa, Artificial Sequence
  Synthetic polypeptide
MFPTSLHIPKENSRWIKDLNAESKIISVLERKHRSA

SEQ ID NO: 37219 - protein, 1839 aa, Artificial Sequence
  Synthetic polypeptide
VYLKENIDQLERVFLRLGHAETDEQLQNIISKFLPPVLLKLSSTQEGVRKKVMELLVHLNKRIKSRPKIQLPVETLLVQYQDPAAVSFVTNFTIIYVKMGYPRLPVEKQCELAPTLLTAMEGKPQPQQDSLMHLLIPTLFHMKYPVESSKSASPFNLAEKPKTVQLLLDFMLDVLLMPYGYVLNESQSRQNSSSAQGSSSNSGGGSGIPQPPPGMSFYAAKRVIGDNPWTPEQLEQCKLGIVKFIEAEQVPELEAVLHLVIASSDTRHSVATAADLELKSKQSLIDWNNPAIINKMYKVYLGDIPLKTKEGAVLKPELKRDPVSTRVKLKIVPHLLRSRQAAETFPANIQVVYDGLFGTNTNSKLRTLSLQFVHHICITCPEIKIKPLGPMLLNGLTKLINEYKEDPKLLSMAYSAVGKLSSRMPHLFTKDIALVQQLFEALCKEEPETRLAIQEALSMMVGAYSTLEGAQRTLMEALVASYLIKPEVQVRQVAVKFASTVFPSDHIPSRYLLLLAAGDPREEVHGEAQRVLRCLPGRNRKESTSEQMPSFPEMVYYIQEKASHRMKTPVKYMTGTTVLPFNPAAFGEIVLYLRMCLAHSAGVVPTSQSLADMQDHAPAIGRYIRTLMSSGQMAPSSSNKSGETNPVQIYIGLLQQLLAGVGGLPVMYCLLEAVSVYPEKLATKFVDKTEWIKSLMNNSKEEMRELAALFYSVVVSTVSGNELKSMIEQLIKTTKDNHSPEIQHGSLLALGFTVGRYLAKKKMRMSEQQDLERNADTLPDQEELIQSATETIGSFLDSTSPLLAIAACTALGEIGRNGPLPIPSEGSGFTKLHLVESLLSRIPSSKETNKMKERAIQTLGYFPVGDGDFPHQKLLLQGLMDSVEAKQIELQFTIGEAITSAAIGTSSVAARDAWQMTEEEYTPPAGAKVNDVVPWVLDVILNKHIISPNPHVRQAACIWLLSLVRKLSTHKEVKSHLKEIQSAFVSVLSENDELSQDVASKGLGLVYELGNEQDQQELVSTLVETLMTGKRVKHEVSGETVVFQGGALGKTPDGQGLSTYKELCSLASDLSQPDLVYKFMNLANHHAMWNSRKGAAFGFNVIATRAGEQLAPFLPQLVPRLYRYQFDPNLGIRQAMTSIWNALVTDKSMVDKYLKEILQDLVKNLTSNMWRVRESSCLALNDLLRGRPLDDIIDKLPEIWETLFRVQDDIKESVRKAAELALKTLSKVCVKMCDPAKGAAGQRTIAALLPCLLDKGMMSTVTEVRALSINTLVKISKSAGAMLKPHAPKLIPALLESLSVLEPQVLNYLSLRATEQEKAAMDSARLSAAKSSPMMETINMCLQYLDVSVLGELVPRLCELIRSGVGLGTKGGCASVIVSLTTQCPQDLTPYSGKLMSALLSGLTDRNSVIQKSCAFAMGHLVRTSRDSSTEKLLQKLNGWYMEKEEPIYKTSCALTIHAIGRYSPDVLKNHAKEVLPLAFLGMHEIADEEKSEKEECNLWTEVWQENVPGSFGGIRLYLQELITITQKALQSQSWKMKAQGAIAMASIAKQTSSLVPPYLGMILTALLQGLAGRTWAGKEELLKAIACVVTACSAELEKSVPNQPSTNEILQAVLKECSKENVKYKIVAISCAADILKATKEDRFQEFSNIVIPLIKKNSLESSGVRTTKNEEENEKEKELQLEYLLGAFESLGKAWPRNAETQRCYRQELCKLMCERLKLSTWKVQLGVLQSMNAFFQGLMLLEEEHADPEALAEILLETCKSITYSLENKTYSSVRTEALSVIELLLKKLEESKQWECLTSECRVLLIESLATMEPDSRPELQEKAALLKKTLENLE

SEQ ID NO: 37220 - protein, 884 aa, Artificial Sequence
  Synthetic polypeptide
VYLKENIDQLERVFLRLGHAETDEQLQNIISKFLPPVLLKLSSTQEGVRKKVMELLVHLNKRIKSRPKIQLPVETLLVQYQDPAAVSFVTNFTIIYVKMGYPRLPVEKQCELAPTLLTAMEGKPQPQQDSLMHLLIPTLFHMKYPVESSKSASPFNLAEKPKTVQLLLDFMLDVLLMPYGYVLNESQSRQNSSSAQGSSSNSGGGSGIPQPPPGMSFYAAKRVIGDNPWTPEQLEQCKLGIVKFIEAEQVPELEAVLHLVIASSDTRHSVATAADLELKSKQSLIDWNNPAIINKMYKVYLGDIPLKTKEGAVLKPELKRDPVSTRVKLKIVPHLLRSRQAAETFPANIQVVYDGLFGTNTNSKLRTLSLQFVHHICITCPEIKIKPLGPMLLNGLTKLINEYKEDPKLLSMAYSAVGKLSSRMPHLFTKDIALVQQLFEALCKEEPETRLAIQEALSMMVGAYSTLEGAQRTLMEALVASYLIKPEVQVRQVAVKFASTVFPSDHIPSRYLLLLAAGDPREEVHGEAQRVLRCLPGRNRKESTSEQMPSFPEMVYYIQEKASHRMKTPVKYMTGTTVLPFNPAAFGEIVLYLRMCLAHSAGVVPTSQSLADMQDHAPAIGRYIRTLMSSGQMAPSSSNKSGETNPVQIYIGLLQQLLAGVGGLPVMYCLLEAVSVYPEKLATKFVDKTEWIKSLMNNSKEEMRELAALFYSVVVSTVSGNELKSMIEQLIKTTKDNHSPEIQHGSLLALGFTVGRYLAKKKMRMSEQQDLERNADTLPDQEELIQSATETIGSFLDSTSPLLAIAACTALGEIGRNGPLPIPSEGSGFTKLHLVESLLSRIPSSKETNKMKERAIQTLGYFPVGDGDFPHQKLLLQGLMDSVE

SEQ ID NO: 37221 - protein, 128 aa, Artificial Sequence
  Synthetic polypeptide
VYLKENIDQLERVFLRLGHAETDEQLQNIISKFLPPVLLKLSSTQEGVRKKVMELLVHLNKRIKSRPKIQLPVETLLVQYQDPAAVSFVTNFTIIYVKMGYPRLPVEKQCELAPTLLTAMEGKPQPQQ

SEQ ID NO: 37222 - protein, 87 aa, Artificial Sequence
  Synthetic polypeptide
FYGYGGEFSNTVIGQMKKFGRIAICGAISTYNRTGPLPPGPPPEIVIYQELRMEAFVVYRWQGDARQKALKDLLKWVLEIKRENEED

SEQ ID NO: 37223 - protein, 23 aa, Artificial Sequence
  Synthetic polypeptide
LQENSPTDSMVMVESFQTLLSAR

SEQ ID NO: 37224 - protein, 52 aa, Artificial Sequence
  Synthetic polypeptide
SVTVSHHPQMGPSSCRKTHPLILWLWWRVFKHCYRPDEEIWKDCHMWSHLYI

SEQ ID NO: 37225 - protein, 86 aa, Artificial Sequence
  Synthetic polypeptide
FYGYGGEFSNTVIGQMKKFGRIAICGAISTYNRTGPLPPGPPPEIVIYQELRMEAFVVYRWQGDARQKALKDLLKWVLELPYFVID

SEQ ID NO: 37226 - protein, 115 aa, Artificial Sequence
  Synthetic polypeptide
FYGYGGEFSNTVIGQMKKFGRIAICGAISTYNRTGPLPPGPPPEIVIYQELRMEAFVVYRWQGDARQKALKDLLKWVLEGKIQYKEYIIEGFENMPAAFMGMLKGDNLGKTIVKA

SEQ ID NO: 37227 - protein, 32 aa, Artificial Sequence
  Synthetic polypeptide
FYGYGRWRVFKHCYRPDEEIWKDCHMWSHLYI

SEQ ID NO: 37228 - protein, 96 aa, Artificial Sequence
  Synthetic polypeptide
LQENSPTDSMVMVGGEFSNTVIGQMKKFGRIAICGAISTYNRTGPLPPGPPPEIVIYQELRMEAFVVYRWQGDARQKALKDLLKWVLEIKRENEED

SEQ ID NO: 37229 - protein, 26 aa, Artificial Sequence
  Synthetic polypeptide
SVTVSHHPQMGPSSCRKTHPLILWLW

SEQ ID NO: 37230 - protein, 95 aa, Artificial Sequence
  Synthetic polypeptide
LQENSPTDSMVMVGGEFSNTVIGQMKKFGRIAICGAISTYNRTGPLPPGPPPEIVIYQELRMEAFVVYRWQGDARQKALKDLLKWVLELPYFVID

SEQ ID NO: 37231 - protein, 124 aa, Artificial Sequence
  Synthetic polypeptide
LQENSPTDSMVMVGGEFSNTVIGQMKKFGRIAICGAISTYNRTGPLPPGPPPEIVIYQELRMEAFVVYRWQGDARQKALKDLLKWVLEGKIQYKEYIIEGFENMPAAFMGMLKGDNLGKTIVKA

SEQ ID NO: 37232 - protein, 30 aa, Artificial Sequence
  Synthetic polypeptide
SQQFGRPRRADHKVRRWRPSWLTELWKVKM

SEQ ID NO: 37233 - protein, 5 aa, Artificial Sequence
  Synthetic polypeptide
QSCGK

SEQ ID NO: 37234 - protein, 263 aa, Artificial Sequence
  Synthetic polypeptide
PGTWLTPVIPAIWEAEAGRSQGQEMETILANRVVESKNVALPKGTIVLASPGWTTHSISDGKDLEKLLTEWPDTIPLSLALGTVGMPGLTAYFGLLEICGVKGGETVMVNAAAGAVGSVVGQIAKLKGCKVVGAVGSDEKVAYLQKLGFDVVFNYKTVESLEETLKKASPDGYDCYFDNVGGEFSNTVIGQMKKFGRIAICGAISTYNRTGPLPPGPPPEIVIYQELRMEAFVVYRWQGDARQKALKDLLKWVLEIKRENEED

SEQ ID NO: 37235 - protein, 291 aa, Artificial Sequence
  Synthetic polypeptide
PGTWLTPVIPAIWEAEAGRSQGQEMETILANRVVESKNVALPKGTIVLASPGWTTHSISDGKDLEKLLTEWPDTIPLSLALGTVGMPGLTAYFGLLEICGVKGGETVMVNAAAGAVGSVVGQIAKLKGCKVVGAVGSDEKVAYLQKLGFDVVFNYKTVESLEETLKKASPDGYDCYFDNVGGEFSNTVIGQMKKFGRIAICGAISTYNRTGPLPPGPPPEIVIYQELRMEAFVVYRWQGDARQKALKDLLKWVLEGKIQYKEYIIEGFENMPAAFMGMLKGDNLGKTIVKA

SEQ ID NO: 37236 - protein, 100 aa, Artificial Sequence
  Synthetic polypeptide
PGTWLTPVIPAIWEAEAGRSQGQEMETILANRVVESKNVALPKGTIVLASPGWTTHSISDGKDLEKLLTEWPDTIPLSLALGTVGMPGLTAYFGLLEICG

SEQ ID NO: 37237 - protein, 28 aa, Artificial Sequence
  Synthetic polypeptide
DVGSASARPRPRLGCEKPLRPAAAPSEK

SEQ ID NO: 37238 - protein, 66 aa, Artificial Sequence
  Synthetic polypeptide
GASLPGRPSSEMWGAPLPGLDPVWDVRSPSARQPPRLRSRWRVFKHCYRPDEEIWKDCHMWSHLYI

SEQ ID NO: 37239 - protein, 85 aa, Artificial Sequence
  Synthetic polypeptide
EVGGEFSNTVIGQMKKFGRIAICGAISTYNRTGPLPPGPPPEIVIYQELRMEAFVVYRWQGDARQKALKDLLKWVLEIKRENEED

SEQ ID NO: 37240 - protein, 84 aa, Artificial Sequence
  Synthetic polypeptide
EVGGEFSNTVIGQMKKFGRIAICGAISTYNRTGPLPPGPPPEIVIYQELRMEAFVVYRWQGDARQKALKDLLKWVLELPYFVID

SEQ ID NO: 37241 - protein, 113 aa, Artificial Sequence
  Synthetic polypeptide
EVGGEFSNTVIGQMKKFGRIAICGAISTYNRTGPLPPGPPPEIVIYQELRMEAFVVYRWQGDARQKALKDLLKWVLEGKIQYKEYIIEGFENMPAAFMGMLKGDNLGKTIVKA

SEQ ID NO: 37242 - protein, 50 aa, Artificial Sequence
  Synthetic polypeptide
DVGSASAPPPHLGCEERLCPAETPSGSPPAYAQEDWEWNGHQQKHHSYSC

SEQ ID NO: 37243 - protein, 61 aa, Artificial Sequence
  Synthetic polypeptide
GASLPGRPSSEMWGAPLPRRPIWDVRSASARPRPRLGVLLHMPKRIGSGMDTSRSTTVIPV

SEQ ID NO: 37244 - protein, 35 aa, Artificial Sequence
  Synthetic polypeptide
GAPLPGRDPVWESSCICPRGLGVEWTPAEAPQLFL

SEQ ID NO: 37245 - protein, 57 aa, Artificial Sequence
  Synthetic polypeptide
EVRRPSAWQPPRLRSEEPLRPAAAPSEKYWLCSSPPAYAQEDWEWNGHQQKHHSYSC

SEQ ID NO: 37246 - protein, 44 aa, Artificial Sequence
  Synthetic polypeptide
EVRSPSARQLPRLRNIGYVPVLLHMPKRIGSGMDTSRSTTVIPV

SEQ ID NO: 37247 - protein, 30 aa, Artificial Sequence
  Synthetic polypeptide
EILVMFQSSCICPRGLGVEWTPAEAPQLFL

SEQ ID NO: 37248 - protein, 41 aa, Artificial Sequence
  Synthetic polypeptide
GASPPSSHPIWEILVMFQSSCICPRGLGVEWTPAEAPQLFL

SEQ ID NO: 37249 - protein, 57 aa, Artificial Sequence
  Synthetic polypeptide
EVRSPSARQLPRLRSEEPLRPAATPSGKYWLCSSPPAYAQEDWEWNGHQQKHHSYSC

SEQ ID NO: 37250 - protein, 44 aa, Artificial Sequence
  Synthetic polypeptide
EVRSLSAQQPPHLGNIGYVPVLLHMPKRIGSGMDTSRSTTVIPV

SEQ ID NO: 37251 - protein, 29 aa, Artificial Sequence
  Synthetic polypeptide
IFHSLDYKLLKAYNCPRSRSNCLDNSTNC

SEQ ID NO: 37252 - protein, 453 aa, Artificial Sequence
  Synthetic polypeptide
TISSLKLIIAPGVEATALIIRQIADHSLMTSKRDPHEWLDKSWLKVSPSEEEMYLLDFPCINPLVAQLMLNKGPSLHWILLATLCQLQELLPEVPEKVLKHFCSITSLFKIGSSSITKSPQISSPQENRNQISTLSSQSSASDLDSVIQEHNEYYQYLGLGETVQEDKTTILNDNSSIMELKEISSFLPPVTSYNQTSYWKDSSCKSNIGQNTPFLINIESRRPAYNSFLNHSDSESDVFSLGLTQMNCETIKSPTDTQKRVSVVPRFINSQKRRTHEAKGFINKDVSDPIFSLEGTQSPLHWNFKKNIWEQENHPFNLQYGAQQTACNKLYSQKGNLFTDQQKCLSDESEGLTCESSKDETFWRELPSVPSLDLFRASDSNANQKEFNSLYFYQRAGKSLGQKRHHESSFNSGDKESLTGFMCSQLPQFKKRRLAYEKVPGRVDGQTRLRFF

SEQ ID NO: 37253 - protein, 29 aa, Artificial Sequence
  Synthetic polypeptide
PCLLYTLWNYSSLMLLQMAGVGLGSLAVV

SEQ ID NO: 37254 - protein, 37 aa, Artificial Sequence
  Synthetic polypeptide
WYISWGLPSLASCTPCGTIRHSCCCRWRVLDWVPWLL

SEQ ID NO: 37255 - protein, 64 aa, Artificial Sequence
  Synthetic polypeptide
HFLLYSLSLLLWPCEDCACFPFTFCLDGTFLGASLALPPVHPVELFVTHAAADGGCWTGFPGCC

SEQ ID NO: 37256 - protein, 40 aa, Artificial Sequence
  Synthetic polypeptide
PCLLYTLWNYSSLMLLQMAGVGLGSLAVVIILTFLSFSAV

SEQ ID NO: 37257 - protein, 76 aa, Artificial Sequence
  Synthetic polypeptide
HFLLYSLSLLLWPCEDCACFPFTFCLDGTFLGASLALPPVHPVELFVTHAAADGGCWTGFPGCCDHSHIPLLLSGV

SEQ ID NO: 37258 - protein, 26 aa, Artificial Sequence
  Synthetic polypeptide
WYISWGLPSLASCTPCGTKYLVTVIS

SEQ ID NO: 37259 - protein, 48 aa, Artificial Sequence
  Synthetic polypeptide
HFLLYSLSLLLWPCEDCACFPFTFCLDGTFLGASLALPPVHPVELNTL

SEQ ID NO: 37260 - protein, 73 aa, Artificial Sequence
  Synthetic polypeptide
LNHGNELPPCCSRDRVLMRFGCLNVCSTSSFTLSLSCSGHVKTVPASPSPSALMIRHSCCCRWRVLDWVPWLL

SEQ ID NO: 37261 - protein, 47 aa, Artificial Sequence
  Synthetic polypeptide
HFLLYSLSLLLWPCEDCACFPFTFCLDDSSLMLLQMAGVGLGSLAVV

SEQ ID NO: 37262 - protein, 58 aa, Artificial Sequence
  Synthetic polypeptide
HFLLYSLSLLLWPCEDCACFPFTFCLDDSSLMLLQMAGVGLGSLAVVIILTFLSFSAV

SEQ ID NO: 37263 - protein, 26 aa, Artificial Sequence
  Synthetic polypeptide
YFVGFSVVINKRSTVATLQKCGTPSW

SEQ ID NO: 37264 - protein, 36 aa, Artificial Sequence
  Synthetic polypeptide
IRDQLWQPSRNAARHLGRKSQLQAGRCGSLCLSRGL

SEQ ID NO: 37265 - protein, 61 aa, Artificial Sequence
  Synthetic polypeptide
IAFSSLFLQLVPDWPHFLDWIRQLLAMEMNFSSTQPQNSLRKARERQQQEIRQHQKQHQPP

SEQ ID NO: 37266 - protein, 1238 aa, Artificial Sequence
  Synthetic polypeptide
SALAFFKAQLGCHVLDAFPSATSGRMNCFLFLIPAASARLASLFGLDQAAAGHGNEFFQYTAPKQPKKGQGTAATGNQATPKTAPATMSTPTILVATAVHAYRYTNGQYVKQGKFGAAVLGNHTAREYRILLYISQQQPVTVARIHVNFELMVRPNNYSTFYDDQRQNWSIMFESEKAAVEFNKQVCIAKCNSTSSLDAVLSQDLIVADGPAVEVGDSLEVAYTGWLFQNHVLGQVFDSTANKDKLLRLKLGSGKVIKGWEDGMLGMKKGGKRLLIVPPACAVGSEGVIGWTQATDSILVFEVEVRRVKFARDSGSDGHSVSSRDSAAPSPIPGADNLSADPVVSPPTSIPFKSGEPALRTKSNSLSEQLAINTSPDAVKAKLISRMAKMGQPMLPILPPQLDSNDSEIEDVNTLQGGGQPVVTPSVQPSLHPAHPALPQMTSQAPQPSVTGLQAPSAALMQVSSLDSHSAVSGNAQSFQPYAGMQAYAYPQASAVTSQLQPVRPLYPAPLSQPPHFQGSGDMASFLMTEARQHNTEIRMAVSKVADKMDHLMTKVEELQKHSAGNSMLIPSMSVTMETSMIMSNIQRIIQENERLKQEILEKSNRIEEQNDKISELIERNQRYVEQSNLMMEKRNNSLQTATENTQARVLHAEQEKAKVTEELAAATAQVSHLQLKMTAHQKKETELQMQLTESLKETDLLRGQLTKVQAKLSELQETSEQAQSKFKSEKQNRKQLELKVTSLEEELTDLRVEKESLEKNLSERKKKSAQERSQAEEEIDEIRKSYQEELDKLRQLLKKTRVSTDQAAAEQLSLVQAELQTQWEAKCEHLLASAKDEHLQQYQEVCAQRDAYQQKLVQLQEKCLALQAQITALTKQNEQHIKELEKNKSQMSGVEAAASDPSEKVKKIMNQVFQSLRREFELEESYNGRTILGTIMNTIKMVTLQLLNQQEQEKEESSSEEEEEKAEERPRRPSQEQSASASSGQPQAPLNRERPESPMVPSEQVVEEAVPLPPQALTTSQDGHRRKGDSEAEALSEIKDGSLPPELSCIPSHRVLGPPTSIPPEPLGPVSMDSECEESLAASPMAAKPDNPSGKVCVREVAPDGPLQESSTRLSLTSDPEEGDPLALGPESPGEPQPPQLKKDDVTSSTGPHKELSSTEAGSTVAGAALRPSHHSQRSSLSGDEEDELFKGATLKALRPKAQPEEEDEDEVSMKGRPPPTPLFGDDDDDDDIDWLG

SEQ ID NO: 37267 - protein, 491 aa, Artificial Sequence
  Synthetic polypeptide
SALAFFKAQLGCHVLDAFPSATSGRMNCFLFLIPAASARLASLFGLDQAAAGHGNEFFQYTAPKQPKKGQGTAATGNQATPKTAPATMSTPTILVATAVHAYRYTNGQYVKQGKFGAAVLGNHTAREYRILLYISQQQPVTVARIHVNFELMVRPNNYSTFYDDQRQNWSIMFESEKAAVEFNKQVCIAKCNSTSSLDAVLSQDLIVADGPAVEVGDSLEVAYTGWLFQNHVLGQVFDSTANKDKLLRLKLGSGKVIKGWEDGMLGMKKGGKRLLIVPPACAVGSEGVIGWTQATDSILVFEVEVRRVKFARDSGSDGHSVSSRDSAAPSPIPGADNLSADPVVSPPTSIPFKSGEPALRTKSNSLSEQLAINTSPDAVKAKLISRMAKMGQPMLPILPPQLDSNDSEIEDVNTLQGGGQPVVTPSVQPSLHPAHPALPQMTSQAPQPSVTGLQAPSAALMQVSSLDSHSAVSGNAQSFQVTFYNRINYIL

SEQ ID NO: 37268 - protein, 36 aa, Artificial Sequence
  Synthetic polypeptide
SLCSVCSKNPVSRRSKRFSRGPKKQRAFWIPRSRKC

SEQ ID NO: 37269 - protein, 42 aa, Artificial Sequence
  Synthetic polypeptide
VMSDHCVLSAARILLAEGARDFREDRRSRGHFGSPGVGNVKL

SEQ ID NO: 37270 - protein, 18 aa, Artificial Sequence
  Synthetic polypeptide
VVLTLWCAPESPRGDERG

SEQ ID NO: 37271 - protein, 207 aa, Artificial Sequence
  Synthetic polypeptide
WFSHCGVLRNHQGEMSGADTVGDDDEASRKRKSKNLAKDMKNKLGIFRRRNESPGAPPAGKADKMMKSFKPTSEEALKWGESLEKLLVHKYGLAVFQAFLRTEFSEENLEFWLACEDFKKVKSQSKMASKAKKIFAEYIAIQACKEVNLDSYTREHTKDNLQSVTRGCFDLAQKRIFGLMEKDSYPRFLRSDLYLDLINQKKMSPPL

SEQ ID NO: 37272 - protein, 14 aa, Artificial Sequence
  Synthetic polypeptide
GSHTVVCSGITKGR

SEQ ID NO: 37273 - protein, 90 aa, Artificial Sequence
  Synthetic polypeptide
WFSHCGVLRNHQGEMSGADTVGDDDEASRKRKSKNLAKDMKNKLGIFRRRNESPGAPPAGKADKMMKSFKPTSEEALKWGESLEKLLVHK

SEQ ID NO: 37274 - protein, 11 aa, Artificial Sequence
  Synthetic polypeptide
SSTCRQFQVHM

SEQ ID NO: 37275 - protein, 775 aa, Artificial Sequence
  Synthetic polypeptide
VPRVDNFRYTCDICGKKYKYYSCFQEHRDLHAVDVFSVEGAPENRADPFDQGVVATDEVKEEPPEPFQKIGPKTGNYTCEFCGKQYKYYTPYQEHVALHAPISTAPGWEPPDDPDTGSECSHPEVSPSPRFVAAKTQTNQSGKKAPASVVRCATLLHRTPPATQTQTFRTPNSGSPASKATAAESAFSRRVEGKAQNHFEETNSSSQNSSEPYTCGACGIQFQFYNNLLEHMQSHAADNENNIASNQSRSPPAVVEEKWKPQAQRNSANNTTTSGLTPNSMIPEKERQNIAERLLRVMCADLGALSVVSGKEFLKLAQTLVDSGARYGAFSVTEILGNFNTLALKHLPRMYNQVKVKVTCALGSNACLGIGVTCHSQSVGPDSCYILTAYQAEGNHIKSYVLGVKGADIRDSGDLVHHWVQNVLSEFVMSEIRTVYVTDCRVSTSAFSKAGMCLRCSACALNSVVQSVLSKRTLQARSMHEVIELLNVCEDLAGSTGLAKETFGSLEETSPPPCWNSVTDSLLLVHERYEQICEFYSRAKKMNLIQSLNKHLLSNLAAILTPVKQAVIELSNESQPTLQLVLPTYVRLEKLFTAKANDAGTVSKLCHLFLEALKENFKVHPAHKVAMILDPQQKLRPVPPYQHEEIIGKVCELINEVKESWAEEADFEPAAKKPRSAAVENPAAQEDDRLGKNEVYDYLQEPLFQATPDLFQYWSCVTQKHTKLAKLAFWLLAVPAVGARSGCVNMCEQALLIKRRRLLSPEDMNKLMFLKSNML

SEQ ID NO: 37276 - protein, 714 aa, Artificial Sequence
  Synthetic polypeptide
VPRVDNFRYTCDICGKKYKYYSCFQEHRDLHAVDVFSVEGAPENRADPFDQGVVATDEVKEEPPEPFQKIGPMNNITSDIFKKKEVRQCQKRETGNYTCEFCGKQYKYYTPYQEHVALHAPIKSAFSRRVEGKAQNHFEETNSSSQNSSEPYTCGACGIQFQFYNNLLEHMQSHAADNENNIASNQSRSPPAVVEEKWKPQAQRNSANNTTTSGLTPNSMIPEKERQNIAERLLRVMCADLGALSVVSGKEFLKLAQTLVDSGARYGAFSVTEILGNFNTLALKHLPRMYNQVKVKVTCALGSNACLGIGVTCHSQSVGPDSCYILTAYQAEGNHIKSYVLGVKGADIRDSGDLVHHWVQNVLSEFVMSEIRTVYVTDCRVSTSAFSKAGMCLRCSACALNSVVQSVLSKRTLQARSMHEVIELLNVCEDLAGSTGLAKETFGSLEETSPPPCWNSVTDSLLLVHERYEQICEFYSRAKKMNLIQSLNKHLLSNLAAILTPVKQAVIELSNESQPTLQLVLPTYVRLEKLFTAKANDAGTVSKLCHLFLEALKENFKVHPAHKVAMILDPQQKLRPVPPYQHEEIIGKVCELINEVKESWAEEADFEPAAKKPRSAAVENPAAQEDDRLGKNEVYDYLQEPLFQATPDLFQYWSCVTQKHTKLAKLAFWLLAVPAVGARSGCVNMCEQALLIKRRRLLSPEDMNKLMFLKSNML

SEQ ID NO: 37277 - protein, 156 aa, Artificial Sequence
  Synthetic polypeptide
VPRVDNFRYTCDICGKKYKYYSCFQEHRDLHAVDDPFDQGVVATDEVKEEPPEPFQKIGPMNNITSDIFKKKEVRQCQKRETGNYTCEFCGKQYKYYTPYQEHVALHAPITTQTQTFRTPNSGSPASKATAESAFSRRVEGKAQNHFEETNSSSQN

SEQ ID NO: 37278 - protein, 228 aa, Artificial Sequence
  Synthetic polypeptide
VPRVDNFRYTCDICGKKYKYYSCFQEHRDLHAVDVFSVEGAPENRADPFDQGVVATDEVKEEPPEPFQKIGPMNNITSDIFKKKEVRQCQKRETGNYTCEFCGKQYKYYTPYQEHVALHAPISTAPGWEPPDDPDTGSECSHPEVSPSPRFVAAKTQTNQSGKKAPASVVRCATLLHRTPPATQTQTFRTPNSGSPASKATAESAFSRRVEGKAQNHFEETNSSSQNS

SEQ ID NO: 37279 - protein, 61 aa, Artificial Sequence
  Synthetic polypeptide
GRAPWLTPVIPALWEAKNPTPAAPVGSSSSSTTTCWSTCSPMQLTMKTTLPPTSPDRHLLL

SEQ ID NO: 37280 - protein, 34 aa, Artificial Sequence
  Synthetic polypeptide
SQHFGRPRTLHLRRLWDPVPVLQQPVGAHAVPCS

SEQ ID NO: 37281 - protein, 581 aa, Artificial Sequence
  Synthetic polypeptide
PGAVAHTCNPSTLGGQEPYTCGACGIQFQFYNNLLEHMQSHAADNENNIASNQSRSPPAVVEEKWKPQAQRNSANNTTTSGLTPNSMIPEKERQNIAERLLRVMCADLGALSVVSGKEFLKLAQTLVDSGARYGAFSVTEILGNFNTLALKHLPRMYNQVKVKVTCALGSNACLGIGVTCHSQSVGPDSCYILTAYQAEGNHIKSYVLGVKGADIRDSGDLVHHWVQNVLSEFVMSEIRTVYVTDCRVSTSAFSKAGMCLRCSACALNSVVQSVLSKRTLQARSMHEVIELLNVCEDLAGSTGLAKETFGSLEETSPPPCWNSVTDSLLLVHERYEQICEFYSRAKKMNLIQSLNKHLLSNLAAILTPVKQAVIELSNESQPTLQLVLPTYVRLEKLFTAKANDAGTVSKLCHLFLEALKENFKVHPAHKVAMILDPQQKLRPVPPYQHEEIIGKVCELINEVKESWAEEADFEPAAKKPRSAAVENPAAQEDDRLGKNEVYDYLQEPLFQATPDLFQYWSCVTQKHTKLAKLAFWLLAVPAVGARSGCVNMCEQALLIKRRRLLSPEDMNKLMFLKSNML

SEQ ID NO: 37282 - protein, 177 aa, Artificial Sequence
  Synthetic polypeptide
GSRLQSQRFGRPRCGHPPAAGPQLDEGREPCTPGSHSFPVGLHLYAAGPAPGSHGHRHSCRLGHRAGTGAEPLLPPGEPCLPLRCPQPETQAAAGPAVPPRQDGRPPRVPALSGLRPRHARRALAPPGPRAPRPHSHSGDCLRAAPGACPAAFPQGPCTRPWGLLPLWEDEPACSPV

SEQ ID NO: 37283 - protein, 1828 aa, Artificial Sequence
  Synthetic polypeptide
AQDCSPSALGGRDVDILQRLGLSWTKAGSPAPPGVIPFQSGFIFTQRARLQAPTGTVIPAALGTELALVLSLCSHRVNHAFLFAVRSQKRKLQLGLQFLPGKTVVHLGSRRSVAFDLDMHDGRWHHLALELRGRTVTLVTACGQRRVPVLLPFHRDPALDPGGSFLFGKMNPHAVQFEGALCQFSIYPVTQVAHNYCTHLRKQCGQADTYQSPLGPLFSQDSGRPFTFQSDLALLGLENLTTATPALGSLPAGRGPRGTVAPATPTKPQRTSPTNPHQHMAVGGPAQTPLLPAKLSASNALDPMLPASVGGSTRTPRPAAAQPSQKITATKIPKSLPTKPSAPSTSIVPIKSPHPTQKTAPSSFTKSALPTQKQVPPTSRPVPARVSRPAEKPIQRNPGMPRPPPPSTRPLPPTTSSSKKPIPTLARTEAKITSHASKPASARTSTHKPPPFTALSSSPAPTPGSTRSTRPPATMVPPTSGTSTPRTAPAVPTPGSAPTGSKKPIGSEASKKAGPKSSPRKPVPLRPGKAARDVPLSDLTTRPSPRQPQPSQQTTPALVLAPAQFLSSSPRPTSSGYSIFHLAGSTPFPLLMGPPGPKGDCGLPGPPGLPGLPGIPGARGPRGPPGPYGNPGLPGPPGAKGQKGDPGLSPGKAHDGAKGDMGLPGLSGNPGPPGRKGHKGYPGPAGHPGEQGQPGPEGSPGAKGYPGRQGLPGPVGDPGPKGSRGYIGLPGLFGLPGSDGERGLPGVPGKRGKMGMPGFPGVFGERGPPGLDGNPGELGLPGPPGVPGLIGDLGVLGPIGYPGPKGMKGLMGSVGEPGLKGDKGEQGVPGVSGDPGFQGDKGSQGLPGFPGARGKPGPLGKVGDKGSIGFPGPPGPEGFPGDIGPPGDNGPEGMKGKPGARGLPGPRGQLGPEGDEGPMGPPGAPGLEGQPGRKGFPGRPGLDGVKGEPGDPGRPGPVGEQGFMGFIGLVGEPGIVGEKGDRGMMGPPGVPGPKGSMGHPGMPGGMGTPGEPGPQGPPGSRGPPGMRGAKGRRGPRGPDGPAGEQGSRGLKGPPGPQGRPGRPGQQGVAGERGHLGSRGFPGIPGPSGPPGTKGLPGEPGPQGPQGPIGPPGEMGPKGPPGAVGEPGLPGEAGMKGDLGPLGTPGEQGLIGQRGEPGLEGDSGPMGPDGLKGDRGDPGPDGEHGEKGQEGLMGEDGPPGPPGVTGVRGPEGKSGKQGEKGRTGAKGAKGYQGQLGEMGVPGDPGPPGTPGPKGSRGSLGPTGAPGRMGAQGEPGLAGYDGHKGIVGPLGPPGPKGEKGEQGEDGKAEGPPGPPGDRGPVGDRGDRGEPGDPGYPGQEGVQGLRGKPGQQGQPGHPGPRGWPGPKGSKGAEGPKGKQGKAGAPGRRGVQGLQGLPGPRGVVGRQGLEGIAGPDGLPGRDGQAGQQGEQGDDGDPGPMGPAGKRGNPGVAGLPGAQGPPGFKGESGLPGQLGPPGKRGTEGRTGLPGNQGEPGSKGQPGDSGEMGFPGMAGLFGPKGPPGDIGFKGIQGPRGPPGLMGKEGIVGPLGILGPSGLPGPKGDKGSRGDWGLQGPRGPPGPRGRPGPPGPPGGPIQLQQDDLGAAFQTWMDTSGALRPESYSYPDRLVLDQGGEIFKTLHYLSNLIQSIKTPLGTKENPARVCRDLMDCEQKMVDGTYWVDPNLGCSSDTIEVSCNFTHGGQTCLKPITASKVEFAISRVQMNFLHLLSSEVTQHITIHCLNMTVWQEGTGQTPAKQAVRFRAWNGQIFEAGGQFRPEVSMDGCKVQDGRWHQTLFTFRTQDPQQLPIISVDNLPPASSGKQYRLEVGPACFL

SEQ ID NO: 37284 - protein, 69 aa, Artificial Sequence
  Synthetic polypeptide
LKTAVPALWEAEMWTSSSGWASAGRRPGALHPRESFLSSRASSLRSGPGSRLPRAPSFLPPWAQSWHWC

SEQ ID NO: 37285 - protein, 9 aa, Artificial Sequence
  Synthetic polypeptide
SLAQDLAPR

SEQ ID NO: 37286 - protein, 1053 aa, Artificial Sequence
  Synthetic polypeptide
RRHHMCSPWHRIWHPGDLGVLGPIGYPGPKGMKGLMGSVGEPGLKGDKGEQGVPGVSGDPGFQGDKGSQGLPGFPGARGKPGPLGKVGDKGSIGFPGPPGPEGFPGDIGPPGDNGPEGMKGKPGARGLPGPRGQLGPEGDEGPMGPPGAPGLEGQPGRKGFPGRPGLDGVKGEPGDPGRPGPVGEQGFMGFIGLVGEPGIVGEKGDRGMMGPPGVPGPKGSMGHPGMPGGMGTPGEPGPQGPPGSRGPPGMRGAKGRRGPRGPDGPAGEQGSRGLKGPPGPQGRPGRPGQQGVAGERGHLGSRGFPGIPGPSGPPGTKGLPGEPGPQGPQGPIGPPGEMGPKGPPGAVGEPGLPGEAGMKGDLGPLGTPGEQGLIGQRGEPGLEGDSGPMGPDGLKGDRGDPGPDGEHGEKGQEGLMGEDGPPGPPGVTGVRGPEGKSGKQGEKGRTGAKGAKGYQGQLGEMGVPGDPGPPGTPGPKGSRGSLGPTGAPGRMGAQGEPGLAGYDGHKGIVGPLGPPGPKGEKGEQGEDGKAEGPPGPPGDRGPVGDRGDRGEPGDPGYPGQEGVQGLRGKPGQQGQPGHPGPRGWPGPKGSKGAEGPKGKQGKAGAPGRRGVQGLQGLPGPRGVVGRQGLEGIAGPDGLPGRDGQAGQQGEQGDDGDPGPMGPAGKRGNPGVAGLPGAQGPPGFKGESGLPGQLGPPGKRGTEGRTGLPGNQGEPGSKGQPGDSGEMGFPGMAGLFGPKGPPGDIGFKGIQGPRGPPGLMGKEGIVGPLGILGPSGLPGPKGDKGSRGDWGLQGPRGPPGPRGRPGPPGPPGGPIQLQQDDLGAAFQTWMDTSGALRPESYSYPDRLVLDQGGEIFKTLHYLSNLIQSIKTPLGTKENPARVCRDLMDCEQKMVDGTYWVDPNLGCSSDTIEVSCNFTHGGQTCLKPITASKVEFAISRVQMNFLHLLSSEVTQHITIHCLNMTVWQEGTGQTPAKQAVRFRAWNGQIFEAGGQFRPEVSMDGCKVQDGRWHQTLFTFRTQDPQQLPIISVDNLPPASSGKQYRLEVGPACFL

SEQ ID NO: 37287 - protein, 28 aa, Artificial Sequence
  Synthetic polypeptide
QNHPGVAMRIKGGIICVVLGTGSGTQVT

SEQ ID NO: 37288 - protein, 46 aa, Artificial Sequence
  Synthetic polypeptide
RRHHMCSPWHRIWHPGDLGVLGPIGYPGPKGMKGLMGSVGEPGLKG

SEQ ID NO: 37289 - protein, 9 aa, Artificial Sequence
  Synthetic polypeptide
TDLHGLWVT

SEQ ID NO: 37290 - protein, 13 aa, Artificial Sequence
  Synthetic polypeptide
NGDSSRLIFMGCG

SEQ ID NO: 37291 - protein, 1043 aa, Artificial Sequence
  Synthetic polypeptide
SSWAVGDLGVLGPIGYPGPKGMKGLMGSVGEPGLKGDKGEQGVPGVSGDPGFQGDKGSQGLPGFPGARGKPGPLGKVGDKGSIGFPGPPGPEGFPGDIGPPGDNGPEGMKGKPGARGLPGPRGQLGPEGDEGPMGPPGAPGLEGQPGRKGFPGRPGLDGVKGEPGDPGRPGPVGEQGFMGFIGLVGEPGIVGEKGDRGMMGPPGVPGPKGSMGHPGMPGGMGTPGEPGPQGPPGSRGPPGMRGAKGRRGPRGPDGPAGEQGSRGLKGPPGPQGRPGRPGQQGVAGERGHLGSRGFPGIPGPSGPPGTKGLPGEPGPQGPQGPIGPPGEMGPKGPPGAVGEPGLPGEAGMKGDLGPLGTPGEQGLIGQRGEPGLEGDSGPMGPDGLKGDRGDPGPDGEHGEKGQEGLMGEDGPPGPPGVTGVRGPEGKSGKQGEKGRTGAKGAKGYQGQLGEMGVPGDPGPPGTPGPKGSRGSLGPTGAPGRMGAQGEPGLAGYDGHKGIVGPLGPPGPKGEKGEQGEDGKAEGPPGPPGDRGPVGDRGDRGEPGDPGYPGQEGVQGLRGKPGQQGQPGHPGPRGWPGPKGSKGAEGPKGKQGKAGAPGRRGVQGLQGLPGPRGVVGRQGLEGIAGPDGLPGRDGQAGQQGEQGDDGDPGPMGPAGKRGNPGVAGLPGAQGPPGFKGESGLPGQLGPPGKRGTEGRTGLPGNQGEPGSKGQPGDSGEMGFPGMAGLFGPKGPPGDIGFKGIQGPRGPPGLMGKEGIVGPLGILGPSGLPGPKGDKGSRGDWGLQGPRGPPGPRGRPGPPGPPGGPIQLQQDDLGAAFQTWMDTSGALRPESYSYPDRLVLDQGGEIFKTLHYLSNLIQSIKTPLGTKENPARVCRDLMDCEQKMVDGTYWVDPNLGCSSDTIEVSCNFTHGGQTCLKPITASKVEFAISRVQMNFLHLLSSEVTQHITIHCLNMTVWQEGTGQTPAKQAVRFRAWNGQIFEAGGQFRPEVSMDGCKVQDGRWHQTLFTFRTQDPQQLPIISVDNLPPASSGKQYRLEVGPACFL

SEQ ID NO: 37292 - protein, 36 aa, Artificial Sequence
  Synthetic polypeptide
SSWAVGDLGVLGPIGYPGPKGMKGLMGSVGEPGLKG

SEQ ID NO: 37293 - protein, 162 aa, Artificial Sequence
  Synthetic polypeptide
EQLPVLRAPFMRFLAQSLRGTNGFLNSPFPTRQSAHPQPPPLPLRLYPVDQQRPSPASCSPGQGETRPSVSCKKRCPGFVCGWKTACTSHSRAARHAQHLPLTAPPGPAAGQQTPQPPGAPIMAVNPQRDCLVSLEVKSRLSLQEGSEPGLPQCLGRCSDCP

SEQ ID NO: 37294 - protein, 17 aa, Artificial Sequence
  Synthetic polypeptide
SNFQSCELHSCGSWLRV

SEQ ID NO: 37295 - protein, 430 aa, Artificial Sequence
  Synthetic polypeptide
ATSSPASSIHAVPGSEFEGHKRISEQPLPNKTISPPPAPAPAAAPLPCGPTETIPSFLLTRAGRDQAICELQEEVSRLRLRLEDSLHQPLQGSPTRPASAFDRPARTRGRPADSPATWGSHYGSKSTERLPGEPRGEEQIVPPGRQRARSSSVPREVLRLSLSSESELPSLPLFSEKSKTTKDSPQAARDGKRGVGSAGWPDRVTFRGQYTGHEYHVLSPKAVPKGNGTVSCPHCRPIRTQDAGGAVTGDPLGPPPADTLQCPLCGQVGSPPEADGPGSATSGAEKATTRRKASSTPSPKQRSKQAGSSPRPPPGLWYLATAPPAPAPPAFAYISSVPIMPYPPAAVYYAPAGPTSAQPAAKWPPTASPPPARRHRHSIQLDLGDLEELNKALSRAVQAAESVRSTTRQMRSSLSADLRQAHSLRGSCLF

SEQ ID NO: 37296 - protein, 10 aa, Artificial Sequence
  Synthetic polypeptide
PWGGHQLEET

SEQ ID NO: 37297 - protein, 55 aa, Artificial Sequence
  Synthetic polypeptide
WKVSCFDPQQPGGSPGPATWHLGDPGVAISSRRLEPLLAYQHAHPGVASGEPGHL

SEQ ID NO: 37298 - protein, 940 aa, Artificial Sequence
  Synthetic polypeptide
GKCPALIHSSLGAALALPLGILVTLGWPSARGDLSPSSLTSMPTLGWLPENRDISEDQSSAEQTQALASQASQFLAKVESFERLIQAGRLMPQDQVKGFQRLKAAHAALEEEYLKACREQHPAQPLAGSKGTPGRFDPRRELEAEIYRLGSCLEELKEHIDQTQQEPEPPGSDSALDSTPALPCLHQPTHLPAPSGQAPMPAIKTSCPEPATTTAAASTGPCPLHVNVEVSSGNSEVEDRPQDPLARLRHKELQMEQVYHGLMERYLSVKSLPEAMRMEEEEEGEEEEEEEGGGDSLEVDGVAATPGKAEATRVLPRQCPVQAEKSHGAPLEEATEKMVSMKPPGFQASLARDGHMSGLGKAEAAPPGPGVPPHPPGTKSAASHQSSMTSLEGSGISERLPQKPLHRGGGPHLEETWMASPETDSGFVGSETSRVSPLTQTPEHRLSHISTAGTLAQPFAASVPRDGASYPKARGSLIPRRATEPSTPRSQAQRYLSSPSGPLRQRAPNFSLERTLAAEMAVPGSEFEGHKRISEQPLPNKTISPPPAPAPAAAPLPCGPTETIPSFLLTRAGRDQAICELQEEVSRLRLRLEDSLHQPLQGSPTRPASAFDRPARTRGRPADSPATWGSHYGSKSTERLPGEPRGEEQIVPPGRQRARSSSVPREVLRLSLSSESELPSLPLFSEKSKTTKDSPQAARDGKRGVGSAGWPDRVTFRGQYTGHEYHVLSPKAVPKGNGTVSCPHCRPIRTQDAGGAVTGDPLGPPPADTLQCPLCGQVGSPPEADGPGSATSGAEKATTRRKASSTPSPKQRSKQAGSSPRPPPGLWYLATAPPAPAPPAFAYISSVPIMPYPPAAVYYAPAGPTSAQPAAKWPPTASPPPARRHRHSIQLDLGDLEELNKALSRAVQAAESVRSTTRQMRSSLSADLRQAHSLRGSCLF

SEQ ID NO: 37299 - protein, 332 aa, Artificial Sequence
  Synthetic polypeptide
GKCPALIHSSLGAALALPLGILVTLGWPSARGDLSPSSLTSMPTLGWLPENRDISEDQSSAEQTQALASQASQFLAKVESFERLIQAGRLMPQDQVKGFQRLKAAHAALEEEYLKACREQHPAQPLAGSKGTPGRFDPRRELEAEIYRLGSCLEELKEHIDQTQQEPEPPGSDSALDSTPALPCLHQPTHLPAPSGQAPMPAIKTSCPEPATTTAAASTGPCPLHVNVEVSSGNSEVEDRPQDPLARLRHKELQMEQVYHGLMERYLSVKSLPEAMRMEEEEEGEEEEEEEGGGDSLEVDGVAATPGKAEATRVLPRQCPVQAEKSHGAPLE

SEQ ID NO: 37300 - protein, 36 aa, Artificial Sequence
  Synthetic polypeptide
KQCSGPIPGWLTPHIWGWEPAVSHLHKPSSSHSSLR

SEQ ID NO: 37301 - protein, 23 aa, Artificial Sequence
  Synthetic polypeptide
RLISGDGSQLSVIFTSPPVLTPL

SEQ ID NO: 37302 - protein, 480 aa, Artificial Sequence
  Synthetic polypeptide
VASNAECTESPGLLLKAVLGPHSRLVNASYLGMGASCQSSSQALQFSLLSEVRGTISPQDLERFDHLVLRREIESMKARQPPGPGAGDTYSMVSYSDTGSSTGSHGTSTTVSSARNTLDLEETGEAVQGNINALPDVSVDDVRSTSQGLSSFKPLPRPPPLAQGNDLPLGQPRKLGREDLQPPSSMPSCSGTVFSAPQNRSPPAGTAPTPGTSSAQDLPSSPIYASVSPANPSSKRPLDAHLALVNQHPIGPFPRVQSPPHLKSPSAEATVAGGCLLPPSPSGHPDQTGTNQHFVMVEVHRPDSEPDVNEVRALPQTRTASTLSHLSDSGQTLSEDSGVDAGEAEASAPGRGRQSVSTKSRSSKELPRNERPTDGANKPPGLLEPTSTLVRVKKSAATLGIAIEGGANTRQPLPRIVTIQRGGSAHNCGQLKVGHVILEVNGLTLRGKEHREAARIIAEAFKTKDRDYIDFLVTEFNVML

SEQ ID NO: 37303 - protein, 16 aa, Artificial Sequence
  Synthetic polypeptide
SWTSNLQNCEMLGTRF

SEQ ID NO: 37304 - protein, 41 aa, Artificial Sequence
  Synthetic polypeptide
TCWRLDLGLPTSKTVRCWGPDSRSEWAELSQHPTRRGCQAA

SEQ ID NO: 37305 - protein, 587 aa, Artificial Sequence
  Synthetic polypeptide
DVGDQILEVNGRSFLNILHDEAVRLLKSSRHLILTVKDVGRLPRARTTVDETKWIASSRIRETMANSAGFLGDLTTEGINKPGFYKGPAGSQVTLSSLGNQTRVLLEEQARHLLNEQEHATMAYYLDEYRGGSVSVEALVMALFKLLNTHAKFSLLSEVRGTISPQDLERFDHLVLRREIESMKARQPPGPGAGDTYSMVSYSDTGSSTGSHGTSTTVSSARNTLDLEETGEAVQGNINALPDVSVDDVRSTSQGLSSFKPLPRPPPLAQGNDLPLGQPRKLGREDLQPPSSMPSCSGTVFSAPQNRSPPAGTAPTPGTSSAQDLPSSPIYASVSPANPSSKRPLDAHLALVNQHPIGPFPRVQSPPHLKSPSAEATVAGGCLLPPSPSGHPDQTGTNQHFVMVEVHRPDSEPDVNEVRALPQTRTASTLSHLSDSGQTLSEDSGVDAGEAEASAPGRGRQSVSTKSRSSKELPRNERPTDGANKPPGLLEPTSTLVRVKKSAATLGIAIEGGANTRQPLPRIVTIQRGGSAHNCGQLKVGHVILEVNGLTLRGKEHREAARIIAEAFKTKDRDYIDFLVTEFNVML

SEQ ID NO: 37306 - protein, 33 aa, Artificial Sequence
  Synthetic polypeptide
SWTSNLQNCWGPDSRSEWAELSQHPTRRGCQAA

SEQ ID NO: 37307 - protein, 600 aa, Artificial Sequence
  Synthetic polypeptide
TCWRLDLGLPTSKTVGDQILEVNGRSFLNILHDEAVRLLKSSRHLILTVKDVGRLPRARTTVDETKWIASSRIRETMANSAGFLGDLTTEGINKPGFYKGPAGSQVTLSSLGNQTRVLLEEQARHLLNEQEHATMAYYLDEYRGGSVSVEALVMALFKLLNTHAKFSLLSEVRGTISPQDLERFDHLVLRREIESMKARQPPGPGAGDTYSMVSYSDTGSSTGSHGTSTTVSSARNTLDLEETGEAVQGNINALPDVSVDDVRSTSQGLSSFKPLPRPPPLAQGNDLPLGQPRKLGREDLQPPSSMPSCSGTVFSAPQNRSPPAGTAPTPGTSSAQDLPSSPIYASVSPANPSSKRPLDAHLALVNQHPIGPFPRVQSPPHLKSPSAEATVAGGCLLPPSPSGHPDQTGTNQHFVMVEVHRPDSEPDVNEVRALPQTRTASTLSHLSDSGQTLSEDSGVDAGEAEASAPGRGRQSVSTKSRSSKELPRNERPTDGANKPPGLLEPTSTLVRVKKSAATLGIAIEGGANTRQPLPRIVTIQRGGSAHNCGQLKVGHVILEVNGLTLRGKEHREAARIIAEAFKTKDRDYIDFLVTEFNVML

SEQ ID NO: 37308 - protein, 35 aa, Artificial Sequence
  Synthetic polypeptide
EGTVYEPGSGPSPDTEPAGVLILDFQPPKLLGTRF

SEQ ID NO: 37309 - protein, 243 aa, Artificial Sequence
  Synthetic polypeptide
GGSPSGFSPHFYHLLVGLLYPFPKDCSQAMLNGDTTSGLYTIYLNGDKAEALEVFCDMTSDGGGWIVFLRRKNGRENFYQNWKAYAAGFGDRREEFWLGLDNLNKITAQGQYELRVDLRDHGETAFAVYDKFSVGDAKTRYKLKVEGYSGTAGDSMAYHNGRSFSTFDKDTDSAITNCALSYKGAFWYRNCHRVNLMGRYGDNNHSQGVNWFHWKGHEHSIQFAEMKLRPSNFRNLEGRRKRA

SEQ ID NO: 37310 - protein, 45 aa, Artificial Sequence
  Synthetic polypeptide
RKPIWIQSPFLSPASWTPVPLPQGLLPSNAEWRHDLWPLHHLSEW

SEQ ID NO: 37311 - protein, 94 aa, Artificial Sequence
  Synthetic polypeptide
GGSPSGFSPHFYHLLVGLLYPFPKDCSQAMLNGDTTSGLYTIYLNGDKAEALEVFCDMTSDGGGWIVFLRRKNGRENFYQNWKAYAAGFGDRRE

SEQ ID NO: 37312 - protein, 33 aa, Artificial Sequence
  Synthetic polypeptide
APWSRGESLNPELTAEVWILSPPLTHLEKASMS

SEQ ID NO: 37313 - protein, 33 aa, Artificial Sequence
  Synthetic polypeptide
QLRFGSCPHHSLTLRRPPCPELQEQSPDYPCGP

SEQ ID NO: 37314 - protein, 496 aa, Artificial Sequence
  Synthetic polypeptide
EGLHVLSCRNNPLIIPVVHDLSQPFYHSQAVRVSFSSPLVAISGVALRSFDNFDPVTLSSCQRGETYSPAEQSCVHFACEKTDCPELAVENASLNCSSSDRYHGAQCTVSCRTGYVLQIRRDDELIKSQTGPSVTVTCTEGKWNKQVACEPVDCSIPDHHQVYAASFSCPEGTTFGSQCSFQCRHPAQLKGNNSLLTCMEDGLWSFPEALCELMCLAPPPVPNADLQTARCRENKHKVGSFCKYKCKPGYHVPGSSRKSKKRAFKTQCTQDGSWQEGACVPVTCDPPPPKFHGLYQCTNGFQFNSECRIKCEDSDASQGLGSNVIHCRKDGTWNGSFHVCQEMQGQCSVPNELNSNLKLQCPDGYAIGSECATSCLDHNSESIILPMNVTVRDIPHWLNPTRVERVVCTAGLKWYPHPALIHCVKGCEPFMGDNYCDAINNRAFCNYDGGDCCTSTVKTKKVTPFPMSCDLQGDCACRDPQAQEHSRKDLRGYSHG

SEQ ID NO: 37315 - protein, 13 aa, Artificial Sequence
  Synthetic polypeptide
MGCFMTRRDPASQ

SEQ ID NO: 37316 - protein, 16 aa, Artificial Sequence
  Synthetic polypeptide
QDGTQRHSDLYRGQVE

SEQ ID NO: 37317 - protein, 375 aa, Artificial Sequence
  Synthetic polypeptide
MNGLLYDKTGPSVTVTCTEGKWNKQVACEPVDCSIPDHHQVYAASFSCPEGTTFGSQCSFQCRHPAQLKGNNSLLTCMEDGLWSFPEALCELMCLAPPPVPNADLQTARCRENKHKVGSFCKYKCKPGYHVPGSSRKSKKRAFKTQCTQDGSWQEGACVPVTCDPPPPKFHGLYQCTNGFQFNSECRIKCEDSDASQGLGSNVIHCRKDGTWNGSFHVCQEMQGQCSVPNELNSNLKLQCPDGYAIGSECATSCLDHNSESIILPMNVTVRDIPHWLNPTRVERVVCTAGLKWYPHPALIHCVKGCEPFMGDNYCDAINNRAFCNYDGGDCCTSTVKTKKVTPFPMSCDLQGDCACRDPQAQEHSRKDLRGYSHG

SEQ ID NO: 37318 - protein, 7 aa, Artificial Sequence
  Synthetic polypeptide
DQPGQQG

SEQ ID NO: 37319 - protein, 1530 aa, Artificial Sequence
  Synthetic polypeptide
GQEFETSLGNKVEELNSEIEKLSAAFAKAREALQKAQTQEFQGSEDYETALSGKEALSAALRSQNLTKSTENHRLRRSIKKITQELSDLQQERERLEKDLEEAHREKSKGDCTIRDLRNEVEKLRNEVNEREKAMENRYKSLLSESNKKLHNQEQVIKHLTESTNQKDVLLQKFNEKDLEVIQQNCYLMAAEDLELRSEGLITEKCSSQQPPGSKTIFSKEKKQSSDYEELIQVLKKEQDIYTHLVKSLQESDSINNLQAELNKIFALRKQLEQDVLSYQNLRKTLEEQISEIRRREEESFSLYSDQTSYLSICLEENNRFQVEHFSQEELKKKVSDLIQLVKELYTDNQHLKKTIFDLSCMGFQGNGFPDRLASTEQTELLASKEDEDTIKIGEDDEINFLSDQHLQQSNEIMKDLSKGGCKNGYLRHTESKISDCDGAHAPGCLEEGAFINLLAPLFNEKATLLLESRPDLLKVVRELLLGQLFLTEQEVSGEHLDGKTEKTPKQKGELVHFVQTNSFSKPHDELKLSCEAQLVKAGEVPKVGLKDASVQTVATEGDLLRFKHEATREAWEEKPINTALSAEHRPENLHGVPGWQAALLSLPGITNREAKKSRLPILIKPSRSLGNMYRLPATQEVVTQLQSQILELQGELKEFKTCNKQLHQKLILAEAVMEGRPTPDKTLLNDSEICPPDDLASLPSCKENPEDVLSPTSVATYLSSKSQPSAKVSVMGTDQSESINTSNETEYLKQKIHDLETELEGYQNFIFQLQKHSQCSEAIITVLCGTEGAQDGLSKPKNGSDGEEMTFSSLHQVRYVKHVKILGPLAPEMIDSRVLENLKQQLEEQEYKLQKEQNLNMQLFSEIHNLQNKFRDLSPPRYDSLVQSQARELSLQRQQIKDGHGICVISRQHMNTMIKAFEELLQASDVDYCVAEGFQEQLNQCAELLEKLEKLFLNGKSVGVEMNTQNELMERIEEDNLTYQHLLPESPEPSASHALSDYETSEKSFFSRDQKQDNETEKTSVMVNSFSQDLLMEHIQEIRTLRKRLEESIKTNEKLRKQLERQGSEFVQGSTSIFASGSELHSSLTSEIHFLRKQNQALNAMLIKGSRDKQKENDKLRESLSRKTVSLEHLQREYASVKEENERLQKEGSEKERHNQQLIQEVRCSGQELSRVQEEVKLRQQLLSQNDKLLQSLRVELKAYEKLDEEHRRLREASGEGWKGQDPFRDLHSLLMEIQALRLQLERSIETSSTLQSRLKEQLARGAEKAQEGALTLAVQAVSIPEVPLQPDKHDGDKYPMESDNSFDLFDSSQAVTPKSVSETPPLSGNDTDSLSCDSGSSATSTPCVSRLVTGHHLWASKNGRHVLGLIEDYEALLKQISQGQRLLAEMDIQTQEAPSSTSQELGTKGPHPAPLSKFVSSVSTAKLTLEEAYRRLKLLWRVSLPEDGQCPLHCEQIGEMKAEVTKLHKKLFEQEKKLQNTMKLLQLSKRQEKVIFDQLVVTHKILRKARGNLELRPGGAHPGTCSPSRPGS

SEQ ID NO: 37320 - protein, 106 aa, Artificial Sequence
  Synthetic polypeptide
AWWLTPFIPTLWEAEVGGSLEARNLRPAWATRLKNLTLKLKSSVLPLLKPERPYRKHRPRNFRGLKTMRLLYQERKPFRLRCAHKTSPRVQRTTDCVEALRRSPRS

SEQ ID NO: 37321 - protein, 1539 aa, Artificial Sequence
  Synthetic polypeptide
GQEFETSLGNKVEELNSEIEKLSAAFAKAREALQKAQTQEFQGSEDYETALSGKEALSAALRSQNLTKSTENHRLRRSIKKITQELSDLQQERERLEKDLEEAHREKSKGDCTIRDLRNEVEKLRNEVNEREKAMENRYKSLLSESNKKLHNQEQVIKHLTESTNQKDVLLQKFNEKDLEVIQQNCYLMAAEDLELRSEGLITEKCSSQQPPGSKTIFSKEKKQSSDYEELIQVLKKEQDIYTHLVKSLQESDSINNLQAELNKIFALRKQLEQDVLSYQNLRKTLEEQISEIRRREEESFSLYSDQTSYLSICLEENNRFQVEHFSQEELKKKVSDLIQLVKELYTDNQHLKKTIFDLSCMGFQGNGFPDRLASTEQTEIMKDLSKGGCKNGYLRHTESKISDCDGAHAPGCLEEGAFINLLAPLFNEKATLLLESRPDLLKVVRELLLGQLFLTEQEVSGEHLDGKTEKTPKQKGELVHFVQTNSFSKPHDELKLSCEAQLVKAGEVPKVGLKDASVQTVATEGDLLRFKHEATREAWEEKPINTALSAEHRPENLHGVPGWQAALLSLPGITNREAKKSRLPILIKPSRSLGNMYRLPATQEVVTQLQSQILELQGELKEFKTCNKQLHQKLILAEAVMEGRPTPDKTLLNAQPPVGAAYQDSPGEQKGIKTTSSVWRDKEMDSDQQRSYEIDSEICPPDDLASLPSCKENPEDVLSPTSVATYLSSKSQPSAKVSVMGTDQSESINTSNETEYLKQKIHDLETELEGYQNFIFQLQKHSQCSEAIITVLCGTEGAQDGLSKPKNGSDGEEMTFSSLHQVRYVKHVKILGPLAPEMIDSRVLENLKQQLEEQEYKLQKEQNLNMQLFSEIHNLQNKFRDLSPPRYDSLVQSQARELSLQRQQIKDGHGICVISRQHMNTMIKAFEELLQASDVDYCVAEGFQEQLNQCAELLEKLEKLFLNGKSVGVEMNTQNELMERIEEDNLTYQHLLPESPEPSASHALSDYETSEKSFFSRDQKQDNETEKTSVMVNSFSQDLLMEHIQEIRTLRKRLEESIKTNEKLRKQLERQGSEFVQGSTSIFASGSELHSSLTSEIHFLRKQNQALNAMLIKGSRDKQKENDKLRESLSRKTVSLEHLQREYASVKEENERLQKEGSEKERHNQQLIQEVRCSGQELSRVQEEVKLRQQLLSQNDKLLQSLRVELKAYEKLDEEHRRLREASGEGWKGQDPFRDLHSLLMEIQALRLQLERSIETSSTLQSRLKEQLARGAEKAQEGALTLAVQAVSIPEVPLQPDKHDGDKYPMESDNSFDLFDSSQAVTPKSVSETPPLSGNDTDSLSCDSGSSATSTPCVSRLVTGHHLWASKNGRHVLGLIEDYEALLKQISQGQRLLAEMDIQTQEAPSSTSQELGTKGPHPAPLSKFVSSVSTAKLTLEEAYRRLKLLWRVSLPEDGQCPLHCEQIGEMKAEVTKLHKKLFEQEKKLQNTMKLLQLSKRQEKVIFDQLVVTHKILRKARGNLELRPGGAHPGTCSPSRPGS

SEQ ID NO: 37322 - protein, 1571 aa, Artificial Sequence
  Synthetic polypeptide
GQEFETSLGNKVEELNSEIEKLSAAFAKAREALQKAQTQEFQGSEDYETALSGKEALSAALRSQNLTKSTENHRLRRSIKKITQELSDLQQERERLEKDLEEAHREKSKGDCTIRDLRNEVEKLRNEVNEREKAMENRYKSLLSESNKKLHNQEQVIKHLTESTNQKDVLLQKFNEKDLEVIQQNCYLMAAEDLELRSEGLITEKCSSQQPPGSKTIFSKEKKQSSDYEELIQVLKKEQDIYTHLVKSLQESDSINNLQAELNKIFALRKQLEQDVLSYQNLRKTLEEQISEIRRREEESFSLYSDQTSYLSICLEENNRFQVEHFSQEELKKKVSDLIQLVKELYTDNQHLKKTIFDLSCMGFQGNGFPDRLASTEQTELLASKEDEDTIKIGEDDEINFLSDQHLQQSNEIMKDLSKGGCKNGYLRHTESKISDCDGAHAPGCLEEGAFINLLAPLFNEKATLLLESRPDLLKVVRELLLGQLFLTEQEVSGEHLDGKTEKTPKQKGELVHFVQTNSFSKPHDELKLSCEAQLVKAGEVPKVGLKDASVQTVATEGDLLRFKHEATREAWEEKPINTALSAEHRPENLHGVPGWQAALLSLPGITNREAKKSRLPILIKPSRSLGNMYRLPATQEVVTQLQSQILELQGELKEFKTCNKQLHQKLILAEAVMEGRPTPDKTLLNAQPPVGAAYQDSPGEQKGIKTTSSVWRDKEMDSDQQRSYEIDSEICPPDDLASLPSCKENPEDVLSPTSVATYLSSKSQPSAKVSVMGTDQSESINTSNETEYLKQKIHDLETELEGYQNFIFQLQKHSQCSEAIITVLCGTEGAQDGLSKPKNGSDGEEMTFSSLHQVRYVKHVKILGPLAPEMIDSRVLENLKQQLEEQEYKLQKEQNLNMQLFSEIHNLQNKFRDLSPPRYDSLVQSQARELSLQRQQIKDGHGICVISRQHMNTMIKAFEELLQASDVDYCVAEGFQEQLNQCAELLEKLEKLFLNGKSVGVEMNTQNELMERIEEDNLTYQHLLPESPEPSASHALSDYETSEKSFFSRDQKQDNETEKTSVMVNSFSQDLLMEHIQEIRTLRKRLEESIKTNEKLRKQLERQGSEFVQGSTSIFASGSELHSSLTSEIHFLRKQNQALNAMLIKGSRDKQKENDKLRESLSRKTVSLEHLQREYASVKEENERLQKEGSEKERHNQQLIQEVRCSGQELSRVQEEVKLRQQLLSQNDKLLQSLRVELKAYEKLDEEHRRLREASGEGWKGQDPFRDLHSLLMEIQALRLQLERSIETSSTLQSRLKEQLARGAEKAQEGALTLAVQAVSIPEVPLQPDKHDGDKYPMESDNSFDLFDSSQAVTPKSVSETPPLSGNDTDSLSCDSGSSATSTPCVSRLVTGHHLWASKNGRHVLGLIEDYEALLKQISQGQRLLAEMDIQTQEAPSSTSQELGTKGPHPAPLSKFVSSVSTAKLTLEEAYRRLKLLWRVSLPEDGQCPLHCEQIGEMKAEVTKLHKKLFEQEKKLQNTMKLLQLSKRQEKVIFDQLVVTHKILRKARGNLELRPGGAHPGTCSPSRPGS

SEQ ID NO: 37323 - protein, 1492 aa, Artificial Sequence
  Synthetic polypeptide
GQEFETSLGNKVEELNSEIEKLSAAFAKAREALQKAQTQEFQGSEDYETALSGKEALSAALRSQNLTKSTENHRLRRSIKKITQELSDLQQERERLEKDLEEAHREKSKGDCTIRDLRNEVEKLRNEVNEREKAMENRYKSLLSESNKKLHNQEQVIKHLTESTNQKDVLLQKFNEKDLEVIQQNCYLMAAEDLELRSEGLITEKCSSQQPPGSKTIFSKEKKQSSDYEELIQVLKKEQDIYTHLVKSLQESDSINNLQAELNKIFALRKQLEQDVLSYQNLRKTLEEQISEIRRREEESFSLYSDQTSYLSICLEENNRFQVEHFSQEELKKKVSDLIQLVKELYTDNQHLKKTIFDLSCMGFQGNGFPDRLASTEQTELLASKEDEDTIKIGEDDEINFLSDQHLQQSNEIMKDLSKGGCKNGYLRHTESKISDCDGAHAPGCLEEGAFINLLAPLFNEKATLLLESRPDLLKVVRELLLGQLFLTEQEVSGEHLDGKTEKTPKQKGELVHFVQTNSFSKPHDELKLSCEAQLVKAGEVPKVGLKDASVQTVATEGDLLRFKHEATREAWEEKPINTALSAEHRPENLHGVPGWQAALLSLPGITNREAKKSRLPILIKPSRSLGNMYRLPATQEVVTQLQSQILELQGELKEFKTCNKQLHQKLILAEAVMEGRPTPDKTLLNAQPPVGAAYQDSPGEQKGIKTTSSVWRDKEMDSDQQRSYEIDSEICPPDDLASLPSCKENPEDVLSPTSVATYLSSKSQPSAKVSVMGTDQSESINTSNETEYLKQKIHDLETELEGYQNFIFQLQKHSQCSEAIITVLCGTEGAQDGLSKPKNGSDGEEMTFSSLHQVRYVKHVKILGPLAPEMIDSRVLENLKQQLEEQEYKLQKEQNLNMQLFSEIHNLQNKFRDLSPPRYDSLVQSQARELSLQRQQIKDGHGICVISRQHMNTMIKAFEELLQASDVDYCVAEGFQEQLNQCAELLEKLEKLFLNGKSVGVEMNTQNELMERIEEDNLTYQHLLPESPEPSASHALSDYETSEKSFFSRDQKQDNETEKTSVMVNSFSQDLLMEHIQEIRTLRKRLEESIKTNEKLRKQLERQGSEFVQGSTSIFASGSELHSSLTSEIHFLRKQNQALNAMLIKGSRDKQKENDKLRESLSRKTVSLEHLQREYASVKEENERLQKEGSEKERHNQQLIQEVRCSGQELSRVQEEVKLRQQLLSQNDKLLQSLRVELKAYEKLDEEHRRLRDGDKYPMESDNSFDLFDSSQAVTPKSVSETPPLSGNDTDSLSCDSGSSATSTPCVSRLVTGHHLWASKNGRHVLGLIEDYEALLKQISQGQRLLAEMDIQTQEAPSSTSQELGTKGPHPAPLSKFVSSVSTAKLTLEEAYRRLKLLWRVSLPEDGQCPLHCEQIGEMKAEVTKLHKKLFEQEKKLQNTMKLLQLSKRQEKVIFDQLVVTHKILRKARGNLELRPGGAHPGTCSPSRPGS

SEQ ID NO: 37324 - protein, 139 aa, Artificial Sequence
  Synthetic polypeptide
GQEFETSLGNKVEELNSEIEKLSAAFAKAREALQKAQTQEFQGSEDYETALSGKEALSAALRSQNLTKSTENHRLRRSIKKITQELSDLQQERERLEKDLEEAHREKSKGDCTIRGLTLFPGLFLNSWAQVILPPQFLE

SEQ ID NO: 37325 - protein, 428 aa, Artificial Sequence
  Synthetic polypeptide
GQEFETSLGNKVEELNSEIEKLSAAFAKAREALQKAQTQEFQGSEDYETALSGKEALSAALRSQNLTKSTENHRLRRSIKKITQELSDLQQERERLEKDLEEAHREKSKGDCTIRDLRNEVEKLRNEVNEREKAMENRYKSLLSESNKKLHNQEQVIKHLTESTNQKDVLLQKFNEKDLEVIQQNCYLMAAEDLELRSEGLITEKCSSQQPPGSKTIFSKEKKQSSDYEELIQVLKKEQDIYTHLVKSLQESDSINNLQAELNKIFALRKQLEQDVLSYQNLRKTLEEQISEIRRREEESFSLYSDQTSYLSICLEENNRFQVEHFSQEELKKKVSDLIQLVKELYTDNQHLKKTIFDLSCMGFQGNGFPDRLASTEQTETSLTYSYIFMLHTFLGCIFTPFHAPCSFWLARRTRTRSKLGRMTRLIS

SEQ ID NO: 37326 - protein, 57 aa, Artificial Sequence
  Synthetic polypeptide
GQEFETSLGNKVEELNSEIEKLSAAFAKAREALQKAQTQEFQGSEDYETALSGKEAL

SEQ ID NO: 37327 - protein, 78 aa, Artificial Sequence
  Synthetic polypeptide
AWWLTPFIPTLWEAEVGGSLEARNLRPAWATRLKNLTLKLKSSVLPLLKPERPYRKHRPRNFRGLKTMRLLYQERKPF

SEQ ID NO: 37328 - protein, 118 aa, Artificial Sequence
  Synthetic polypeptide
SQHFGRLRRVEHKVEIETISPTWVIKTPEIANLALLGFGDIFALLFDNRYLYIMDLRTESLISRWPLPEYRKSKRGSSFLAGEASWLNGLDGHNDTGLVFATSMPDHSIHLVLWKEHG

SEQ ID NO: 37329 - protein, 22 aa, Artificial Sequence
  Synthetic polypeptide
GGWNTRLRSRPSRQHGSSRLLR

SEQ ID NO: 37330 - protein, 13 aa, Artificial Sequence
  Synthetic polypeptide
DRDHLANMGHQDS

SEQ ID NO: 37331 - protein, 11 aa, Artificial Sequence
  Synthetic polypeptide
SQPLGRLRNSL

SEQ ID NO: 37332 - protein, 57 aa, Artificial Sequence
  Synthetic polypeptide
PVIPALQEAKAGGSFEPRNSRPASSTTTTKKISQLWWCMPIVPATREAEELALNACL

SEQ ID NO: 37333 - protein, 111 aa, Artificial Sequence
  Synthetic polypeptide
TGSSAARRSRRRSASSACASASHPTRQGSCCLTKDCCQMRTAPPLSCVREERASLVCCLTNSSSRKGEFIEEKDQSFCWKMLFPVVTSPQPGAPTTTWLAYLTSRWMKFKV

SEQ ID NO: 37334 - protein, 31 aa, Artificial Sequence
  Synthetic polypeptide
QVPLRQGDQEEEVHLPPAHPRPTQPAREAAA

SEQ ID NO: 37335 - protein, 61 aa, Artificial Sequence
  Synthetic polypeptide
TGSSAARRSRRRSASSACASASHPTRQGSCCLTKDCCQMRTAPPLSCVREERASLVCCLTN

SEQ ID NO: 37336 - protein, 6 aa, Artificial Sequence
  Synthetic polypeptide
YHNIWS

SEQ ID NO: 37337 - protein, 392 aa, Artificial Sequence
  Synthetic polypeptide
ITIFGADSHAGVRYITEALIKKLTKQDNLALIKSLNLSLSKDGGKKFKYIENLEKCVKLEVLNLSYNLIGKIEKLDKLLKLRELNLSYNKISKIEGIENMCNLQKLNLAGNEIEHIPVWLGKKLKSLRVLNLKGNKISSLQDISKLKPLQDLISLILVENPVVTLPHYLQFTIFHLRSLESLEGQPVTTQDRQEAFERFSLEEVERLERDLEKKMIETEELKSKQTRFLEEIKNQDKLNKSLKEEAMLQKQSCEELKSDLNTKNELLKQKTIELTRACQKQYELEQELAFYKIDAKFEPLNYYPSEYAEIDKAPDESPYIGKSRYKRNMFATESYIIDSAQAVQIKKMEPDEQLRNDHMNLRGHTPLDTQLEDKEKKISAAQTRLSELHDEI

SEQ ID NO: 37338 - protein, 30 aa, Artificial Sequence
  Synthetic polypeptide
SQYLELIHMQELDILQRPSLKNLLNRIIWL

SEQ ID NO: 37339 - protein, 2257 aa, Artificial Sequence
  Synthetic polypeptide
ITIFGADSHAGVRYITEALIKKLTKQDNLALIKSLNLSLSKDGGKKFKYIENLEKCVKLEVLNLSYNLIGKIEKLDKLLKLRELNLSYNKISKIEGIENMCNLQKLNLAGNEIEHIPVWLGKKLKSLRVLNLKGNKISSLQDISKLKPLQDLISLILVENPVVTLPHYLQFTIFHLRSLESLEGQPVTTQDRQEAFERFSLEEVERLERDLEKKMIETEELKSKQTRFLEEIKNQDKLNKSLKEEAMLQKQSCEELKSDLNTKNELLKQKTIELTRACQKQYELEQELAFYKIDAKFEPLNYYPSEYAEIDKAPDESPYIGKSRYKRNMFATESYIIDSAQAVQIKKMEPDEQLRNDHMNLRGHTPLDTQLEDKEKKISAAQTRLSELHDEIEKAEQQILRATEEFKQLEEAIQLKKISEAGKDLLYKQLSGRLQLVNKLRQEALDLELQMEKQKQEIAGKQKEIKDLQIAIDSLDSKDPKHSHMKAQKSGKEQQLDIMNKQYQQLESRLDEILSRIAKETEEIKDLEEQLTEGQIAANEALKKDLEGVISGLQEYLGTIKGQATQAQNECRKLRDEKETLLQRLTEVEQERDQLEIVAMDAENMRKELAELESALQEQHEVNASLQQTQGDLSAYEAELEARLNLRDAEANQLKEELEKVTRLTQLEQSALQAELEKERQALKNALGKAQFSEEKEQENSELHAKLKHLQDDNNLLKQQLKDFQNHLNHVVDGLVRPEEVAARVDELRRKLKLGTGEMNIHSPSDVLGKSLADLQKQFSEILARSKWERDEAQVRERKLQEEMALQQEKLATGQEEFRQACERALEARMNFDKRQHEARIQQMENEIHYLQENLKSMEEIQGLTDLQLQEADEEKERILAQLRELEKKKKLEDAKSQEQVFGLDKELKKLKKAVATSDKLATAELTIAKDQLKSLHGTVMKINQERAEELQEAERFSRKAAQAARDLTRAEAEIELLQNLLRQKGEQFRLEMEKTGVGTGANSQVLEIEKLNETMERQRTEIARLQNVLDLTGSDNKGGFENVLEEIAELRREVSYQNDYISSMADPFKRRGYWYFMPPPPSSKVSSHSSQATKDSGVGLKYSASTPVRKPRPGQQDGKEGSQPPPASGYWVYSPIRSGLHKLFPSRDADSGGDSQEESELDDQEEPPFVPPPGYMMYTVLPDGSPVPQGMALYAPPPPLPNNSRPLTPGTVVYGPPPAGAPMVYGPPPPNFSIPFIPMGVLHCNVPEHHNLENEVSRLEDIMQHLKSKKREERWMRASKRQSEKEMEELHHNIDDLLQEKKSLECEVEELHRTVQKRQQQKDFIDGNVESLMTELEIEKSLKHHEDIVDEIECIEKTLLKRRSELREADRLLAEAESELSCTKEKTKNAVEKFTDAKRSLLQTESDAEELERRAQETAVNLVKADQQLRSLQADAKDLEQHKIKQEEILKEINKIVAAKDSDFQCLSKKKEKLTEELQKLQKDIEMAERNEDHHLQVLKESEVLLQAKRAELEKLKSQVTSQQQEMAVLDRQLGHKKEELHLLQGSMVQAKADLQEALRLGETEVTEKCNHIREVKSLLEELSFQKGELNVQISERKTQLTLIKQEIEKEEENLQVVLRQMSKHKTELKNILDMLQLENHELQGLKLQHDQRVSELEKTQVAVLEEKLELENLQQISQQQKGEIEWQKQLLERDKREIERMTAESRALQSCVECLSKEKEDLQEKCDIWEKKLAQTKRVLAAAEENSKMEQSNLEKLELNVRKLQQELDQLNRDKLSLHNDISAMQQQLQEKREAVNSLQEELANVQDHLNLAKQDLLHTTKHQDVLLSEQTRLQKDISEWANRFEDCQKEEETKQQQLQVLQNEIEENKLKLVQQEMMFQRLQKERESEESKLETSKVTLKEQQHQLEKELTDQKSKLDQVLSKVLAAEERVRTLQEEERWCESLEKTLSQTKRQLSEREQQLVEKSGELLALQKEADSMRADFSLLRNQFLTERKKAEKQVASLKEALKIQRSQLEKNLLEQKQENSCIQKEMATIELVAQDNHERARRLMKELNQMQYEYTELKKQMANQKDLERRQMEISDAMRTLKSEVKDEIRTSLKNLNQFLPELPADLEAILERNENLEGELESLKENLPFTMNEGPFEEKLNFSQVHIMDEHWRGEALREKLRHREDRLKAQLRHCMSKQAEVLIKGKRQTEGTLHSLRRQVDALGELVTSTSADSASSPSLSQLESSLTEDSQLGQNQEKNASAR

SEQ ID NO: 37340 - protein, 22 aa, Artificial Sequence
  Synthetic polypeptide
EHLDTGRGRKTGKRPRKKDDRN

SEQ ID NO: 37341 - protein, 236 aa, Artificial Sequence
  Synthetic polypeptide
VHVLCRDMVEAGNHHSLQTVTRTENQTPHVLTHRWELNNENTWTQEEVERLERDLEKKMIETEELKSKQTRFLEEIKNQDKLNKSLKEEAMLQKQSCEELKSDLNTKNELLKQKTIELTRACQKQYELEQELAFYKIDAKFEPLNYYPSEYAEIDKAPDESPYIGKSRYKRNMFATESYIIDSAQAVQIKKMEPDEQLRNDHMNLRGHTPLDTQLEDKEKKISAAQTRLSELHDEI

SEQ ID NO: 37342 - protein, 10 aa, Artificial Sequence
  Synthetic polypeptide
TMRTLGHRKR

SEQ ID NO: 37343 - protein, 2101 aa, Artificial Sequence
  Synthetic polypeptide
VHVLCRDMVEAGNHHSLQTVTRTENQTPHVLTHRWELNNENTWTQEEVERLERDLEKKMIETEELKSKQTRFLEEIKNQDKLNKSLKEEAMLQKQSCEELKSDLNTKNELLKQKTIELTRACQKQYELEQELAFYKIDAKFEPLNYYPSEYAEIDKAPDESPYIGKSRYKRNMFATESYIIDSAQAVQIKKMEPDEQLRNDHMNLRGHTPLDTQLEDKEKKISAAQTRLSELHDEIEKAEQQILRATEEFKQLEEAIQLKKISEAGKDLLYKQLSGRLQLVNKLRQEALDLELQMEKQKQEIAGKQKEIKDLQIAIDSLDSKDPKHSHMKAQKSGKEQQLDIMNKQYQQLESRLDEILSRIAKETEEIKDLEEQLTEGQIAANEALKKDLEGVISGLQEYLGTIKGQATQAQNECRKLRDEKETLLQRLTEVEQERDQLEIVAMDAENMRKELAELESALQEQHEVNASLQQTQGDLSAYEAELEARLNLRDAEANQLKEELEKVTRLTQLEQSALQAELEKERQALKNALGKAQFSEEKEQENSELHAKLKHLQDDNNLLKQQLKDFQNHLNHVVDGLVRPEEVAARVDELRRKLKLGTGEMNIHSPSDVLGKSLADLQKQFSEILARSKWERDEAQVRERKLQEEMALQQEKLATGQEEFRQACERALEARMNFDKRQHEARIQQMENEIHYLQENLKSMEEIQGLTDLQLQEADEEKERILAQLRELEKKKKLEDAKSQEQVFGLDKELKKLKKAVATSDKLATAELTIAKDQLKSLHGTVMKINQERAEELQEAERFSRKAAQAARDLTRAEAEIELLQNLLRQKGEQFRLEMEKTGVGTGANSQVLEIEKLNETMERQRTEIARLQNVLDLTGSDNKGGFENVLEEIAELRREVSYQNDYISSMADPFKRRGYWYFMPPPPSSKVSSHSSQATKDSGVGLKYSASTPVRKPRPGQQDGKEGSQPPPASGYWVYSPIRSGLHKLFPSRDADSGGDSQEESELDDQEEPPFVPPPGYMMYTVLPDGSPVPQGMALYAPPPPLPNNSRPLTPGTVVYGPPPAGAPMVYGPPPPNFSIPFIPMGVLHCNVPEHHNLENEVSRLEDIMQHLKSKKREERWMRASKRQSEKEMEELHHNIDDLLQEKKSLECEVEELHRTVQKRQQQKDFIDGNVESLMTELEIEKSLKHHEDIVDEIECIEKTLLKRRSELREADRLLAEAESELSCTKEKTKNAVEKFTDAKRSLLQTESDAEELERRAQETAVNLVKADQQLRSLQADAKDLEQHKIKQEEILKEINKIVAAKDSDFQCLSKKKEKLTEELQKLQKDIEMAERNEDHHLQVLKESEVLLQAKRAELEKLKSQVTSQQQEMAVLDRQLGHKKEELHLLQGSMVQAKADLQEALRLGETEVTEKCNHIREVKSLLEELSFQKGELNVQISERKTQLTLIKQEIEKEEENLQVVLRQMSKHKTELKNILDMLQLENHELQGLKLQHDQRVSELEKTQVAVLEEKLELENLQQISQQQKGEIEWQKQLLERDKREIERMTAESRALQSCVECLSKEKEDLQEKCDIWEKKLAQTKRVLAAAEENSKMEQSNLEKLELNVRKLQQELDQLNRDKLSLHNDISAMQQQLQEKREAVNSLQEELANVQDHLNLAKQDLLHTTKHQDVLLSEQTRLQKDISEWANRFEDCQKEEETKQQQLQVLQNEIEENKLKLVQQEMMFQRLQKERESEESKLETSKVTLKEQQHQLEKELTDQKSKLDQVLSKVLAAEERVRTLQEEERWCESLEKTLSQTKRQLSEREQQLVEKSGELLALQKEADSMRADFSLLRNQFLTERKKAEKQVASLKEALKIQRSQLEKNLLEQKQENSCIQKEMATIELVAQDNHERARRLMKELNQMQYEYTELKKQMANQKDLERRQMEISDAMRTLKSEVKDEIRTSLKNLNQFLPELPADLEAILERNENLEGELESLKENLPFTMNEGPFEEKLNFSQVHIMDEHWRGEALREKLRHREDRLKAQLRHCMSKQAEVLIKGKRQTEGTLHSLRRQVDALGELVTSTSADSASSPSLSQLESSLTEDSQLGQNQEKNASAR

SEQ ID NO: 37344 - protein, 80 aa, Artificial Sequence
  Synthetic polypeptide
GDLCGGSCDAWPKVPSDAEAEGVSLPRVPAQPQQCGGGAGPQHGGRGGHQARAQQHPWPGLLLRGDDVIRKQVLFLPVCS

SEQ ID NO: 37345 - protein, 261 aa, Artificial Sequence
  Synthetic polypeptide
DPRGLGVAATLDQRWDAGAHLLPSLAGLSFSPVKRGEVSICLLGSWRFCEVTCVVVHVTHGPRSHLMPRLKESRSHESLLSPSSAVEALDLSMEEEVVIKPVHSSILGQDYCFEVTTSSGSKCFSCRSAAERDKWMENLRRAVHPNKDNSRRVEHILKLWVIEAKDLPAKKKYLCELCLDDVLYARTTGKLKTDNVFWGEHFEFHNLPPLRTVTVHLYRETDKKKKKERNSYLGLVSLPAASVAGRQFVEKWYPVVTPNPK

SEQ ID NO: 37346 - protein, 7 aa, Artificial Sequence
  Synthetic polypeptide
RMAQGPI

SEQ ID NO: 37347 - protein, 1102 aa, Artificial Sequence
  Synthetic polypeptide
DPRGLGVAATLDQRWDAGAHLLPSLAGLSFSPVKRGEVSICLLGSWRFCEVTCVVVHVTHGPRSHLMPRLKESRSHESLLSPSSAVEALDLSMEEEVVIKPVHSSILGQDYCFEVTTSSGSKCFSCRSAAERDKWMENLRRAVHPNKDNSRRVEHILKLWVIEAKDLPAKKKYLCELCLDDVLYARTTGKLKTDNVFWGEHFEFHNLPPLRTVTVHLYRETDKKKKKERNSYLGLVSLPAASVAGRQFVEKWYPVVTPNPKGGKGPGPMIRIKARYQTITILPMEMYKEFAEHITNHYLGLCAALEPILSAKTKEEMASALVHILQSTGKVKDFLTDLMMSEVDRCGDNEHLIFRENTLATKAIEEYLKLVGQKYLQDALGEFIKALYESDENCEVDPSKCSAADLPEHQGNLKMCCELAFCKIINSYCVFPRELKEVFASWRQECSSRGRPDISERLISASLFLRFLCPAIMSPSLFNLLQEYPDDRTARTLTLIAKVTQNLANFAKFGSKEEYMSFMNQFLEHEWTNMQRFLLEISNPETLSNTAGFEGYIDLGRELSSLHSLLWEAVSQLEQSIVSKLGPLPRILRDVHTALSTPGSGQLPGTNDLASTPGSGSSSISAGLQKMVIENDLSGLIDFTRLPSPTPENKDLFFVTRSSGVQPSPARSSSYSEANEPDLQMANGGKSLSMVDLQDARTLDGEAGSPAGPDVLPTDGQAAAAQLVAGWPARATPVNLAGLATVRRAGQTPTTPGTSEGAPGRPQLLAPLSFQNPVYQMAAGLPLSPRGLGDSGSEGHSSLSSHSNSEELAAAAKLGSFSTAAEELARRPGELARRQMSLTEKGGQPTVPRQNSAGPQRRIDQPPPPPPPPPPAPRGRTPPNLLSTLQYPRPSSGTLASASPDWVGPSTRLRQQSSSSKGDSPELKPRAVHKQGPSPVSPNALDRTAAWLLTMNAQLLEDEGLGPDPPHRDRLRSKDELSQAEKDLAVLQDKLRISTKKLEEYETLFKCQEETTQKLVLEYQARLEEGEERLRRQQEDKDIQMKGIISRLMSVEEELKKDHAEMQAAVDSKQKIIDAQEKRIASLDAANARLMSALTQLKESMH

SEQ ID NO: 37348 - protein, 1131 aa, Artificial Sequence
  Synthetic polypeptide
DPRGLGVAATLDQRWDAGAHLLPSLAGLSFSPVKRGEVSICLLGSWRFCEVTCVVVHVTHGPRSHLMPRLKESRSHESLLSPSSAVEALDLSMEEEVVIKPVHSSILGQDYCFEVTTSSGSKCFSCRSAAERDKWMENLRRAVHPNKDNSRRVEHILKLWVIEAKDLPAKKKYLCELCLDDVLYARTTGKLKTDNVFWGEHFEFHNLPPLRTVTVHLYRETDKKKKKERNSYLGLVSLPAASVAGRQFVEKWYPVVTPNPKGGKGPGPMIRIKARYQTITILPMEMYKEFAEHITNHYLGLCAALEPILSAKTKEEMASALVHILQSTGKVKDFLTDLMMSEVDRCGDNEHLIFRENTLATKAIEEYLKLVGQKYLQDALGEFIKALYESDENCEVDPSKCSAADLPEHQGNLKMCCELAFCKIINSYCVFPRELKEVFASWRQECSSRGRPDISERLISASLFLRFLCPAIMSPSLFNLLQEYPDDRTARTLTLIAKVTQNLANFAKFGSKEEYMSFMNQFLEHEWTNMQRFLLEISNPETLSNTAGFEGYIDLGRELSSLHSLLWEAVSQLEQSIVSKLGPLPRILRDVHTALSTPGSGQLPGTNDLASTPGSGSSSISAGLQKMVIENDLSGLIDFTRLPSPTPENKDLFFVTRSSGVQPSPARSSSYSEANEPDLQMANGGKSLSMVDLQDARTLDGEAGSPAGPDVLPTDGQAAAAQLVAGWPARATPVNLAGLATVRRAGQTPTTPGTSEGAPGRPQLLAPLSFQNPVYQMAAGLPLSPRGLGDSGSEGHSSLSSHSNSEELAAAAKLGSFSTAAEELARRPGELARRQMSLTEKGGQPTVPRQNSAGPQRRIDQPPPPPPPPPPAPRGRTPPNLLSTLQYPRPSSGTLASASPDWVGPSTRLRQQSSSSKGDSPELKPRAVHKQGPSPVSPNALDRTAAWLLTMNAQLLEDEGLGPDPPHRDRLRSKDELSQAEKDLAVLQDKLRISTKKLEEYETLFKCQEETTQKLVLEYQARLEEGEERLRRQQEDKDIQMKGIISRLMSVEEELKKDHAEMQAAVDSKQKIIDAQEKRIASLDAANARLMSALTQLKERYSMQARNGISPTNPTKLQITENGEFRNSSNC

SEQ ID NO: 37349 - protein, 26 aa, Artificial Sequence
  Synthetic polypeptide
SQHFGRLRQEDRFSPGVQDQPMQHKI

SEQ ID NO: 37350 - protein, 98 aa, Artificial Sequence
  Synthetic polypeptide
GRRIASAQEFKTSLCNIRYDHNKNDKILPISLEPSSSTEPTQSNLSVTAKIKAIEAKLKMMAENPDAEYPAAPVYSYFKPPDKKRTTPYSRTAWKSRR

SEQ ID NO: 37351 - protein, 49 aa, Artificial Sequence
  Synthetic polypeptide
YKSNQRAQRNAGETGQTEHQQGQRLFTEGSHQLNEQAEEIQGYSLRGHH

SEQ ID NO: 37352 - protein, 97 aa, Artificial Sequence
  Synthetic polypeptide
PWASCFTLWASISSSANIRVTREHREMLVKLAKQNTNKAKDSLRKVRTNSMNKLKKSKDTVSEDTIRLIEKQISQMADDTVAELDRHLAVKTKELLG

SEQ ID NO: 37353 - protein, 1004 aa, Artificial Sequence
  Synthetic polypeptide
GVTSRYVAMQEEALKLVLLALEDGSALSRKVLVLFVVQRLEPRFPQASKTSIGHVVQLLYRASCFKVTKRDEDSSLMQLKEEFRSYEALRREHDAQIVHIAMEAGLRISPEQWSSLLYGDLAHKSHMQSIIDKLQSPESFAKSVQELTIVLQRTGDPANLNRLRPHLELLANIDPNPDAVSPTWEQLENAMVAVKTVVHGLVDFIQNYSRKGHETPQPQPNSKYKTSMCRDLRQQGGCPRGTNCTFAHSQEELEKYRLRNKKINATVRTFPLLNKVGVNNTVTTTAGNVISVIGSTETTGKIVPSTNGISNAENSVSQLISRSTDSTLRALETVKKVGKVGANGQNAAGPSADSVTENKIGSPPKTPVSNVAATSAGPSNVGTELNSVPQKSSPFLTRVPVYPPHSENIQYFQDPRTQIPFEVPQYPQTGYYPPPPTVPAGVAPCVPRFVRSNNVPESSLPPASMPYADHYSTFSPRDRMNSSPYQPPPPQPYGPVPPVPSGMYAPVYDSRRIWRPPMYQRDDIIRSNSLPPMDVMHSSVYQTSLRERYNSLDGYYSVACQPPSEPRTTVPLPREPCGHLKTSCEEQIRRKPDQWAQYHTQKAPLVSSTLPVATQSPTPPSPLFSVDFRADFSESVSGTKFEEDHLSHYSPWSCGTIGSCINAIDSEPKDVIANSNAVLMDLDSGDVKRRVHLFETQRRTKEEDPIIPFSDGPIISKWGAISRSSRTGYHTTDPVQATASQGSATKPISVSDYVPYVNAVDSRWSSYGNEATSSAHYVERDRFIVTDLSGHRKHSSTGDLLSLELQQAKSNSLLLQREANALAMQQKWNSLDEGRHLTLNLLSKEIELRNGELQSDYTEDATDTKPDRDIELELSALDTDEPDGQSEPIEEILDIQLGISSQNDQLLNGMAVENGHPVQQHQKEPPKQKKQSLGEDHVILEEQKTILPVTSCFSQPLPVSISNASCLPITTSVSAGNLILKTHVMSEDKNDFLKPVANGKMVNS

SEQ ID NO: 37354 - protein, 11 aa, Artificial Sequence
  Synthetic polypeptide
PPDTLLCKKRP

SEQ ID NO: 37355 - protein, 81 aa, Artificial Sequence
  Synthetic polypeptide
YYAAVERNEEEVYILLGCDLQIRCYARRGLEAGVTGIRRWFCPLKESSGTFCCAETRTKISSGIKNKYWSCCATTVSSFLF

SEQ ID NO: 37356 - protein, 291 aa, Artificial Sequence
  Synthetic polypeptide
GVTSRYVAMQEEALKLVLLALEDGSALSRKVLVLFVVQRLEPRFPQASKTSIGHVVQLLYRASCFKVTKRDEDSSLMQLKEEFRSYEALRREHDAQIVHIAMEAGLRISPEQWSSLLYGDLAHKSHMQSIIDKLQSPESFAKSVQELTIVLQRTGDPANLNRLRPHLELLANIDPNPDAVSPTWEQLENAMVAVKTVVHGLVDFIQNYSRKGHETPQPQPNSKYKTSMCRDLRQQGGCPRGTNCTFAHSQEELEKYRLRNKKINATEVLKQQGKLFQVQTEFQMQKTVFPS

SEQ ID NO: 37357 - protein, 877 aa, Artificial Sequence
  Synthetic polypeptide
GVTSRYVAMQEEALKLVLLALEDGSALSRKVLVLFVVQRLEPRFPQASKTSIGHVVQLLYRASCFKVTKRDEDSSLMQLKEEFRSYEALRREHDAQIVHIAMEAGLRISPEQWSSLLYGDLAHKSHMQSIIDKLQSPESFAKSVQELTIVLQRTGDPANLNRLRPHLELLANIDPNPDAVSPTWEQLENAMVAVKTVVHGLVDFIQNYSRKGHETPQPQPNSKYKTSMCRDLRQQGGCPRGTNCTFAHSQEELEKYRLRNKKINATVRTFPLLNKVGVNNTVTTTAGNVISVIGSTETTGKIVPSTNGISNAENSVSQLISRSTDSTLRALETVKKVGKVGANGQNAAGPSADSVTENKIGSPPKTPVSNVAATSAGPSNVGTELNSVPQKSSPFLTRVPVYPPHSENIQYFQDPRTQIPFEVPQYPQTGYYPPPPTVPAGVAPCVPRFVRSNNVPESSLPPASMPYADHYSTFSPRDRMNSSPYQPPPPQPYGPVPPVPSGMYAPVYDSRRIWRPPMYQRDDIIRSNSLPPMDVMHSSVYQTSLRERYNSLDGYYSVACQPPSEPRTTVPLPREPCGHLKTSCEEQIRRKPDQWAQYHTQKAPLVSSTLPVATQSPTPPSPLFSVDFRADFSESVSGTKFEEDHLSHYSPWSCGTIGSCINAIDSEPKDVIANSNAVLMDLDSGDVKRRVHLFETQRRTKEEDPIIPFSDGPIISKWGAISRSSRTGYHTTDPVQATASQGSATKPISVSDYVPYVNAVDSRWSSYGNEATSSAHYVERDRFIVTDLSGHRKHSSTGDLLSLELQQAKSNSLLLQREANALAMQQKWNSLDEGRHLTLNLLSKEIELRNGEVKKLNLSASCLMYLFSAAASWLYHY

SEQ ID NO: 37358 - protein, 319 aa, Artificial Sequence
  Synthetic polypeptide
GVTSRYVAMQEEALKLVLLALEDGSALSRKVLVLFVVQRLEPRFPQASKTSIGHVVQLLYRASCFKVTKRDEDSSLMQLKEEFRSYEALRREHDAQIVHIAMEAGLRISPEQWSSLLYGDLAHKSHMQSIIDKLQSPESFAKSVQELTIVLQRTGDPANLNRLRPHLELLANIDPNPDAVSPTWEQLENAMVAVKTVVHGLVDFIQNYSRKGHETPQPQPNSKYKTSMCRDLRQQGGCPRGTNCTFAHSQEELEKCNPRGLYLHCCLLSSVASLGTVHNELYKQQHCDREKISVCAVKRAETCFSSQFFSPLEVPREED

SEQ ID NO: 37359 - protein, 7 aa, Artificial Sequence
  Synthetic polypeptide
ALYKAKV

SEQ ID NO: 37360 - protein, 10 aa, Artificial Sequence
  Synthetic polypeptide
SEHFIRLRCS

SEQ ID NO: 37361 - protein, 30 aa, Artificial Sequence
  Synthetic polypeptide
RWKKILEEIIVEYFPEVINDINHWLQRTQL

SEQ ID NO: 37362 - protein, 13 aa, Artificial Sequence
  Synthetic polypeptide
IIGFKEHNCREWK

SEQ ID NO: 37363 - protein, 1036 aa, Artificial Sequence
  Synthetic polypeptide
IFSRSDKRYKSLASKNTIVGNGSEQQLQKELADVLMDPPMDDQPGEKELVKRSQLDGEGDGPLSNQLSASSTINPVPLVGLQKPEMSLPVKPGQGDSEASSPFTPVADEDSVVFSKLTYLGCASVNAPRSEVEALRMMSILRSQCQISLDVTLSVPNVSEGIVRLLDPQTNTEIANYPIYKILFCVRGHDGTPESDCFAFTESHYNAELFRIHVFRCEIQEAVSRILYSFATAFRRSAKQTPLSATAAPQTPDSDIFTFSVSLEIKEDDGKGYFSAVPKDKDRQCFKLRQGIDKKIVIYVQQTTNKELAIERCFGLLLSPGKDVRNSDMHLLDLESMGKSSDGKSYVITGSWNPKSPHFQVVNEETPKDKVLFMTTAVDLVITEVQEPVRFLLETKVRVCSPNERLFWPFSKRSTTENFFLKLKQIKQRERKNNTDTLYEVVCLESESERERRKTTASPSVRLPQSGSQSSVIPSPPEDDEEEDNDEPLLSGSGDVSKECAEKILETWGELLSKWHLNLNVRPKQLSSLVRNGVPEALRGEVWQLLAGCHNNDHLVEKYRILITKESPQDSAITRDINRTFPAHDYFKDTGGDGQDSLYKICKAYSVYDEEIGYCQGQSFLAAVLLLHMPEEQAFSVLVKIMFDYGLRELFKQNFEDLHCKFYQLERLMQEYIPDLYNHFLDISLEAHMYASQWFLTLFTAKFPLYMVFHIIDLLLCEGISVIFNVALGLLKTSKDDLLLTDFEGALKFFRVQLPKRYRSEENAKKLMELACNMKISQKKLKKYEKEYHTMREQQAQQEDPIERFERENRRLQEANMRLEQENDDLAHELVTSKIALRKDLDNAEEKADALNKELLMTKQKLIDAEEEKRRLEEESAQLKEMCRRELDKAESEIKKNSSIIGDYKQICSQLSERLEKQQTANKVEIEKIRQKVDDCERCREFFNKEGRVKGISSTKEVLDEDTDEEKETLKNQLREMELELAQTKLQLVEAECKIQDLEHHLGLALNEVQAAKKTWFNRTLSSIKTATGVQGKETC

SEQ ID NO: 37364 - protein, 79 aa, Artificial Sequence
  Synthetic polypeptide
IFSRSDKRYKSLASKNTIVGNGSEQQLQKELADVLMDPPMDDQPGEKELVKRSQLDGEGDGPLSNQLSASSTINPVPLV

SEQ ID NO: 37365 - protein, 92 aa, Artificial Sequence
  Synthetic polypeptide
GRAQWLTPVIPALSKTEAGGLPEESPQDSAITRDINRTFPAHDYFKDTGGDGQDSLYKICKVFHVKKKKDSILSGGSTLKLHKKQLQSVICI

SEQ ID NO: 37366 - protein, 63 aa, Artificial Sequence
  Synthetic polypeptide
SQHFRRPRLVDYLRSLPRTVLSPGILTEHSQPMTTLRTQEEMDKIPYIKYARYFMSKKKRTQF

SEQ ID NO: 37367 - protein, 494 aa, Artificial Sequence
  Synthetic polypeptide
GRAQWLTPVIPALSKTEAGGLPEESPQDSAITRDINRTFPAHDYFKDTGGDGQDSLYKICKAYSVYDEEIGYCQGQSFLAAVLLLHMPEEQAFSVLVKIMFDYGLRELFKQNFEDLHCKFYQLERLMQEYIPDLYNHFLDISLEAHMYASQWFLTLFTAKFPLYMVFHIIDLLLCEGISVIFNVALGLLKTSKDDLLLTDFEGALKFFRVQLPKRYRSEENAKKLMELACNMKISQKKLKKYEKEYHTMREQQAQQEDPIERFERENRRLQEANMRLEQENDDLAHELVTSKIALRKDLDNAEEKADALNKELLMTKQKLIDAEEEKRRLEEESAQLKEMCRRELDKAESEIKKNSSIIGDYKQICSQLSERLEKQQTANKVEIEKIRQKVDDCERCREFFNKEGRVKGISSTKEVLDEDTDEEKETLKNQLREMELELAQTKLQLVEAECKIQDLEHHLGLALNEVQAAKKTWFNRTLSSIKTATGVQGKETC

SEQ ID NO: 37368 - protein, 131 aa, Artificial Sequence
  Synthetic polypeptide
SQHFRRPRLVDYLRSLPRTVLSPGILTEHSQPMTTLRTQEEMDKIPYIKYARLILCMMKRLVIARASHFLLLCSFSICLKNRHSVFWSRSCLTMGSGNFSSKTSKICIANFTSWSASCRNTFLTCTTTSWI

SEQ ID NO: 37369 - protein, 450 aa, Artificial Sequence
  Synthetic polypeptide
GQAHWLTPVIPVLWESKAYSVYDEEIGYCQGQSFLAAVLLLHMPEEQAFSVLVKIMFDYGLRELFKQNFEDLHCKFYQLERLMQEYIPDLYNHFLDISLEAHMYASQWFLTLFTAKFPLYMVFHIIDLLLCEGISVIFNVALGLLKTSKDDLLLTDFEGALKFFRVQLPKRYRSEENAKKLMELACNMKISQKKLKKYEKEYHTMREQQAQQEDPIERFERENRRLQEANMRLEQENDDLAHELVTSKIALRKDLDNAEEKADALNKELLMTKQKLIDAEEEKRRLEEESAQLKEMCRRELDKAESEIKKNSSIIGDYKQICSQLSERLEKQQTANKVEIEKIRQKVDDCERCREFFNKEGRVKGISSTKEVLDEDTDEEKETLKNQLREMELELAQTKLQLVEAECKIQDLEHHLGLALNEVQAAKKTWFNRTLSSIKTATGVQGKETC

SEQ ID NO: 37370 - protein, 87 aa, Artificial Sequence
  Synthetic polypeptide
SQYFGSPRLILCMMKRLVIARASHFLLLCSFSICLKNRHSVFWSRSCLTMGSGNFSSKTSKICIANFTSWSASCRNTFLTCTTTSWI

SEQ ID NO: 37371 - protein, 21 aa, Artificial Sequence
  Synthetic polypeptide
PGTLAHTCNPSTLGVQGLFCV

SEQ ID NO: 37372 - protein, 59 aa, Artificial Sequence
  Synthetic polypeptide
KLYQLCLLSPLLPLPPPLLPLLPLRQKDQPLFLLLLSLPIMRTTRMKTFMMIHFHLVNN

SEQ ID NO: 37373 - protein, 262 aa, Artificial Sequence
  Synthetic polypeptide
IISQKKLKKYEKEYHTMREQQAQQEDPIERFERENRRLQEANMRLEQENDDLAHELVTSKIALRKDLDNAEEKADALNKELLMTKQKLIDAEEEKRRLEEESAQLKEMCRRELDKAESEIKKNSSIIGDYKQICSQLSERLEKQQTANKVEIEKIRQKVDDCERCREFFNKEGRVKGISSTKEVLDEDTDEEKETLKNQLREMELELAQTKLQLVEAECKIQDLEHHLGLALNEVQAAKKTWFNRTLSSIKTATGVQGKETC

SEQ ID NO: 37374 - protein, 277 aa, Artificial Sequence
  Synthetic polypeptide
PGTMDRPQGAHEPSEMISQKKLKKYEKEYHTMREQQAQQEDPIERFERENRRLQEANMRLEQENDDLAHELVTSKIALRKDLDNAEEKADALNKELLMTKQKLIDAEEEKRRLEEESAQLKEMCRRELDKAESEIKKNSSIIGDYKQICSQLSERLEKQQTANKVEIEKIRQKVDDCERCREFFNKEGRVKGISSTKEVLDEDTDEEKETLKNQLREMELELAQTKLQLVEAECKIQDLEHHLGLALNEVQAAKKTWFNRTLSSIKTATGVQGKETC

SEQ ID NO: 37375 - protein, 2 aa, Artificial Sequence
  Synthetic polypeptide
ND

SEQ ID NO: 37376 - protein, 36 aa, Artificial Sequence
  Synthetic polypeptide
WFYKRLFPNFTLHVCHHVKKDVFASPSAMIVLGLQL

SEQ ID NO: 37377 - protein, 350 aa, Artificial Sequence
  Synthetic polypeptide
EAFPQLHSARLPPCEEGCVCFPFCHDCAGSSALKRPFEDGLGDDKDPNKKMKRNLRKILDSKAIDLMNALMRLNQIRPGLQYKLLSQSGPVHAPVFTMSVDVDGTTYEASGPSKKTAKLHVAVKVLQAMGYPTGFDADIECMSSDEKSDNESKNETVSSNSSNNTGNSTTETSSTLEVRTQGPILTASGKNPVMELNEKRRGLKYELISETGGSHDKRFVMEVEVDGQKFRGAGPNKKVAKASAALAALEKLFSGPNAANNKKKKIIPQAKGVVNTAVSAAVQAVRGRGRGTLTRGAFVGATAAPGYIAPGYGTPYGYSTAAPAYGLPKRMVLLPVMKFPTYPVPHYSFF

SEQ ID NO: 37378 - protein, 485 aa, Artificial Sequence
  Synthetic polypeptide
HRPQPYRTLRESDSAEGDEAESPEQQVRKSTGPVPAPPDRAASIDLLEDVFSNLDMEAALQPLGQAKSLEDLRAPKDLREQPGTFDYQRLDLGGSERSRGVTVALKLTHPYNKLWSLGQDDMAIPSKPPAASPEKPSALLGNSLALPRRPQNRDSILNPSDKEEVPTPTLGSITIPRPQGRKTPELGIVPPPPIPRPAKLQAAGAALGDVSERLQTDRDRRAALSPGLLPGVVPQGPTELLQPLSPGPGAAGTSSDALLALLDPLSTAWSGSTLPSRPATPNVATPFTPQFSFPPAGTPTPFPQPPLNPFVPSMPAAPPTLPLVSTPAGPFGAPPASLGPAFASGLLLSSAGFCAPHRSQPNLSALSMPNLFGQMPMGTHTSPLQPLGPPAVAPSRIRTLPLARSSARAAETKQGLALRPGDPPLLPPRPPQGLEPTLQPSAPQQARDPFEDLLQKTKQDVSPSPALAPAPDSVEQLRKQWETFE

SEQ ID NO: 37379 - protein, 86 aa, Artificial Sequence
  Synthetic polypeptide
MKPLKLGFHFHLLRVLCDIGRSRIGHSGSQTARKATRQRVQSSKCGSPQALSQLPLTGLPASTFWKTSSATWTWRPHCSHWARPRA

SEQ ID NO: 37380 - protein, 151 aa, Artificial Sequence
  Synthetic polypeptide
APDQTMPSISSDRAALCAGCGGKISDRYYLLAVDKQWHMRCLKCCECKLNLESELTCFSKDGSIYCKEDYYRRFSVQRCARCHLGISASEMVMRARDLVYHLNCFTCTTCNKMLTTGDHFGMKDSLVYCRLHFEALLQGEYPAHFNHADVA

SEQ ID NO: 37381 - protein, 108 aa, Artificial Sequence
  Synthetic polypeptide
LQVSASMSSHFGKGLPEPQTRPCRPSAVTAPRCAPAAGARSRTATTCWRWTSSGTCAASSAASASSTWSRSSPVSARTVASTARKTTTGASLCSAAPAATWASRPRRW

SEQ ID NO: 37382 - protein, 84 aa, Artificial Sequence
  Synthetic polypeptide
RLAPPTSAASSRSPPHTGHSGFRAGLAPSCQERSPSTTSFSTPCPLPTNCNPGAPIDFRSQLRCHHTLGKAFLSPRPDHAVHQQ

SEQ ID NO: 37383 - protein, 370 aa, Artificial Sequence
  Synthetic polypeptide
APDQTMPSISSDRAALCAGCGGKISDRYYLLAVDKQWHMRCLKCCECKLNLESELTCFSKDGSIYCKEDYYRRFSVQRCARCHLGISASEMVMRARDLVYHLNCFTCTTCNKMLTTGDHFGMKDSLVYCRLHFEALLQGEYPAHFNHADVAAAAAAAAAAKSAGLGAAGANPLGLPYYNGVGTVQKGRPRKRKSPGPGADLAAYNAALSCNENDAEHLDRDQPYPSSQKTKRMRTSFKHHQLRTMKSYFAINHNPDAKDLKQLAQKTGLTKRVLQVWFQNARAKFRRNLLRQENTGVDKSTDAALQTGTPSGPASELSNASLSPSSTPTTLTDLTSPTLPTVTSVLTSVPGNLEGHEPHSPSQTTLTNLF

SEQ ID NO: 37384 - protein, 378 aa, Artificial Sequence
  Synthetic polypeptide
APDQTMPSISSDRAALCAGCGGKISDRYYLLAVDKQWHMRCLKCCECKLNLESELTCFSKDGSIYCKEDYYSPSLHGPYRRFSVQRCARCHLGISASEMVMRARDLVYHLNCFTCTTCNKMLTTGDHFGMKDSLVYCRLHFEALLQGEYPAHFNHADVAAAAAAAAAAKSAGLGAAGANPLGLPYYNGVGTVQKGRPRKRKSPGPGADLAAYNAALSCNENDAEHLDRDQPYPSSQKTKRMRTSFKHHQLRTMKSYFAINHNPDAKDLKQLAQKTGLTKRVLQVWFQNARAKFRRNLLRQENTGVDKSTDAALQTGTPSGPASELSNASLSPSSTPTTLTDLTSPTLPTVTSVLTSVPGNLEGHEPHSPSQTTLTNLF

SEQ ID NO: 37385 - protein, 116 aa, Artificial Sequence
  Synthetic polypeptide
LQVSASMSSHFGKGLPEPQTRPCRPSAVTAPRCAPAAGARSRTATTCWRWTSSGTCAASSAASASSTWSRSSPVSARTVASTARKTTTAPPSMVPTGASLCSAAPAATWASRPRRW

SEQ ID NO: 37386 - protein, 50 aa, Artificial Sequence
  Synthetic polypeptide
GLARWHTPVIPALWEAKVGGSPEVLAPWQQWLYLKISLGQTWRRRKPRIW

SEQ ID NO: 37387 - protein, 24 aa, Artificial Sequence
  Synthetic polypeptide
SQHFGRPRLADHLRFWLLGSNGCI

SEQ ID NO: 37388 - protein, 34 aa, Artificial Sequence
  Synthetic polypeptide
GLARWHTPVIPALWEAKVGGSPEVLAPWQQWLYL

SEQ ID NO: 37389 - protein, 14 aa, Artificial Sequence
  Synthetic polypeptide
YKSTQNKVVHFCFR

SEQ ID NO: 37390 - protein, 442 aa, Artificial Sequence
  Synthetic polypeptide
IKVPKTKLFISVSDDRAEQRTCLICGDRATGLHYGIISCEGCKGFFKRSICNKRVYRCSRDKNCVMSRKQRNRCQYCRLLKCLQMGMNRKAIREDGMPGGRNKSIGPVQISEEEIERIMSGQEFEEEANHWSNHGDSDHSSPGNRASESNQPSPGSTLSSSRSVELNGFMAFREQYMGMSVPPHYQYIPHLFSYSGHSPLLPQQARSLDPQSYSLIHQLLSAEDLEPLGTPMLIEDGYAVTQAELFALLCRLADELLFRQIAWIKKLPFFCELSIKDYTCLLSSTWQELILLSSLTVYSKQIFGELADVTAKYSPSDEELHRFSDEGMEVIERLIYLYHKFHQLKVSNEEYACMKAINFLNQDIRGLTSASQLEQLNKRYWYICQDFTEYKYTHQPNRFPDLMMCLPEIRYIAGKMVNVPLEQLPLLFKVVLHSCKTSVGKE

SEQ ID NO: 37391 - protein, 85 aa, Artificial Sequence
  Synthetic polypeptide
KYPKQSCSFLFQMIGLNNEPVSFVGTALQACTMGSSPVRAAKGFSSGAFATNGYIDAVVTRTVSCLGSRGTGASTAACSNASRWG

SEQ ID NO: 37392 - protein, 441 aa, Artificial Sequence
  Synthetic polypeptide
IKVPKTKLFISVSDDRAEQRTCLICGDRATGLHYGIISCEGCKGFFKRSICNKRVYRCSRDKNCVMSRKQRNRCQYCRLLKCLQMGMNRKAIREDGMPGGRNKSIGPVQISEEEIERIMSGQEFEEEANHWSNHGDSDHSSPGNRASESNQPSPGSTLSSRSVELNGFMAFREQYMGMSVPPHYQYIPHLFSYSGHSPLLPQQARSLDPQSYSLIHQLLSAEDLEPLGTPMLIEDGYAVTQAELFALLCRLADELLFRQIAWIKKLPFFCELSIKDYTCLLSSTWQELILLSSLTVYSKQIFGELADVTAKYSPSDEELHRFSDEGMEVIERLIYLYHKFHQLKVSNEEYACMKAINFLNQDIRGLTSASQLEQLNKRYWYICQDFTEYKYTHQPNRFPDLMMCLPEIRYIAGKMVNVPLEQLPLLFKVVLHSCKTSVGKE

SEQ ID NO: 37393 - protein, 236 aa, Artificial Sequence
  Synthetic polypeptide
IKVPKTKLFISVSDDRAEQRTCLICGDRATGLHYGIISCEGCKGFFKRSICNKRVYRCSRDKNCVMSRKQRNRCQYCRLLKCLQMGMNRKAIREDGMPGGRNKSIGPVQISEEEIERIMSGQEFEEEANHWSNHGDSDHSSPGNRASESNQPSPGSTLSSSRSVELNGFMAFREQYMGMSVPPHYQYIPHLFSYSGHSPLLPQQARSLDPQSYSLIHQLLSAEDLEPLGTPMLIED

SEQ ID NO: 37394 - protein, 15 aa, Artificial Sequence
  Synthetic polypeptide
QPSRPEIHCPCSHSY

SEQ ID NO: 37395 - protein, 92 aa, Artificial Sequence
  Synthetic polypeptide
KIRWVWWYRPVVPATLEAEAGGSLEPRSWEAMMGPLLFSLVDSRVVRKSIARVLTVINQTQKENLRKFYKAAAGGPCIQMDRVLPQPPACSC

SEQ ID NO: 37396 - protein, 60 aa, Artificial Sequence
  Synthetic polypeptide
WGHCSSVWLTAESSGNPLPVFSQLLTRLRKKTSGNSTRQQLVGPAYRWTEYCLSPQHALA

SEQ ID NO: 37397 - protein, 119 aa, Artificial Sequence
  Synthetic polypeptide
KIRWVWWYRPVVPATLEAEAGGSLEPRSWEAMMGPLLFSLVDSRVVRKSIARVLTVINQTQKENLRKFYKGKKYKPLDLRPKKTRAMRRRLNKHEENLKTKKQQRKERLYPLRKYAVKA

SEQ ID NO: 37398 - protein, 65 aa, Artificial Sequence
  Synthetic polypeptide
WGHCSSVWLTAESSGNPLPVFSQLLTRLRKKTSGNSTRARSTSPWTCGLRRHVPCAAGSTSTRRT

SEQ ID NO: 37399 - protein, 4 aa, Artificial Sequence
  Synthetic polypeptide
PGTP

SEQ ID NO: 37400 - protein, 31 aa, Artificial Sequence
  Synthetic polypeptide
KYKISQVHLDCPWRQPLCSSWPQLFIFTPSW

SEQ ID NO: 37401 - protein, 319 aa, Artificial Sequence
  Synthetic polypeptide
PTWRNPISTKNIKLARYTLTVPGDSPCARVGHSCSYLPPVGNAKRGKVFIVGGANPNRSFSDVHTMDLETRTWTTPEVTSPPPSPRTFHTSSAAIGNQLYVFGGGERGAQPVQDTKLHVFDANTLTWSQPETLGNPPSPRHGHVMVAAGTKLFIHGGLAGDRFYDDLHCIDISDMKWQKLNPTGAAPAGCAAHSAVAMGKHVYIFGGMTPAGALDTMYQYHTEEQHWTLLKFDTLLPPGRLDHSMCIIPWPVTCASEKEDSNSLTLNHEAEKEDSADKVMSHSGDSHEESQTATLLCLVFGGMNTEGEIYDDCIVTVVD

SEQ ID NO: 37402 - protein, 370 aa, Artificial Sequence
  Synthetic polypeptide
PTWRNPISTKNIKLARYTLTVPGDSPCARVGHSCSYLPPVGNAKRGKVFIVGGANPNRSFSDVHTMDLGKHQWDLDTCKGLLPRYEHASFIPSCTPDRIWVFGGANQSGNRNCLQVLNPETRTWTTPEVTSPPPSPRTFHTSSAAIGNQLYVFGGGERGAQPVQDTKLHVFDANTLTWSQPETLGNPPSPRHGHVMVAAGTKLFIHGGLAGDRFYDDLHCIDISDMKWQKLNPTGAAPAGCAAHSAVAMGKHVYIFGGMTPAGALDTMYQYHTEEQHWTLLKFDTLLPPGRLDHSMCIIPWPVTCASEKEDSNSLTLNHEAEKEDSADKVMSHSGDSHEESQTATLLCLVFGGMNTEGEIYDDCIVTVVD

SEQ ID NO: 37403 - protein, 152 aa, Artificial Sequence
  Synthetic polypeptide
PTWRNPISTKNIKLARYTLTVPGDSPCARVGHSCSYLPPVGNAKRGKVFIVGGANPNRSFSDVHTMDLGKHQWDLDTCKGLLPRYEHASFIPSCTPDRIWVFGGANQSGNRNCLQVLNPAFKSWGFWTVLANPKYHLHSSLMFKPGRGPRQK

SEQ ID NO: 37404 - protein, 159 aa, Artificial Sequence
  Synthetic polypeptide
PTWRNPISTKNIKLARYTLTVPGDSPCARVGHSCSYLPPVGNAKRGKVFIVGGANPNRSFSDVHTMDLGKHQWDLDTCKGLLPRYEHASFIPSCTPDRIWVFGGANQSGNRNCLQVLNPETRTWTTPEVTSPPPSPRTFHTSSAAIGNQLYVFGGGERG

SEQ ID NO: 37405 - protein, 9 aa, Artificial Sequence
  Synthetic polypeptide
SLNISGGTP

SEQ ID NO: 37406 - protein, 29 aa, Artificial Sequence
  Synthetic polypeptide
TFLEVHLDCPWRQPLCSSWPQLFIFTPSW

SEQ ID NO: 37407 - protein, 309 aa, Artificial Sequence
  Synthetic polypeptide
TEHFWRYTLTVPGDSPCARVGHSCSYLPPVGNAKRGKVFIVGGANPNRSFSDVHTMDLETRTWTTPEVTSPPPSPRTFHTSSAAIGNQLYVFGGGERGAQPVQDTKLHVFDANTLTWSQPETLGNPPSPRHGHVMVAAGTKLFIHGGLAGDRFYDDLHCIDISDMKWQKLNPTGAAPAGCAAHSAVAMGKHVYIFGGMTPAGALDTMYQYHTEEQHWTLLKFDTLLPPGRLDHSMCIIPWPVTCASEKEDSNSLTLNHEAEKEDSADKVMSHSGDSHEESQTATLLCLVFGGMNTEGEIYDDCIVTVVD

SEQ ID NO: 37408 - protein, 360 aa, Artificial Sequence
  Synthetic polypeptide
TEHFWRYTLTVPGDSPCARVGHSCSYLPPVGNAKRGKVFIVGGANPNRSFSDVHTMDLGKHQWDLDTCKGLLPRYEHASFIPSCTPDRIWVFGGANQSGNRNCLQVLNPETRTWTTPEVTSPPPSPRTFHTSSAAIGNQLYVFGGGERGAQPVQDTKLHVFDANTLTWSQPETLGNPPSPRHGHVMVAAGTKLFIHGGLAGDRFYDDLHCIDISDMKWQKLNPTGAAPAGCAAHSAVAMGKHVYIFGGMTPAGALDTMYQYHTEEQHWTLLKFDTLLPPGRLDHSMCIIPWPVTCASEKEDSNSLTLNHEAEKEDSADKVMSHSGDSHEESQTATLLCLVFGGMNTEGEIYDDCIVTVVD

SEQ ID NO: 37409 - protein, 142 aa, Artificial Sequence
  Synthetic polypeptide
TEHFWRYTLTVPGDSPCARVGHSCSYLPPVGNAKRGKVFIVGGANPNRSFSDVHTMDLGKHQWDLDTCKGLLPRYEHASFIPSCTPDRIWVFGGANQSGNRNCLQVLNPAFKSWGFWTVLANPKYHLHSSLMFKPGRGPRQK

SEQ ID NO: 37410 - protein, 149 aa, Artificial Sequence
  Synthetic polypeptide
TEHFWRYTLTVPGDSPCARVGHSCSYLPPVGNAKRGKVFIVGGANPNRSFSDVHTMDLGKHQWDLDTCKGLLPRYEHASFIPSCTPDRIWVFGGANQSGNRNCLQVLNPETRTWTTPEVTSPPPSPRTFHTSSAAIGNQLYVFGGGERG

SEQ ID NO: 37411 - protein, 60 aa, Artificial Sequence
  Synthetic polypeptide
TWKAEVAASQDRTTALQPGHSDLVTARDTWKSSISPAWSCDGGSRDKALHPRRLGGGQIL

SEQ ID NO: 37412 - protein, 241 aa, Artificial Sequence
  Synthetic polypeptide
KKFSWAWWCTLVIPATQEAEAGESLEPGRQRLQQAKIAPLHSSLDTLTWSQPETLGNPPSPRHGHVMVAAGTKLFIHGGLAGDRFYDDLHCIDISDMKWQKLNPTGAAPAGCAAHSAVAMGKHVYIFGGMTPAGALDTMYQYHTEEQHWTLLKFDTLLPPGRLDHSMCIIPWPVTCASEKEDSNSLTLNHEAEKEDSADKVMSHSGDSHEESQTATLLCLVFGGMNTEGEIYDDCIVTVVD

SEQ ID NO: 37413 - protein, 34 aa, Artificial Sequence
  Synthetic polypeptide
SQLLRRLRQENRLNLEGRGCSKPRSHHCTPAWTL

SEQ ID NO: 37414 - protein, 88 aa, Artificial Sequence
  Synthetic polypeptide
EVRSPSARQPPRLGSHAIFKLTYLSNHDYKHLYFESDAATVNEIVLKVNYILESRASTARADYFAQKQRKLNRRTSFSFQKEKKSGQQ

SEQ ID NO: 37415 - protein, 21 aa, Artificial Sequence
  Synthetic polypeptide
GAPPPGSHPVWEVTQYLNSRI

SEQ ID NO: 37416 - protein, 32 aa, Artificial Sequence
  Synthetic polypeptide
EVRSPSARQPPRLRSEEPLRPAATPSGKSRNI

SEQ ID NO: 37417 - protein, 47 aa, Artificial Sequence
  Synthetic polypeptide
EVRSPSARQPPRLGSHAIFKLTYLSNHDYKHLYFESDAATVNEIVLK

SEQ ID NO: 37418 - protein, 10 aa, Artificial Sequence
  Synthetic polypeptide
EVTQYLNSRI

SEQ ID NO: 37419 - protein, 32 aa, Artificial Sequence
  Synthetic polypeptide
EVRRPSAWQPPRLRSEEPLRPAAAPSEKSRNI

SEQ ID NO: 37420 - protein, 88 aa, Artificial Sequence
  Synthetic polypeptide
EVRSPSARQPPRLRSHAIFKLTYLSNHDYKHLYFESDAATVNEIVLKVNYILESRASTARADYFAQKQRKLNRRTSFSFQKEKKSGQQ

SEQ ID NO: 37421 - protein, 47 aa, Artificial Sequence
  Synthetic polypeptide
EVRSPSARQPPRLRSHAIFKLTYLSNHDYKHLYFESDAATVNEIVLK

SEQ ID NO: 37422 - protein, 42 aa, Artificial Sequence
  Synthetic polypeptide
GAPLPGRDPVWEVKSVSARPPLLRSEETLCLATAPSEKSRNI

SEQ ID NO: 37423 - protein, 88 aa, Artificial Sequence
  Synthetic polypeptide
EVRRPSAWQPPRLRSHAIFKLTYLSNHDYKHLYFESDAATVNEIVLKVNYILESRASTARADYFAQKQRKLNRRTSFSFQKEKKSGQQ

SEQ ID NO: 37424 - protein, 10 aa, Artificial Sequence
  Synthetic polypeptide
EVTQYLNSRI

SEQ ID NO: 37425 - protein, 47 aa, Artificial Sequence
  Synthetic polypeptide
EVRRPSAWQPPRLRSHAIFKLTYLSNHDYKHLYFESDAATVNEIVLK

SEQ ID NO: 37426 - protein, 205 aa, Artificial Sequence
  Synthetic polypeptide
LRSRHCTPAWATKNAAHGFSLIQVDNTKVTMKEILLKAVKRRKGSQKVSGPQYRLEKQSEPNVAVDLDSTLESQSAWEFCLVRENSISGDKVEIDPVTNQKASTKFWIKQKPISIDSDLLCACDLAEEKSPSHAIFKLTYLSNHDYKHLYFESDAATVNEIVLKVNYILESRASTARADYFAQKQRKLNRRTSFSFQKEKKSGQQ

SEQ ID NO: 37427 - protein, 29 aa, Artificial Sequence
  Synthetic polypeptide
DRAIALQPGRQKMLLMDSPLFRWTTQRLP

SEQ ID NO: 37428 - protein, 67 aa, Artificial Sequence
  Synthetic polypeptide
QLAEIAPLHSSLGDKKCCSWILPYSGGQHKGYHEGNLTEGSEAKKRIPESFRPSVPPGEAERAQCRR

SEQ ID NO: 37429 - protein, 252 aa, Artificial Sequence
  Synthetic polypeptide
LRSRHCTPAWATKNAAHGFSLIQVDNTKVTMKEILLKAVKRRKGSQKVSGPQYRLEKQSEPNVAVDLDSTLESQSAWEFCLVRENSSRADGVFEEDSQIDIATVQDMLSSHHYKSFKVSMIHRLRFTTDVQLGISGDKVEIDPVTNQKASTKFWIKQKPISIDSDLLCACDLAEEKSPSHAIFKLTYLSNHDYKHLYFESDAATVNEIVLKVNYILESRASTARADYFAQKQRKLNRRTSFSFQKEKKSGQQ

SEQ ID NO: 37430 - protein, 216 aa, Artificial Sequence
  Synthetic polypeptide
LRSRHCTPAWATKNAAHGFSLIQVDNTKVTMKEILLKAVKRRKGSQKVSGSRADGVFEEDSQIDIATVQDMLSSHHYKSFKVSMIHRLRFTTDVQLGISGDKVEIDPVTNQKASTKFWIKQKPISIDSDLLCACDLAEEKSPSHAIFKLTYLSNHDYKHLYFESDAATVNEIVLKVNYILESRASTARADYFAQKQRKLNRRTSFSFQKEKKSGQQ

SEQ ID NO: 37431 - protein, 59 aa, Artificial Sequence
  Synthetic polypeptide
QLAEIAPLHSSLGDKKCCSWILPYSGGQHKGYHEGNLTEGSEAKKRIPESFRFKGRRGF

SEQ ID NO: 37432 - protein, 167 aa, Artificial Sequence
  Synthetic polypeptide
LRSRHCTPAWATKNAAHGFSLIQVDNTKVTMKEILLKAVKRRKGSQKVSGSRADGVFEEDSQIDIATVQDMLSSHHYKSFKVSMIHRLRFTTDVQLGISGDKVEIDPVTNQKASTKFWIKQKPISIDSDLLCACDLAEEKSPRFRSSLLAESKRGLSAVAVHRASAQ

SEQ ID NO: 37433 - protein, 175 aa, Artificial Sequence
  Synthetic polypeptide
LRSRHCTPAWATKNAAHGFSLIQVDNTKVTMKEILLKAVKRRKGSQKVSGSRADGVFEEDSQIDIATVQDMLSSHHYKSFKVSMIHRLRFTTDVQLGISGDKVEIDPVTNQKASTKFWIKQKPISIDSDLLCACDLAEEKSPSHAIFKLTYLSNHDYKHLYFESDAATVNEIVLK

SEQ ID NO: 37434 - protein, 53 aa, Artificial Sequence
  Synthetic polypeptide
LRSRHCTPAWATKNAAHGFSLIQVDNTKVTMKEILLKAVKRRKGSQKVSGACD

SEQ ID NO: 37435 - protein, 54 aa, Artificial Sequence
  Synthetic polypeptide
QLAEIAPLHSSLGDKKCCSWILPYSGGQHKGYHEGNLTEGSEAKKRIPESFRCL

SEQ ID NO: 37436 - protein, 49 aa, Artificial Sequence
  Synthetic polypeptide
LRSRHCTPAWATKNAAHGFSLIQVDNTKVTMKEILLKAVKRRKGSQKVS

SEQ ID NO: 37437 - protein, 51 aa, Artificial Sequence
  Synthetic polypeptide
QLAEIAPLHSSLGDKKCCSWILPYSGGQHKGYHEGNLTEGSEAKKRIPESF

SEQ ID NO: 37438 - protein, 400 aa, Artificial Sequence
  Synthetic polypeptide
PNPIGNSCVKSIHYLCLGFLSFFMELVVTSLLGSVKTVTVPAQELKSLFEKKSLKEKPPISGKQSILSVRLEQCPLQLNNPFNEYSKFDGKGHVGTTATKKIDVYLPLHSSQDRLLPMTVVTMASARVQDLIGLICWQYTSEGREPKLNDNVSAYCLHIAEDDGEVDTDFPPLDSNEPIHKFGFSTLALVEKYSSPGLTSKESLFVRINAAHGFSLIQVDNTKVTMKEILLKAVKRRKGSQKVSGPQYRLEKQSEPNVAVDLDSTLESQSAWEFCLVRENSISGDKVEIDPVTNQKASTKFWIKQKPISIDSDLLCACDLAEEKSPSHAIFKLTYLSNHDYKHLYFESDAATVNEIVLKVNYILESRASTARADYFAQKQRKLNRRTSFSFQKEKKSGQQ

SEQ ID NO: 37439 - protein, 6 aa, Artificial Sequence
  Synthetic polypeptide
LCQPRS

SEQ ID NO: 37440 - protein, 43 aa, Artificial Sequence
  Synthetic polypeptide
QLCEVYTLLMFGIPQFLHGASSNISLRICEDCDCASPGVKVTV

SEQ ID NO: 37441 - protein, 447 aa, Artificial Sequence
  Synthetic polypeptide
PNPIGNSCVKSIHYLCLGFLSFFMELVVTSLLGSVKTVTVPAQELKSLFEKKSLKEKPPISGKQSILSVRLEQCPLQLNNPFNEYSKFDGKGHVGTTATKKIDVYLPLHSSQDRLLPMTVVTMASARVQDLIGLICWQYTSEGREPKLNDNVSAYCLHIAEDDGEVDTDFPPLDSNEPIHKFGFSTLALVEKYSSPGLTSKESLFVRINAAHGFSLIQVDNTKVTMKEILLKAVKRRKGSQKVSGPQYRLEKQSEPNVAVDLDSTLESQSAWEFCLVRENSSRADGVFEEDSQIDIATVQDMLSSHHYKSFKVSMIHRLRFTTDVQLGISGDKVEIDPVTNQKASTKFWIKQKPISIDSDLLCACDLAEEKSPSHAIFKLTYLSNHDYKHLYFESDAATVNEIVLKVNYILESRASTARADYFAQKQRKLNRRTSFSFQKEKKSGQQ

SEQ ID NO: 37442 - protein, 411 aa, Artificial Sequence
  Synthetic polypeptide
PNPIGNSCVKSIHYLCLGFLSFFMELVVTSLLGSVKTVTVPAQELKSLFEKKSLKEKPPISGKQSILSVRLEQCPLQLNNPFNEYSKFDGKGHVGTTATKKIDVYLPLHSSQDRLLPMTVVTMASARVQDLIGLICWQYTSEGREPKLNDNVSAYCLHIAEDDGEVDTDFPPLDSNEPIHKFGFSTLALVEKYSSPGLTSKESLFVRINAAHGFSLIQVDNTKVTMKEILLKAVKRRKGSQKVSGSRADGVFEEDSQIDIATVQDMLSSHHYKSFKVSMIHRLRFTTDVQLGISGDKVEIDPVTNQKASTKFWIKQKPISIDSDLLCACDLAEEKSPSHAIFKLTYLSNHDYKHLYFESDAATVNEIVLKVNYILESRASTARADYFAQKQRKLNRRTSFSFQKEKKSGQQ

SEQ ID NO: 37443 - protein, 248 aa, Artificial Sequence
  Synthetic polypeptide
PNPIGNSCVKSIHYLCLGFLSFFMELVVTSLLGSVKTVTVPAQELKSLFEKKSLKEKPPISGKQSILSVRLEQCPLQLNNPFNEYSKFDGKGHVGTTATKKIDVYLPLHSSQDRLLPMTVVTMASARVQDLIGLICWQYTSEGREPKLNDNVSAYCLHIAEDDGEVDTDFPPLDSNEPIHKFGFSTLALVEKYSSPGLTSKESLFVRINAAHGFSLIQVDNTKVTMKEILLKAVKRRKGSQKVSGACD

SEQ ID NO: 37444 - protein, 85 aa, Artificial Sequence
  Synthetic polypeptide
PNPIGNSCVKSIHYLCLGFLSFFMELVVTSLLGSVKTVTVPAQELKSLFEKKSLKEKPPISGKQSILSVRLEQCPLQLNNPFNEY

SEQ ID NO: 37445 - protein, 261 aa, Artificial Sequence
  Synthetic polypeptide
SCLSIRGAQEEDPPDPQLMRLDNMLLAEGVSGPEKGGGSAAAAAAAAASGGSSDNSIEHSDYRAKLTQIRQIYHTELEKYEQACNEFTTHVMNLLREQSRTRPISPKEIERMVGIIHRKFSSIQMQLKQSTCEAVMILRSRFLDARRKRRNFSKQATEILNEYFYSHLSNPYPSEEAKEELAKKCSITVSQVSNWFGNKRIRYKKNIGKFQEEANLYAAKTAVTAAHAVAAAVQNNQTNSPTTPNSGGYPPSCYQSDGRLQ

SEQ ID NO: 37446 - protein, 45 aa, Artificial Sequence
  Synthetic polypeptide
GFLTWTKPLLASFLLSLQTAYCETSPRDHVSASEEPRRRTLPIPS

SEQ ID NO: 37447 - protein, 57 aa, Artificial Sequence
  Synthetic polypeptide
LGLSHYWLPSSSACRRPIVRLHLVIMSQHQRSPGGGPSRSPANETGQYAFGRRGFRS

SEQ ID NO: 37448 - protein, 365 aa, Artificial Sequence
  Synthetic polypeptide
SCLSIRGAQEEDPPDPQLMRLDNMLLAEGVSGPEKGGGSAAAAAAAAASGGSSDNSIEHSDYRAKLTQIRQIYHTELEKYEQACNEFTTHVMNLLREQSRTRPISPKEIERMVGIIHRKFSSIQMQLKQSTCEAVMILRSRFLDARRKRRNFSKQATEILNEYFYSHLSNPYPSEEAKEELAKKCSITVSQSLVKDPKERGSKGSDIQPTSVVSNWFGNKRIRYKKNIGKFQEEANLYAAKTAVTAAHAVAAAVQNNQTNSPTTPNSGSSGSFNLPNSGDMFMNMQSLNGDSYQGSQVGANVQSQVDTLRHVINQTGGYSDGLGGNSLYSPHNLNANGGWQDATTPSSVTSPTEGPGSVHSDTSN

SEQ ID NO: 37449 - protein, 344 aa, Artificial Sequence
  Synthetic polypeptide
SCLSIRGAQEEDPPDPQLMRLDNMLLAEGVSGPEKGGGSAAAAAAAAASGGSSDNSIEHSDYRAKLTQIRQIYHTELEKYEQACNEFTTHVMNLLREQSRTRPISPKEIERMVGIIHRKFSSIQMQLKQSTCEAVMILRSRFLDARRKRRNFSKQATEILNEYFYSHLSNPYPSEEAKEELAKKCSITVSQVSNWFGNKRIRYKKNIGKFQEEANLYAAKTAVTAAHAVAAAVQNNQTNSPTTPNSGSSGSFNLPNSGDMFMNMQSLNGDSYQGSQVGANVQSQVDTLRHVINQTGGYSDGLGGNSLYSPHNLNANGGWQDATTPSSVTSPTEGPGSVHSDTSN

SEQ ID NO: 37450 - protein, 145 aa, Artificial Sequence
  Synthetic polypeptide
SCLSIRGAQEEDPPDPQLMRLDNMLLAEGVSGPEKGGGSAAAAAAAAASGGSSDNSIEHSDYRAKLTQIRQIYHTELEKYEQACNEFTTHVMNLLREQSRTRPISPKEIERMVGIIHRKFSSIQMQLKQSTCEAVMILRSRFLDA

SEQ ID NO: 37451 - protein, 165 aa, Artificial Sequence
  Synthetic polypeptide
SCLSIRGAQEEDPPDPQLMRLDNMLLAEGVSGPEKGGGSAAAAAAAAASGGSSDNSIEHSDYRAKLTQIRQIYHTELEKYEQACNEFTTHVMNLLREQSRTRPISPKEIERMVGIIHRKFSSIQMQLKQSTCEAVMILRSRFLDARRKRRNFSKQATEILNEYFY

SEQ ID NO: 37452 - protein, 11 aa, Artificial Sequence
  Synthetic polypeptide
LLHVIPEVHRR

SEQ ID NO: 37453 - protein, 170 aa, Artificial Sequence
  Synthetic polypeptide
MRRPGQASAFLGLSFFTLYLRCTGGEVGATSALAPKIGPLGLSPKKVGDDIAKATGDWKGLRITVKLTIQNRQAQIEVVPSASALIIKALKEPPRDRKKQKNIKHSGNITFDEIVNIARQMRHRSLARELSGTIKEILGTAQSVGCNVDGRHPHDIIDDINSGAVECPAS

SEQ ID NO: 37454 - protein, 19 aa, Artificial Sequence
  Synthetic polypeptide
CAAPAKPQPFWALASSRYT

SEQ ID NO: 37455 - protein, 137 aa, Artificial Sequence
  Synthetic polypeptide
MRRPGQASAFLGLSFFTLYLRCTGGEVGATSALAPKIGPLGLIEVVPSASALIIKALKEPPRDRKKQKNIKHSGNITFDEIVNIARQMRHRSLARELSGTIKEILGTAQSVGCNVDGRHPHDIIDDINSGAVECPAS

SEQ ID NO: 37456 - protein, 74 aa, Artificial Sequence
  Synthetic polypeptide
LQHIIDLRLLTTIYKEHLQINRKKTNSQIGSESKSQGWNTTPLLSTCCQFWSKMESRTLGTALMGPRTDSQGRS

SEQ ID NO: 37457 - protein, 33 aa, Artificial Sequence
  Synthetic polypeptide
EVSLRVRAGILPPFSVLAANSGARWNRELSGQP

SEQ ID NO: 37458 - protein, 735 aa, Artificial Sequence
  Synthetic polypeptide
NSIQHIVEKTGKILTEFLQFYEDQYGVALFNSMRHEIEGTGLPQAQLLWRKVPLDERIVFSGNLFQHQEDSKKWRNRFSLVPHNYGLVLYENKAAYERQVPPRAVINSAGYKILTSVDQYLELIGNSLPGTTAKSGSAPILKCPTQFPLILWHPYARHYYFCMMTEAEQDKWQAVLQDCIRHCNNGIPEDSKVEGPAFTDAIRMYRQSKELYGTWEMLCGNEVQILSNLVMEELGPELKAELGPRLKGKPQERQRQWIQISDAVYHMVYEQAKARFEEVLSKVQQVQPAMQAVIRTDMDQIITSKEHLASKIRAFILPKAEVCVRNHVQPYIPSILEALMVPTSQGFTEVRDVFFKEVTDMNLNVINEGGIDKLGEYMEKLSRLAYHPLKMQSCYEKMESLRLDGLQQRFDVSSTSVFKQRAQIHMREQMDNAVYTFETLLHQELGKGPTKEELCKSIQRVLERVLKKYDYDSSSVRKRFFREALLQISIPFLLKKLAPTCKSELPRFQELIFEDFARFILVENTYEEVVLQTVMKDILQAVKEAAVQRKHNLYRDSMVMHNSDPNLHLLAEGAPIDWGEEYSNSGGGGSPSPSTPESATLSEKRRRAKQVVSVVQDEEVGLPFEASPESPPPASPDGVTEIRGLLAQGLRPESPPPAGPLLNGAPAGESPQPKAAPEASSPPASPLQHLLPGKAVDLGPPKPSDQETGEQVSSPSSHPALHTTTEDSAGVQTEF

SEQ ID NO: 37459 - protein, 19 aa, Artificial Sequence
  Synthetic polypeptide
HPTHSRKNREDPDGVPPVL

SEQ ID NO: 37460 - protein, 12 aa, Artificial Sequence
  Synthetic polypeptide
NSIQHIKKPGRS

SEQ ID NO: 37461 - protein, 732 aa, Artificial Sequence
  Synthetic polypeptide
HPTHKKTGKILTEFLQFYEDQYGVALFNSMRHEIEGTGLPQAQLLWRKVPLDERIVFSGNLFQHQEDSKKWRNRFSLVPHNYGLVLYENKAAYERQVPPRAVINSAGYKILTSVDQYLELIGNSLPGTTAKSGSAPILKCPTQFPLILWHPYARHYYFCMMTEAEQDKWQAVLQDCIRHCNNGIPEDSKVEGPAFTDAIRMYRQSKELYGTWEMLCGNEVQILSNLVMEELGPELKAELGPRLKGKPQERQRQWIQISDAVYHMVYEQAKARFEEVLSKVQQVQPAMQAVIRTDMDQIITSKEHLASKIRAFILPKAEVCVRNHVQPYIPSILEALMVPTSQGFTEVRDVFFKEVTDMNLNVINEGGIDKLGEYMEKLSRLAYHPLKMQSCYEKMESLRLDGLQQRFDVSSTSVFKQRAQIHMREQMDNAVYTFETLLHQELGKGPTKEELCKSIQRVLERVLKKYDYDSSSVRKRFFREALLQISIPFLLKKLAPTCKSELPRFQELIFEDFARFILVENTYEEVVLQTVMKDILQAVKEAAVQRKHNLYRDSMVMHNSDPNLHLLAEGAPIDWGEEYSNSGGGGSPSPSTPESATLSEKRRRAKQVVSVVQDEEVGLPFEASPESPPPASPDGVTEIRGLLAQGLRPESPPPAGPLLNGAPAGESPQPKAAPEASSPPASPLQHLLPGKAVDLGPPKPSDQETGEQVSSPSSHPALHTTTEDSAGVQTEF

SEQ ID NO: 37462 - protein, 124 aa, Artificial Sequence
  Synthetic polypeptide
CQEFKTSLANMGCWRARGWQRLCEVLQGEVHPGLIARETPQGIGGGAQTQQHGSPQPCLVPWPHPPRGLGDLGTTQRRLPHPGLTHQPGRLCAHVPLAQPGLALQDQQGGGEGRRELHTHPVPV

SEQ ID NO: 37463 - protein, 721 aa, Artificial Sequence
  Synthetic polypeptide
MGTGLTPVTPALWEAKAGGSPDARSSRPAWPTWAAGEPEAGSDYVKFSKEKYILDSSPEKLHKELEEELKLSSTDLRSHAWYHGRIPREVSETLVQRNGDFLIRDSLTSLGDYVLTCRWRNQALHFKINKVVVKAGESYTHIQYLFEQESFDHVPALVRYHVGSRKAVSEQSGAIIYCPVNRTFPLRYLEASYGLGQGSSKPASPVSPSGPKGSHMKRRSVTMTDGLTADKVTRSDGCPTSTSLPRPRDSIRSCALSMDQIPDLHSPMSPISESPSSPAYSTVTRVHAAPAAPSATALPASPVARRSSEPQLCPGSAPKTHGESDKGPHTSPSHTLGKASPSPSLSSYSDPDSGHYCQLQPPVRGSREWAATETSSQQARSYGERLKELSENGAPEGDWGKTFTVPIVEVTSSFNPATFQSLLIPRDNRPLEVGLLRKVKELLAEVDARTLARHVTKVDCLVARILGVTKEMQTLMGVRWGMELLTLPHGRQLRLDLLERFHTMSIMLAVDILGCTGSAEERAALLHKTIQLAAELRGTMGNMFSFAAVMGALDMAQISRLEQTWVTLRQRHTEGAILYEKKLKPFLKSLNEGKEGPPLSNTTFPHVLPLITLLECDSAPPEGPEPWGSTEHGVEVVLAHLEAARTVAHHGGLYHTNAEVKLQGFQARPELLEVFSTEFQMRLLWGSQGASSSQARRYEKFDKVLTALSHKLEPAVRSSEL

SEQ ID NO: 37464 - protein, 36 aa, Artificial Sequence
  Synthetic polypeptide
PQHFGRPRQVDHLMPGVQDQPGQHGLLESQRLAATM

SEQ ID NO: 37465 - protein, 349 aa, Artificial Sequence
  Synthetic polypeptide
MGTGLTPVTPALWEAKAGGSPDARSSRPAWPTWAAGEPEAGSDYVKFSKEKYILDSSPEKLHKELEEELKLSSTDLRSHAWYHGRIPREVSETLVQRNGDFLIRDSLTSLGDYVLTCRWRNQALHFKINKVVVKAGESYTHIQYLFEQESFDHVPALVRYHVGSRKAVSEQSGAIIYCPVNRTFPLRYLEASYGLGQGSSKPASPVSPSGPKGSHMKRRSVTMTDGLTADKVTRSDGCPTSTSLPRPRDSIRSCALSMDQIPDLHSPMSPISESPSSPAYSTVTRVHAAPAAPSATALPASPVARRSSEPQLCPGSAPKTHGESDKGPHTSPSHTLGKASPSPSLSSYS

SEQ ID NO: 37466 - protein, 35 aa, Artificial Sequence
  Synthetic polypeptide
GWAWWLICLQSQHFRRSSKVSLPSLCSNLKVPWQC

SEQ ID NO: 37467 - protein, 28 aa, Artificial Sequence
  Synthetic polypeptide
AGHGGLYACNPSISGGRARCPCLHCAPT

SEQ ID NO: 37468 - protein, 356 aa, Artificial Sequence
  Synthetic polypeptide
MGMVAYMLAIPAFQEVEQGVPAFTVLQPEGPLAVLRDRAQQISCPLYLCPMLEALEEGGPPLTLGLEGEHQRSNAALALQLAHCWLQRQDRHGAGEPKASRPGLLWQLPLAPVFQPTSHMRLGLRNTEWPGRTQVLRRGPLTWYLDGAHTASSAQACVRWFRQALQGRERPSGGPEVRVLLFNATGDRDPAALLKLLQPCQFDYAVFCPNLTEVSSTGNADQQNFTVTLDQVLLRCLEHQQHWNHLDEEQASPDLWSAPSPEPGGSASLLLAPHPPHTCSASSLVFSCISHALQWISQGRDPIFQPPSPPKGLLTHPVAHSGASILREAAAIHVLVTGSLHLVGGVLKLLEPALSQ

SEQ ID NO: 37469 - protein, 144 aa, Artificial Sequence
  Synthetic polypeptide
MGMVAYMLAIPAFQEVEQGVPAFTVLQPEGPLAVLRDRAQQISVLGSQRHPGQGSCGSCPWHLCSSPHPTCGSGFGTRSGRAGRRCCGAGPSPGTWTVRTPPAARRPACAGSARRCRAARGRAVAPRFESCSSMLPGTGTRRPC

SEQ ID NO: 37470 - protein, 83 aa, Artificial Sequence
  Synthetic polypeptide
MGMVAYMLAIPAFQEVEQGVPAFTVLQPEGPLAVLRDRAQQISVLGSQRHPGQGSCGSCPWHLCSSPHPTCGSGFGTRSGRAG

SEQ ID NO: 37471 - protein, 39 aa, Artificial Sequence
  Synthetic polypeptide
MGMVAYMLAIPAFQEVEQGVPAFTVLQPEGPLAVLRDRA

SEQ ID NO: 37472 - protein, 240 aa, Artificial Sequence
  Synthetic polypeptide
PGREPLVREPCRSCAVVSSSGQMLGSGLGAEIDSAECVFRMNQAPTVGFEADVGQRSTLRVVSHTSVPLLLRNYSHYFQKARDTLYMVWGQGRHMDRVLGGRTYRTLLQLTRMYPGLQVYTFTERMMAYCDQIFQDETGKNRRQSGSFLSTGWFTMILALELCEEIVVYGMVSDSYCREKSHPSVPYHYFEKGRLDECQMYLAHEQAPRSAHRFITEKAVFSRWAKKRPIVFAHPSWRTE

SEQ ID NO: 37473 - protein, 40 aa, Artificial Sequence
  Synthetic polypeptide
RVESRWSASPAAAVPWCPAPAKCWAQAWVLRSTVPSACSA

SEQ ID NO: 37474 - protein, 27 aa, Artificial Sequence
  Synthetic polypeptide
RAAGPRALPQLCRGVQLRPNAGLRPGC

SEQ ID NO: 37475 - protein, 47 aa, Artificial Sequence
  Synthetic polypeptide
WLAPVIPALWEAEAGRSPEAAPGRDHHLLPSHEGCERAGQGGDRVRQ

SEQ ID NO: 37476 - protein, 212 aa, Artificial Sequence
  Synthetic polypeptide
SQHFGRPRQADHLRQPLEEIITYYPAMKAVNEQGKEVTEFGNKYWLMLNEKEAQQVYGGKEARTEEMKWRQWADDWLVHLISPNVYRTPTEALASFDYIVREGKFGAVEGAVAKYMGAAAMYLISKRLKSRHRLQDNVREDLYEAADKWVAAVGKDRPFMGGQKPNLADLAVYGVLRVMEGLDAFDDLMQHTHIQPWYLRVERAITEASPAH

SEQ ID NO: 37477 - protein, 135 aa, Artificial Sequence
  Synthetic polypeptide
SQHFGRPRQADHLRQPLEEIITYYPAMKAVNEQGKEVTEFGNKYWLMLNEKEAQQVYGGKEARTEEMKWRQWADDWLVHLISPNVYRTPTEALASFDYIVREGKFGAVEGAVAKYMGAAAMYLISKRLKSRHRLQ

SEQ ID NO: 37478 - protein, 416 aa, Artificial Sequence
  Synthetic polypeptide
GQEFETCLANVVKPHLYLKNTKMSLAWWQVPVIPATQEAKDSERLMEQQGALLKRLAEADSEKARLLLLLQDKDKEVEELLQEIQCEKAQAKTASELSKSMESMRGHLQAQLRSKEAENSRLCMQIKNLERSGNQHKAEVEAIMEQLKELKQKGDRDKESLKKAIRAQKERAEKSEEYAEQLHVQLADKDLYVAEALSTLESWRSRYNQVVKEKGDLELEIIVLNDRVTDLVNQQQTLEEKMREDRDSLVERLHRQTAEYSAFKLENERLKASFAPMEDKLNQAHLEVQQLKASVKNYEGMIDNYKSQVMKTRLEADEVAAQLERCDKENKILKDEMNKEIEAARRQFQSQLADLQQLPDILKITEAKLAECQDQLQGYERKNIDLTAIISDLRSRVRDWQKGSHELTRAGARIPR

SEQ ID NO: 37479 - protein, 12 aa, Artificial Sequence
  Synthetic polypeptide
SQLLRRLRILKD

SEQ ID NO: 37480 - protein, 588 aa, Artificial Sequence
  Synthetic polypeptide
GQEFETCLANVVKPHLYLKNTKMSLAWWQVPVIPATQEAKDSERLMEQQGALLKRLAEADSEKARLLLLLQDKDKEVEELLQEIQCEKAQAKTASELSKSMESMRGHLQAQLRSKEAENSRLCMQIKNLERSGNQHKAEVEAIMEQLKELKQKGDRDKESLKKAIRAQKERAEKSEEYAEQLHVQLADKDLYVAEALSTLESWRSRYNQVVKEKGDLELEIIVLNDRVTDLVNQQQTLEEKMREDRDSLVERLHRQTAEYSAFKLENERLKASFAPMEDKLNQAHLEVQQLKASVKNYEGMIDNYKSQVMKTRLEADEVAAQLERCDKENKILKDEMNKEIEAARRQFQSQLADLQQLPDILKITEAKLAECQDQLQGYERKNIDLTAIISDLRSRIEHQGDKLEMAREKHQASQKENKQLSLKVDELERKLEATSAQNIEFLQVIAKREEAIHQSQLRLEEKTRECGTLARQLESAIEDARRQVEQTKEHALSKERAAQNKILDLETQLSRTKTELSQLRRSRDDADRRYQSRLQDLKDRLEQSESTNRSMQNYVQFLKSSYANVFGDGPYSTFLTSSPIRSRSPPA

SEQ ID NO: 37481 - protein, 202 aa, Artificial Sequence
  Synthetic polypeptide
GQEFETCLANVVKPHLYLKNTKMSLAWWQVPVIPATQEAKDSERLMEQQGALLKRLAEADSEKARLLLLLQDKDKEVEELLQEIQCEKAQAKTASELSKSMESMRGHLQAQLRSKEAENSRLCMQIKNLERSGNQHKAEVEAIMEQLKELKQKGDRDKESLKKAIRAQKERAEKSEEYAEQLHVQLADKDLYVAEALSTLES

SEQ ID NO: 37482 - protein, 675 aa, Artificial Sequence
  Synthetic polypeptide
ARLGVSHLQSQHFEECMSLPKLSSYSGWVVEHVLPHMQENQPLSETSPSSTSASALDQPSFVPKSPDASSAFSPASPATPNGTKGKDESQHTESMVLQSSRGIKVEGCVRMYELVHRMKGTEGLRLWQEEQERKVQALSEMASEQLKRFDEWKELKQHKEFQDLREVMEKSSREALGHQEKLKAEHRHRAKILNLKLREAEQQRVKQAEQERLRKEEGQIRLRALYALQEEMLQLSQQLDASEQHKALLKVDLAAFQTRGNQLCSLISGIIRASSESSYPTAESQAEAERALREMRDLLMNLGQEITRACEDKRRQDEEEAQVKLQEAQMQQGPEAHKEPPAPSQGPGGKQNEDLQVKVQDITMQWYQQLQDASMQCVLTFEGLTNSKDSQAKKIKMDLQKAATIPVSQISTIAGSKLKEIFDKIHSLLSGKPVQSGGRSVSVTLNPQGLDFVQYKLAEKFVKQGEEEVASHHEAAFPIAVVASGIWELHPRVGDLILAHLHKKCPYSVPFYPTFKEGMALEDYQRMLGYQVKDSKVEQQDNFLKRMSGMIRLYAAIIQLRWPYGNRQEIHPHGLNHGWRWLAQILNMEPLSDVTATLLFDFLEVCGNALMKQYQVQFWKMLILIKEDYFPRIEAITSSGQMGSFIRLKQFLEKCLQHKDIPVPKGFLTSSFWRS

SEQ ID NO: 37483 - protein, 29 aa, Artificial Sequence
  Synthetic polypeptide
PGLVSHTCNPSTLKNVCLFPSYLLILDGW

SEQ ID NO: 37484 - protein, 636 aa, Artificial Sequence
  Synthetic polypeptide
ARLGVSHLQSQHFEECMSLPKLSSYSGWVVEHVLPHMQENQPLSETSPSSTSASALDQPSFVPKSPDASSAFSPASPATPNGTKGKDESQHTESMVLQSSRGIKVEGCVRMYELVHRMKGTEGLRLWQEEQERKVQALSEMASEQLKRFDEWKELKQHKEFQDLREVMEKSSREALGHQEKLKAEHRHRAKILNLKLREAEQQRVKQAEQERLRKEEGQIRLRALYALQEEMLQLSQQLDASEQHKALLKVDLAAFQTRGNQLCSLISGIIRASSESSYPTAESQAEAERALREMRDLLMNLGQEITRACEDKRRQDEEEAQVKLQEAQMQQGPEAHKEPPAPSQGPGGKQNEDLQVKVQDITMQWYQQLQDASMQCVLTFEGLTNSKDSQAKKIKMDLQKAATIPVSQISTIAGSKLKEIFDKIHSLLSGKPVQSGGRSVSVTLNPQGLDFVQYKLAEKFVKQGEEEVASHHEAAFPIAVVASGIWELHPRVGDLILAHLHKKCPYSVPFYPTFKEGMALEDYQRMLGYQVKDSKVEQQDNFLKRMSGMIRLYAAIIQLRWPYGNRQEIHPHGLNHGWRWLAQILNMEPLSDVTATLLFDFLEVCGNALMKQYQVQFWKMLILIKEDYFPRYQAC

SEQ ID NO: 37485 - protein, 36 aa, Artificial Sequence
  Synthetic polypeptide
ARLGVSHLQSQHFAIFLFWMGGRARPTPYAGEPTSV

SEQ ID NO: 37486 - protein, 667 aa, Artificial Sequence
  Synthetic polypeptide
PGLVSHTCNPSTLLSSYSGWVVEHVLPHMQENQPLSETSPSSTSASALDQPSFVPKSPDASSAFSPASPATPNGTKGKDESQHTESMVLQSSRGIKVEGCVRMYELVHRMKGTEGLRLWQEEQERKVQALSEMASEQLKRFDEWKELKQHKEFQDLREVMEKSSREALGHQEKLKAEHRHRAKILNLKLREAEQQRVKQAEQERLRKEEGQIRLRALYALQEEMLQLSQQLDASEQHKALLKVDLAAFQTRGNQLCSLISGIIRASSESSYPTAESQAEAERALREMRDLLMNLGQEITRACEDKRRQDEEEAQVKLQEAQMQQGPEAHKEPPAPSQGPGGKQNEDLQVKVQDITMQWYQQLQDASMQCVLTFEGLTNSKDSQAKKIKMDLQKAATIPVSQISTIAGSKLKEIFDKIHSLLSGKPVQSGGRSVSVTLNPQGLDFVQYKLAEKFVKQGEEEVASHHEAAFPIAVVASGIWELHPRVGDLILAHLHKKCPYSVPFYPTFKEGMALEDYQRMLGYQVKDSKVEQQDNFLKRMSGMIRLYAAIIQLRWPYGNRQEIHPHGLNHGWRWLAQILNMEPLSDVTATLLFDFLEVCGNALMKQYQVQFWKMLILIKEDYFPRIEAITSSGQMGSFIRLKQFLEKCLQHKDIPVPKGFLTSSFWRS

SEQ ID NO: 37487 - protein, 21 aa, Artificial Sequence
  Synthetic polypeptide
QAWCLTPAIPALCYLLILDGW

SEQ ID NO: 37488 - protein, 628 aa, Artificial Sequence
  Synthetic polypeptide
PGLVSHTCNPSTLLSSYSGWVVEHVLPHMQENQPLSETSPSSTSASALDQPSFVPKSPDASSAFSPASPATPNGTKGKDESQHTESMVLQSSRGIKVEGCVRMYELVHRMKGTEGLRLWQEEQERKVQALSEMASEQLKRFDEWKELKQHKEFQDLREVMEKSSREALGHQEKLKAEHRHRAKILNLKLREAEQQRVKQAEQERLRKEEGQIRLRALYALQEEMLQLSQQLDASEQHKALLKVDLAAFQTRGNQLCSLISGIIRASSESSYPTAESQAEAERALREMRDLLMNLGQEITRACEDKRRQDEEEAQVKLQEAQMQQGPEAHKEPPAPSQGPGGKQNEDLQVKVQDITMQWYQQLQDASMQCVLTFEGLTNSKDSQAKKIKMDLQKAATIPVSQISTIAGSKLKEIFDKIHSLLSGKPVQSGGRSVSVTLNPQGLDFVQYKLAEKFVKQGEEEVASHHEAAFPIAVVASGIWELHPRVGDLILAHLHKKCPYSVPFYPTFKEGMALEDYQRMLGYQVKDSKVEQQDNFLKRMSGMIRLYAAIIQLRWPYGNRQEIHPHGLNHGWRWLAQILNMEPLSDVTATLLFDFLEVCGNALMKQYQVQFWKMLILIKEDYFPRYQAC

SEQ ID NO: 37489 - protein, 19 aa, Artificial Sequence
  Synthetic polypeptide
ARLGVSHLQSQHFGEPTSV

SEQ ID NO: 37490 - protein, 650 aa, Artificial Sequence
  Synthetic polypeptide
PGLVSHTCNPSTLENQPLSETSPSSTSASALDQPSFVPKSPDASSAFSPASPATPNGTKGKDESQHTESMVLQSSRGIKVEGCVRMYELVHRMKGTEGLRLWQEEQERKVQALSEMASEQLKRFDEWKELKQHKEFQDLREVMEKSSREALGHQEKLKAEHRHRAKILNLKLREAEQQRVKQAEQERLRKEEGQIRLRALYALQEEMLQLSQQLDASEQHKALLKVDLAAFQTRGNQLCSLISGIIRASSESSYPTAESQAEAERALREMRDLLMNLGQEITRACEDKRRQDEEEAQVKLQEAQMQQGPEAHKEPPAPSQGPGGKQNEDLQVKVQDITMQWYQQLQDASMQCVLTFEGLTNSKDSQAKKIKMDLQKAATIPVSQISTIAGSKLKEIFDKIHSLLSGKPVQSGGRSVSVTLNPQGLDFVQYKLAEKFVKQGEEEVASHHEAAFPIAVVASGIWELHPRVGDLILAHLHKKCPYSVPFYPTFKEGMALEDYQRMLGYQVKDSKVEQQDNFLKRMSGMIRLYAAIIQLRWPYGNRQEIHPHGLNHGWRWLAQILNMEPLSDVTATLLFDFLEVCGNALMKQYQVQFWKMLILIKEDYFPRIEAITSSGQMGSFIRLKQFLEKCLQHKDIPVPKGFLTSSFWRS

SEQ ID NO: 37491 - protein, 30 aa, Artificial Sequence
  Synthetic polypeptide
QAWCLTPAIPALWRTNLCLRLRHPLRQLQP

SEQ ID NO: 37492 - protein, 611 aa, Artificial Sequence
  Synthetic polypeptide
PGLVSHTCNPSTLENQPLSETSPSSTSASALDQPSFVPKSPDASSAFSPASPATPNGTKGKDESQHTESMVLQSSRGIKVEGCVRMYELVHRMKGTEGLRLWQEEQERKVQALSEMASEQLKRFDEWKELKQHKEFQDLREVMEKSSREALGHQEKLKAEHRHRAKILNLKLREAEQQRVKQAEQERLRKEEGQIRLRALYALQEEMLQLSQQLDASEQHKALLKVDLAAFQTRGNQLCSLISGIIRASSESSYPTAESQAEAERALREMRDLLMNLGQEITRACEDKRRQDEEEAQVKLQEAQMQQGPEAHKEPPAPSQGPGGKQNEDLQVKVQDITMQWYQQLQDASMQCVLTFEGLTNSKDSQAKKIKMDLQKAATIPVSQISTIAGSKLKEIFDKIHSLLSGKPVQSGGRSVSVTLNPQGLDFVQYKLAEKFVKQGEEEVASHHEAAFPIAVVASGIWELHPRVGDLILAHLHKKCPYSVPFYPTFKEGMALEDYQRMLGYQVKDSKVEQQDNFLKRMSGMIRLYAAIIQLRWPYGNRQEIHPHGLNHGWRWLAQILNMEPLSDVTATLLFDFLEVCGNALMKQYQVQFWKMLILIKEDYFPRYQAC

SEQ ID NO: 37493 - protein, 476 aa, Artificial Sequence
  Synthetic polypeptide
PWKSCQTASIATASASAQARNHVDAQVQTEAPVPVSVQPPSQYDIPRLAAFLRRVEAMVIRELNKNWQSHAFDGFEVNWTEQQQMVSCLYTLGYPPAQAQGLHVTSISWNSTGSVVACAYGRLDHGDWSTLKSFVCAWNLDRRDLRPQQPSAVVEVPSAVLCLAFHPTQPSHVAGGLYSGEVLVWDLSRLEDPLLWRTGLTDDTHTDPVSQVVWLPEPGHSHRFQVLSVATDGKVLLWQGIGVGQLQLTEGFALVMQQLPRSTKLKKHPRGETEVGATAVAFSSFDPRLFILGTEGGFPLKCSLAAGEAALTRMPSSVPLRAPAQFTFSPHGGPIYSVSCSPFHRNLFLSAGTDGHVHLYSMLQAPPLTSLQLSLKYLFAVRWSPVRPLVFAAASGKGDVQLFDLQKSSQKPTVLIKQTQDESPVYCLEFNSQQTQLLAAGDAQGTVKVWQLSTEFTEQGPREAEDLDCLAAEVAA

SEQ ID NO: 37494 - protein, 75 aa, Artificial Sequence
  Synthetic polypeptide
AAWVQVDHLLLCDLGKVARRPALPLPVHPPRPGIMWTPRCRRRPPCLSACSPRPSMTYPGSQPFFGEWRPWSSES

SEQ ID NO: 37495 - protein, 55 aa, Artificial Sequence
  Synthetic polypeptide
PPGFKSITFCCVTLEKLPDGQHCHCQCIRPGQESCGRPGADGGPRACQRAAPVPV

SEQ ID NO: 37496 - protein, 221 aa, Artificial Sequence
  Synthetic polypeptide
PWKSCQTASIATASASAQARNHVDAQVQTEAPVPVSVQPPSQYDIPRLAAFLRRVEAMVIRELNKNWQSHAFDGFEVNWTEQQQMVSCLYTLGYPPAQAQGLHVTSISWNSTGSVVACAYGRLDHGDWSTLKSFVCAWNLDRRDLRPQQPSAVVEVPSAVLCLAFHPTQPSHVAGELPAVSASSPLRTQLPALQRAQGSFPWALWPGDRKAGPDPLSLEPR

SEQ ID NO: 37497 - protein, 94 aa, Artificial Sequence
  Synthetic polypeptide
PWKSCQTASIATASASAQARNHVDAQVQTEAPVPVSVQPPSQYDIPRLAAFLRRVEAMVIRELNKNWQSHAFDGFEVNWTEQQQMAGPWGLEHA

SEQ ID NO: 37498 - protein, 21 aa, Artificial Sequence
  Synthetic polypeptide
SGGLGPCPDCPASGDLLRSCH

SEQ ID NO: 37499 - protein, 490 aa, Artificial Sequence
  Synthetic polypeptide
MEAWVLVLTALPQVTFCDPVIERRPRLQRQERIFSKRRGQDFLRASQMNLGMAAWGRLVMNLLPPCSSPSTISPPKGCPRTPTTLREASDPATPSNFLPKKTPLGEEMTPPPKPPRLYLPQEPTSEETPRTKRPHMEPRTRRGPSPPASPTRKPPRLQDFRCLAVLGRGHFGKVLLVQFKGTGKYYAIKALKKQEVLSRDEIESLYCEKRILEAVGCTGHPFLLSLLACFQTSSHACFVTEFVPGGDLMMQIHEDVFPEPQARFYVACVVLGLQFLHEKKIIYRDLKLDNLLLDAQGFLKIADFGLCKEGIGFGDRTSTFCGTPEFLAPEVLTQEAYTRAVDWWGLGVLLYEMLVGECPFPGDTEEEVFDCIVNMDAPYPGFLSVQGLEFIQKLLQKCPEKRLGAGEQDAEEIKVQPFFRTTNWQALLARTIQPPFVPTLCGPADLRYFEGEFTGLPPALTPPAPHSLLTARQQAAFRDFDFVSERFLEP

SEQ ID NO: 37500 - protein, 5 aa, Artificial Sequence
  Synthetic polypeptide
LPCLR

SEQ ID NO: 37501 - protein, 95 aa, Artificial Sequence
  Synthetic polypeptide
DQDHLGQHGAAELLPDALQLQHPRGAGIPVPPGQRAPAQHPQPHAAGRVYPADRRAPVQCPGLPGRQRPQGGRGQDGLCRDHAEADSEEAAGQDM

SEQ ID NO: 37502 - protein, 334 aa, Artificial Sequence
  Synthetic polypeptide
SQHFGRLRLVDHEIKTILANMVQRNCCLTLCNFSIPEELEFQYRRVNELLLSILNPTRQDESIQRIAVHLCNALVCQVDNDHKEAVGKMGFVVTMLKLIQKKLLDKTCDQVMEFSWSALWNITDETPDNCEMFLNFNGMKLFLDCLKEFPEKQELHRNMLGLLGNVAEVKELRPQLMTSQFISVFSNLLESKADGIEVSYNACGVLSHIMFDGPEAWGVCEPQREEVEERMWAAIQSWDINSRRNINYRSFEPILRLLPQGISPVSQHWATWALYNLVSVYPDKYCPLLIKEGGMPLLRDIIKMATARQETKEMARKVIEHCSNFKEENMDTSR

SEQ ID NO: 37503 - protein, 20 aa, Artificial Sequence
  Synthetic polypeptide
GWWIMRSRPSWPTWCSGTAA

SEQ ID NO: 37504 - protein, 59 aa, Artificial Sequence
  Synthetic polypeptide
GVGPLTLEFIQGLVAIPVSIFYSVPHQKHFDHYIRFCFVKDEATLQAMDEKLRKWKVEL

SEQ ID NO: 37505 - protein, 33 aa, Artificial Sequence
  Synthetic polypeptide
LLSSSRAWWPSLSPSSIVCHIRSTLTTISASVL

SEQ ID NO: 37506 - protein, 14 aa, Artificial Sequence
  Synthetic polypeptide
VHPGLGGHPCLHLL

SEQ ID NO: 37507 - protein, 82 aa, Artificial Sequence
  Synthetic polypeptide
SQHSGRLRLADHLRSGVQDQPAQHGLPTTDEDPGKFLWGAAGSGDRPAQECAGDCWWLWGPVHSLPGPGGRRRRGHHHRTLF

SEQ ID NO: 37508 - protein, 366 aa, Artificial Sequence
  Synthetic polypeptide
GQEFKTSLPNMGYPPLTKILASFFGELLGQEIDPLRNVLVTVGGYGALFTAFQALVDEGDEVIIIEPFFDCYEPMTMMAGGRPVFVSLKPGPIQNGELGSSSNWQLDPMELAGKFTSRTKALVLNTPNNPLGKVFSREELELVASLCQQHDVVCITDEVYQWMVYDGHQHISIASLPGMWERTLTIGSAGKTFSATGWKVGWVLGPDHIMKHLRTVHQNSVFHCPTQSQAAVAESFEREQLLFRQPSSYFVQFPQAMQRCRDHMIRSLQSVGLKPIIPQGSYFLITDISDFKRKMPDLPGAVDEPYDRRFVKWMIKNKGLVAIPVSIFYSVPHQKHFDHYIRFCFVKDEATLQAMDEKLRKWKVEL

SEQ ID NO: 37509 - protein, 37 aa, Artificial Sequence
  Synthetic polypeptide
WVWWLTPIIPAFWEAKAGRSPEVRSSRPACPTWVTHH

SEQ ID NO: 37510 - protein, 195 aa, Artificial Sequence
  Synthetic polypeptide
GQEFKTSLPNMGYPPLTKILASFFGELLGQEIDPLRNVLVTVGGYGALFTAFQALVDEGDEVIIIEPFFDCYEPMTMMAGGRPVFVSLKPGPIQNGELGSSSNWQLDPMELAGKFTSRTKALVLNTPNNPLGKVFSREELELVASLCQQHDVVCITDEVYQWMVYDGHQHISIASLPGMWERTLTIGSAGKTFSA

SEQ ID NO: 37511 - protein, 128 aa, Artificial Sequence
  Synthetic polypeptide
GQEFKTSLPNMGYPPLTKILASFFGELLGQEIDPLRNVLVTVGGYGALFTAFQALVDEGDEVIIIEPFFDCYEPMTMMAGGRPVFVSLKPGPIQNGELGSSSNWQLDPMELAGKFTSRTKALVLNTPN

SEQ ID NO: 37512 - protein, 55 aa, Artificial Sequence
  Synthetic polypeptide
SQHSGRLRLADHLRSGVQDQPAQHGLPTTDEDPGKFLWGAAGSGDRPAQECAGDC

SEQ ID NO: 37513 - protein, 42 aa, Artificial Sequence
  Synthetic polypeptide
GQEFKTSLPNMGYPPLTKILASFFGELLGQEIDPLRNVLVTV

SEQ ID NO: 37514 - protein, 399 aa, Artificial Sequence
  Synthetic polypeptide
LCLFEPWFPHLGNGVNATPLKGLGEFTEEKFGQAEKTELDAHFENLLARADSTKNWTEKILRQTEVLLQPNPSARVEEFLYEKLDRKVPSRVTNGELLAQYMADAASELGPTTPYGKTLIKVAEAEKQLGAAERDFIHTASISFLTPLRNFLEGDWKTISKERRLLQNRRLDLDACKARLKKAKAAEAKATTVPDFQETRPRNYILSASASALWNDEVDKAEQELRVAQTEFDRQAEVTRLLLEGISSTHVNHLRCLHEFVKSQTTYYAQCYRHMLDLQKQLGRFPGTFVGTTEPASPPLSSTSPTTAAATMPVVPSVASLAPPGEASLCLEEVAPPASGTRKARVLYDYEAADSSELALLADELITVYSLPGMDPDWLIGERGNKKGKVPVTYLELLS

SEQ ID NO: 37515 - protein, 45 aa, Artificial Sequence
  Synthetic polypeptide
TPPPSKDWVSSRRRNLARLRRLSLMPTLKTFWPGQTAPRTGQRRS

SEQ ID NO: 37516 - protein, 408 aa, Artificial Sequence
  Synthetic polypeptide
LCLFEPWFPHLGNGVNATPLKGLGEFTEEKFGQAEKTELDAHFENLLARADSTKNWTEKILRQTEVLLQPNPSARVEEFLYEKLDRKVPSRVTNGELLAQYMADAASELGPTTPYGKTLIKVAEAEKQLGAAERDFIHTASISFLTPLRNFLEGDWKTISKERRLLQNRRLDLDACKARLKKAKAAEAKATCEGDTVPDFQETRPRNYILSASASALWNDEVDKAEQELRVAQTEFDRQAEVTRLLLEGISSTHVNHLRCLHEFVKSQTTYYAQCYRHMLDLQKQLGSSQGAIFPGTFVGTTEPASPPLSSTSPTTAAATMPVVPSVASLAPPGEASLCLEEVAPPASGTRKARVLYDYEAADSSELALLADELITVYSLPGMDPDWLIGERGNKKGKVPVTYLELLS

SEQ ID NO: 37517 - protein, 404 aa, Artificial Sequence
  Synthetic polypeptide
LCLFEPWFPHLGNGVNATPLKGLGEFTEEKFGQAEKTELDAHFENLLARADSTKNWTEKILRQTEVLLQPNPSARVEEFLYEKLDRKVPSRVTNGELLAQYMADAASELGPTTPYGKTLIKVAEAEKQLGAAERDFIHTASISFLTPLRNFLEGDWKTISKERRLLQNRRLDLDACKARLKKAKAAEAKATTVPDFQETRPRNYILSASASALWNDEVDKAEQELRVAQTEFDRQAEVTRLLLEGISSTHVNHLRCLHEFVKSQTTYYAQCYRHMLDLQKQLGSSQGAIFPGTFVGTTEPASPPLSSTSPTTAAATMPVVPSVASLAPPGEASLCLEEVAPPASGTRKARVLYDYEAADSSELALLADELITVYSLPGMDPDWLIGERGNKKGKVPVTYLELLS

SEQ ID NO: 37518 - protein, 378 aa, Artificial Sequence
  Synthetic polypeptide
LCLFEPWFPHLGNGVNATPLKGLGEFTEEKFGQAEKTELDAHFENLLARADSTKNWTEKILRQTEVLLQPNPSARVEEFLYEKLDRKVPSRVTNGELLAQYMADAASELGPTTPYGKTLIKVAEAEKQLGAAERDFIHTASISFLTPLRNFLEGDWKTISKERRLLQNRRLDLDACKARLKKAKAAEAKATLWNDEVDKAEQELRVAQTEFDRQAEVTRLLLEGISSTHVNHLRCLHEFVKSQTTYYAQCYRHMLDLQKQLGRFPGTFVGTTEPASPPLSSTSPTTAAATMPVVPSVASLAPPGEASLCLEEVAPPASGTRKARVLYDYEAADSSELALLADELITVYSLPGMDPDWLIGERGNKKGKVPVTYLELLS

SEQ ID NO: 37519 - protein, 131 aa, Artificial Sequence
  Synthetic polypeptide
LCLFEPWFPHLGNGVNATPLKGLGEFTEEKFGQAEKTELDAHFENLLARADSTKNWTEKILRQTEVLLQPNPSARVEEFLYEKLDRKVPSRVTNGELLAQYMADAASELGPTTPYDRILLCHPDWSAVVQS

SEQ ID NO: 37520 - protein, 214 aa, Artificial Sequence
  Synthetic polypeptide
GLAQWLTPVIPALSEAEGGGSRGQEMETILANTDQLQKWIRGNVSACANSVFIFDEMDKLHPGIIDAIKPFLDYYEQVDGVSYRKAIFIFLSNAGGDLITKTALDFWRAGRKREDIQLKDLEPVLSVGVFNNKHSGLWHSGLIDKNLIDYFIPFLPLEYRHVKMCVRAEMRARGSAIDEDIVTRVAEEMTFFPRDEKIYSDKGCKTVQSRLDFH

SEQ ID NO: 37521 - protein, 34 aa, Artificial Sequence
  Synthetic polypeptide
SQHFRRPRGADHEVRRWRPSWLTRTSYRSGSAVM

SEQ ID NO: 37522 - protein, 10 aa, Artificial Sequence
  Synthetic polypeptide
HGPVTEVDPR

SEQ ID NO: 37523 - protein, 59 aa, Artificial Sequence
  Synthetic polypeptide
LCITWKWVQILFLSLTNGMTCGNLLHLWFLFCPTTSSNTSPNGRGQQSRLLIHSPEIQP

SEQ ID NO: 37524 - protein, 458 aa, Artificial Sequence
  Synthetic polypeptide
HVATYFISGSCSARQQAQIRHQMAEDSKADYSSILQKFNHEQHEYYHTHIPNIFQKIQEMEERRIVRMGESMKTYAEVDRQVIPIIGKCLDGIVKAAESIDQKNDSQLVIEAYKSGFEPPGDIEFEDYTQPMKRTVSDNSLSNSRGEGKPDLKFGGKSKGKLWPFIKKNKLMSLLTSPHQPPPPPPASASPSAVPNGPQSPKQQKEPLSHRFNEFMTSKPKIHCFRSLKRGLSLKLGATPEDFSNLPPEQRRKKLQQKVDELNKEIQKEMDQRDAITKMKDVYLKNPQMGDPASLDHKLAEVSQNIEKLRVETQKFEAWLAEVEGRLPARSEQARRQSGLYDSQNPPTVNNCAQDRESPDGSYTEEQSQESEMKVLATDFDDEFDDEEPLPAIGTCKALYTFEGQNEGTISVVEGETLYVIEEDKGDGWTRIRRNEDEEGYVPTSYVEVCLDKNAKDS

SEQ ID NO: 37525 - protein, 84 aa, Artificial Sequence
  Synthetic polypeptide
MYYVEVGSNLVSVAYKWHDMWQLTSSLVPVLPDNKLKYVTKWQRTAKQITHPFSRNSTMSSMNITILTSPTSSRKYKRWRKGGL

SEQ ID NO: 37526 - protein, 449 aa, Artificial Sequence
  Synthetic polypeptide
HVATYFISGSCSARQQAQIRHQMAEDSKADYSSILQKFNHEQHEYYHTHIPNIFQKIQEMEERRIVRMGESMKTYAEVDRQVIPIIGKCLDGIVKAAESIDQKNDSQLVIEAYKSGFEPPGDIEFEDYTQPMKRTVSDNSLSNSRGEGKPDLKFGGKSKGKLWPFIKKNKPPPPPPASASPSAVPNGPQSPKQQKEPLSHRFNEFMTSKPKIHCFRSLKRGHSLTLQGATPEDFSNLPPEQRRKKLQQKVDELNKEIQKEMDQRDAITKMKDVYLKNPQMGDPASLDHKLAEVSQNIEKLRVETQKFEAWLAEVEGRLPARSEQARRQSGLYDSQNPPTVNNCAQDRESPDGSYTEEQSQESEMKVLATDFDDEFDDEEPLPAIGTCKALYTFEGQNEGTISVVEGETLYVIEEDKGDGWTRIRRNEDEEGYVPTSYVEVCLDKNAKDS

SEQ ID NO: 37527 - protein, 447 aa, Artificial Sequence
  Synthetic polypeptide
HVATYFISGSCSARQQAQIRHQMAEDSKADYSSILQKFNHEQHEYYHTHIPNIFQKIQEMEERRIVRMGESMKTYAEVDRQVIPIIGKCLDGIVKAAESIDQKNDSQLVIEAYKSGFEPPGDIEFEDYTQPMKRTVSDNSLSNSRGEGKPDLKFGGKSKGKLWPFIKKNKPPPPPPASASPSAVPNGPQSPKQQKEPLSHRFNEFMTSKPKIHCFRSLKRGGATPEDFSNLPPEQRRKKLQQKVDELNKEIQKEMDQRDAITKMKDVYLKNPQMGDPASLDHKLAEVSQNIEKLRVETQKFEAWLAEVEGRLPARSEQARRQSGLYDSQNPPTVNNCAQDRESPDGSYTEEQSQESEMKVLATDFDDEFDDEEPLPAIGTCKALYTFEGQNEGTISVVEGETLYVIEEDKGDGWTRIRRNEDEEGYVPTSYVEVCLDKNAKGAKTYI

SEQ ID NO: 37528 - protein, 433 aa, Artificial Sequence
  Synthetic polypeptide
HVATYFISGSCSARQQAQIRHQMAEDSKADYSSILQKFNHEQHEYYHTHIPNIFQKIQEMEERRIVRMGESMKTYAEVDRQVIPIIGKCLDGIVKAAESIDQKNDSQLVIEAYKSGFEPPGDIEFEDYTQPMKRTVSDNSLSNSRGEGKPDLKFGGKSKGKLWPFIKKNKSPKQQKEPLSHRFNEFMTSKPKIHCFRSLKRGLSLKLGATPEDFSNLPPEQRRKKLQQKVDELNKEIQKEMDQRDAITKMKDVYLKNPQMGDPASLDHKLAEVSQNIEKLRVETQKFEAWLAEVEGRLPARSEQARRQSGLYDSQNPPTVNNCAQDRESPDGSYTEEQSQESEMKVLATDFDDEFDDEEPLPAIGTCKALYTFEGQNEGTISVVEGETLYVIEEDKGDGWTRIRRNEDEEGYVPTSYVEVCLDKNAKGAKTYI

SEQ ID NO: 37529 - protein, 157 aa, Artificial Sequence
  Synthetic polypeptide
VHNLCFGALLFSQDSSCPGGRGCSCRVYCCIPGPGSELGLAAINLAKLKLFRHYYVLIVCYIYFTRIIAFLLKLAVPFQWKWLYQLLDETATLVFFVLTGYKFRPASDNPYLQLSQEEEDLEMESVVTTSGVMESMKKVKKVTNGSVEPQGEWEGAV

SEQ ID NO: 37530 - protein, 81 aa, Artificial Sequence
  Synthetic polypeptide
LSSHVLSSVKAFPSLRGGGTPDRTPVSSGCVCMSLSECIICASVPFSSHRIAAAPGAEAAAVVYTAVSQGLAQSWGLLLLT

SEQ ID NO: 37531 - protein, 28 aa, Artificial Sequence
  Synthetic polypeptide
QLPRGQRLQLSCILLYPRAWLRVGACCY

SEQ ID NO: 37532 - protein, 190 aa, Artificial Sequence
  Synthetic polypeptide
QGWQMGLLLDASSIQSVVAAWRAVIRIPRPYKGFIKDCPSGQLDAAGFQKIYKQFFPFGDPTKFATFVFNVFDENKDGRIEFSEFIQALSVTSRGTLDEKLRWAFKLYDLDNDGYITRNEMLDIVDAIYQMVGNTVELPEEENTPEKRVDRIFAMMDKNADGKLTLQEFQEGSKADPSIVQALSLYDGLV

SEQ ID NO: 37533 - protein, 65 aa, Artificial Sequence
  Synthetic polypeptide
GFRGRTKASSRTAPVGSWMRQASRRSTSNSSRSETPPSLPHLFSTSLMKTRTGELSSPSSSRRCR

SEQ ID NO: 37534 - protein, 71 aa, Artificial Sequence
  Synthetic polypeptide
GMANGFALGCQLYSICRSCLEGRDKDSEAVQRLHQGLPQWAAGCGRLPEDLQAILPVRRPHQVCHICFQRL

SEQ ID NO: 37535 - protein, 366 aa, Artificial Sequence
  Synthetic polypeptide
HMPVVPATQEAEVFIEDVSREFVEEFIWPAIQSSALYEDRYLLGTSLARPCIARKQVEIAQREGAKYVSHGATGKGNDQVRFELSCYSLAPQIKVIAPWRMPEFYNRFKGRNDLMEYAKQHGIPIPVTPKNPWSMDENLMHISYEAGILENPKNQAPPGLYTKTQDPAKAPNTPDILEIEFKKGVPVKVTNVKDGTTHQTSLELFMYLNEVAGKHGVGRIDIVENRFIGMKSRGIYETPAGTILYHAHLDIEAFTMDREVRKIKQGLGLKFAELVYTGFWHSPECEFVRHCIAKSQERVEGKVQVSVLKGQVYILGRESPLSLYNEELVSMNVQGDYEPTDATGFININSLRLKEYHRLQSKVTAK

SEQ ID NO: 37536 - protein, 88 aa, Artificial Sequence
  Synthetic polypeptide
SQLLKRLRCSLRMSAGSLWRSSSGRPSSPAHCMRTATSWAPLLPGPASPANKWKSPSGRGPSMCPTAPQERGTIRSGLSSAATHWPPR

SEQ ID NO: 37537 - protein, 152 aa, Artificial Sequence
  Synthetic polypeptide
HMPVVPATQEAEVFIEDVSREFVEEFIWPAIQSSALYEDRYLLGTSLARPCIARKQVEIAQREGAKYVSHGATGKGNDQVRFELSCYSLAPQIKVIAPWRMPEFYNRFKGRNDLMEYAKQHGIPIPVTPKNPWSMDENLMHISYEAGILENP

SEQ ID NO: 37538 - protein, 133 aa, Artificial Sequence
  Synthetic polypeptide
HMPVVPATQEAEVFIEDVSREFVEEFIWPAIQSSALYEDRYLLGTSLARPCIARKQVEIAQREGAKYVSHGATGKVIAPWRMPEFYNRFKGRNDLMEYAKQHGIPIPVTPKNPWSMDENLMHISYEAGILENP

SEQ ID NO: 37539 - protein, 90 aa, Artificial Sequence
  Synthetic polypeptide
SQLLKRLRCSLRMSAGSLWRSSSGRPSSPAHCMRTATSWAPLLPGPASPANKWKSPSGRGPSMCPTAPQERSLLPGGCLNSTTGSRAAMT

SEQ ID NO: 37540 - protein, 93 aa, Artificial Sequence
  Synthetic polypeptide
MRRDSSGRSQSADQMEPPGHRGPCPRQEPQRHRHQDRSHCLEGPARLQHQLRASLESAGGKGGPRDPAGPGGQVPGGPGGPESTEDGCGRGAA

SEQ ID NO: 37541 - protein, 469 aa, Artificial Sequence
  Synthetic polypeptide
FHLQSGDHTVPPPGFSERMFAKGEACSEETECAEIPQEGPSQPTKWSHLATEARALARSHRDTATKIAATAWRALLASNTSYALLWNLLEGRVALETQRDLEDRYQEVQAAQKALRTAVAEVLPEAESVLATVQQVGADTAPYLALLASPGALPQKSRAEDLGLKAKALEKTVASWQHMATEAARTLQTAAQATLRQTEPLTKLHQEARAALTQASSSVQAATVTVMGARTLLADLEGMKLQFPRPKDQAALQRKADSVSDRLLADTRKKTKQAERMLGNAAPLSSSAKKKGREAEVLAKDSAKLAKALLRERKQAHRRASRLTSQTQATLQQASQQVLASEARRQELEEAERVGAGLSEMEQQIRESRISLEKDIETLSELLARLGSLDTHQAPAQALNETQWALERLRLQLGSPGSLQRKLSLLEQESQQQELQIQGFESDLAEIRADKQNLEAILHSLPENCASWQ

SEQ ID NO: 37542 - protein, 121 aa, Artificial Sequence
  Synthetic polypeptide
NLGIGPCPSPPIDLVTLGMTPHFGRLNFICKVGITQCLLLDSARGCLQRARHVPRRLNAQRFLRKVPVSRPNGATWPQRPVPSPGATETPPPRSQPLLGGPCSPPTPATRFSGICWREGWP

SEQ ID NO: 37543 - protein, 32 aa, Artificial Sequence
  Synthetic polypeptide
SVIVSHHPQMGPPSCRKTNSGLSLILHQVDRV

SEQ ID NO: 37544 - protein, 245 aa, Artificial Sequence
  Synthetic polypeptide
FYIKSTVCEKIMELLGQNEVEQRQRKVVILSQDRFYKVLTAEQKAKALKGQYNFDHPDAFDNDLMHRTLKNIVEGKTVEVPTYDFVTHSRLPETTVVYPADVVLFEGILVFYSQEIRDMFHLRLFVDTDSDVRLSRRVLRDVRRGRDLEQILTQYTTFVKPAFEEFCLPTKKYADVIIPRGVDNMVAINLIVQHIQDILNGDICKWHRGGSNGRSYKRTFSEPGDHPGMLTSGKRSHLESSSRPH

SEQ ID NO: 37545 - protein, 57 aa, Artificial Sequence
  Synthetic polypeptide
CLMICHCLSSPPDGTTQLQENKLRALTDSTSSRPCVRRSWSCWDRTRWNSGSGRWSS

SEQ ID NO: 37546 - protein, 172 aa, Artificial Sequence
  Synthetic polypeptide
FYIKSTVCEKIMELLGQNEVEQRQRKVVILSQDRFYKVLTAEQKAKALKGQYNFDHPDAFDNDLMHRTLKNIVEGKTVEVPTYDFVTHSRLPETTVVYPADVVLFEGILVFYSQEIRDMFHLRLFVDTDSDVRLSRRVLRDVRRGRDLEQILTQYTTFVKPAFEEFCLPQSI

SEQ ID NO: 37547 - protein, 169 aa, Artificial Sequence
  Synthetic polypeptide
FYIKSTVCEKIMELLGQNEVEQRQRKVVILSQDRFYKVLTAEQKAKALKGQYNFDHPDAFDNDLMHRTLKNIVEGKTVEVPTYDFVTHSRLPETTVVYPADVVLFEGILVFYSQEIRDMFHLRLFVDTDSDVRLSRRDKEVCRCDHPARSGQYGCHQPDRAAHPGHSEW

SEQ ID NO: 37548 - protein, 472 aa, Artificial Sequence
  Synthetic polypeptide
DSRAQWLRAQALQEPPAGKDGHPRDPSAVSGVPGKDSRDGSERAPKSPDALESAQSEEEVDELSLIDHNEIMSRLTLKQEGDDGPDVRGGSGDILLVHATETDRKDLVLYCEAFLTTYRTFISPEELIKKLQYRYEKFSPFADTFKKRVSKNTFFVLVRVVDELCLVELTEEILKLLMELVFRLVCNGELSLARVLRKNILDKVDQKKLLRCATSSQPLAARGVAARPGTLHDFHSHEIAEQLTLLDAELFYKIEIPEVLLWAKEQNEEKSPNLTQFTEHFNNMSYWVRSIIMLQEKAQDRERLLLKFIKIMKHLRKLNNFNSYLAILSALDSAPIRRLEWQKQTSEGLAEYCTLIDSSSSFRAYRAALSEVEPPCIPYLGLILQDLTFVHLGNPDYIDGKVNFSKRWQQFNILDSMRCFQQAHYDMRRNDDIINFFNDFSDHLAEEALWELSLKIKPRNITRRKTDREEKT

SEQ ID NO: 37549 - protein, 67 aa, Artificial Sequence
  Synthetic polypeptide
GHRLCRSHRLGKTDIPEIPQRSAASLGRTAETAVRGPQSHQMLWSRLSRRRKWTSCPSLTTTKLCPG

SEQ ID NO: 37550 - protein, 40 aa, Artificial Sequence
  Synthetic polypeptide
QQGPVVKGTGFAGATGWERRTSQRSLSGQRRPWEGQQRRQ

SEQ ID NO: 37551 - protein, 286 aa, Artificial Sequence
  Synthetic polypeptide
DSRAQWLRAQALQEPPAGKDGHPRDPSAVSGVPGKDSRDGSERAPKSPDALESAQSEEEVDELSLIDHNEIMSRLTLKQEGDDGPDVRGGSGDILLVHATETDRKDLVLYCEAFLTTYRTFISPEELIKKLQYRYEKFSPFADTFKKRVSKNTFFVLVRVVDELCLVELTEEILKLLMELVFRLVCNGELSLARVLRKNILDKVDQKKLLRCATSSQPLAARGVAARPGTLHDFHSHEIAEQLTLLDAELFYKIEIPEVLLWAKEQNEEKSPNLTQFTEHFNNMSY

SEQ ID NO: 37552 - protein, 25 aa, Artificial Sequence
  Synthetic polypeptide
DSRAQWLRAQALQEPPAGKDGHPRD

SEQ ID NO: 37553 - protein, 17 aa, Artificial Sequence
  Synthetic polypeptide
GHRLCRSHRLGKTDIPE

SEQ ID NO: 37554 - protein, 24 aa, Artificial Sequence
  Synthetic polypeptide
QQGPVVKGTGFAGATGWERRTSQR

SEQ ID NO: 37555 - protein, 22 aa, Artificial Sequence
  Synthetic polypeptide
AQELETSLGNITLSVLISLPSP

SEQ ID NO: 37556 - protein, 1098 aa, Artificial Sequence
  Synthetic polypeptide
SQHFGRLRQEDHLSPGARDQPRQHNSQRSHLSSFTMKLMDKFHSPKIKRTPSKKGKPAEVSVKIPEKPVNKEATDRFLPEGYPLPLDLEQQAVEFMSTSAVASRSQRQKNLSWLEEKEKEVVSALRYFKTIVDKMAIDKKVLEMLPGSASKVLEAILPLVQNDPRIQHSSALSSCYSRVYQSLANLIRWSDQVMLEGVNSEDKEMVTTVKGVIKAVLDGVKELVRLTIEKQGRPSPTSPVKPSSPASKPDGPAELPLTDREVEILNKTTGMSQSTELLPDATDEEVAPPKPPLPGIRVVDNSPPPALPPKKRQSAPSPTRVAVVAPMSRATSGSSLPVGINRQDFDVDCYAQRRLSGGSHSYGGESPRLSPCSSIGKLSKSDEQLSSLDRDSGQCSRNTSCETLDHYDPDYEFLQQDLSNADQIPQQTAWNLSPLPESLGESGSPFLGPPFQLPLGGHPQPDGPLAPGQQTDTPPALPEKKRRSAASQTADGSGCRVSYERHPSQYDNISGEDLQSTAPIPSVPYAPFAAILPFQHGGSSAPVEFVGDFTAPESTGDPEKPPPLPEKKNKHMLAYMQLLEDYSEPQPSMFYQTPQNEHIYQQKNKLLMEVYGFSDSFSGVDSVQELAPPPALPPKQRQLEPPAGKDGHPRDPSAVSGVPGKDSRDGSERAPKSPDALESAQSEEEVDELSLIDHNEIMSRLTLKQEGDDGPDVRGGSGDILLVHATETDRKDLVLYCEAFLTTYRTFISPEELIKKLQYRYEKFSPFADTFKKRVSKNTFFVLVRVVDELCLVELTEEILKLLMELVFRLVCNGELSLARVLRKNILDKVDQKKLLRCATSSQPLAARGVAARPGTLHDFHSHEIAEQLTLLDAELFYKIEIPEVLLWAKEQNEEKSPNLTQFTEHFNNMSYWVRSIIMLQEKAQDRERLLLKFIKIMKHLRKLNNFNSYLAILSALDSAPIRRLEWQKQTSEGLAEYCTLIDSSSSFRAYRAALSEVEPPCIPYLGLILQDLTFVHLGNPDYIDGKVNFSKRWQQFNILDSMRCFQQAHYDMRRNDDIINFFNDFSDHLAEEALWELSLKIKPRNITRRKTDREEKT

SEQ ID NO: 37557 - protein, 162 aa, Artificial Sequence
  Synthetic polypeptide
SQHFGRLRQEDHLSPGARDQPRQHNSQRSHLSSFTMKLMDKFHSPKIKRTPSKKGKPAEVSVKIPEKPVNKNLSWLEEKEKEVVSALRYFKTIVDKMAIDKKVLEMLPGSASKVLEAILPLVQNDPRIQHSSALSSCYSRVYQSLANLIRWSDQVMLEGVNS

SEQ ID NO: 37558 - protein, 196 aa, Artificial Sequence
  Synthetic polypeptide
SQHFGRLRQEDHLSPGARDQPRQHNSQRSHLSSFTMKLMDKFHSPKIKRTPSKKGKPAEVSVKIPEKPVNKEATDRFLPEGYPLPLDLEQQAVEFMSTSAVASRSQRQKNLSWLEEKEKEVVSALRYFKTIVDKMAIDKKVLEMLPGSASKVLEAILPLVQNDPRIQHSSALSSCYSRVYQSLANLIRWSDQVMLE

SEQ ID NO: 37559 - protein, 14 aa, Artificial Sequence
  Synthetic polypeptide
KDKNEPGVDGWTVL

SEQ ID NO: 37560 - protein, 539 aa, Artificial Sequence
  Synthetic polypeptide
NLVSTKKTKMSQELMAGQSCEIETLTPLIHRCNKLILVGDPKQLPPTVISMKAQEYGYDQSMMARFCRLLEENVEHNMISRLPILQLTVQYRMHPDICLFPSNYVYNRNLKTNRQTEAIRCSSDWPFQPYLVFDVGDGSERRDNDSYINVQEIKLVMEIIKLIKDKRKDVSFRNIGIITHYKAQKTMIQKDLDKEFDRKGPAEVDTVDAFQGRQKDCVIVTCVRANSIQGSIGFLASLQRLNVTITRAKYSLFILGHLRTLMQLLPRSFCVHVNHSPFFSPEPKYLHWALKENQHWNQLIQDAQKRGAIIKTCDKNYRHDAVKILKLKPVLQRSLTHPPTIAPEGSRPQGGLPSSKLDSGFAKTSVAASLYHTPSDSKEITLTVTSKDPERPPVHDQLQDPRLLKRMGIEVKGGIFLWDPQPSSPQHPGATPPTGEPGFPVVHQDLSHIQQPAAVVAALSSHKPPVRGEPPAASPEASTCQSKCDDPEEELCHRREARAFSEGEQEKCGSETHHTRRNSRWDKRTLEQEDSSSKKRKLL

SEQ ID NO: 37561 - protein, 510 aa, Artificial Sequence
  Synthetic polypeptide
NLVSTKKTKMSQELMAGQSCEIETLTPLIHRCNKLILVGDPKQLPPTVISMKAQEYGYDQSMMARFCRLLEENVEHNMISRLPILQLTVQYRMHPDICLFPSNYVYNRNLKTNRQTEAIRCSSDWPFQPYLVFDVGDGSERRDNDSYINVQEIKLVMEIIKLIKDKRKDVSFRNIGIITHYKAQKTMIQKDLDKEFDRKGPAEVDTVDAFQGRQKDCVIVTCVRANSIQGSIGFLASLQRLNVTITRAKYSLFILGHLRTLMENQHWNQLIQDAQKRGAIIKTCDKNYRHDAVKILKLKPVLQRSLTHPPTIAPEGSRPQGGLPSSKLDSGFAKTSVAASLYHTPSDSKEITLTVTSKDPERPPVHDQLQDPRLLKRMGIEVKGGIFLWDPQPSSPQHPGATPPTGEPGFPVVHQDLSHIQQPAAVVAALSSHKPPVRGEPPAASPEASTCQSKCDDPEEELCHRREARAFSEGEQEKCGSETHHTRRNSRWDKRTLEQEDSSSKKRKLL

SEQ ID NO: 37562 - protein, 477 aa, Artificial Sequence
  Synthetic polypeptide
NLVSTKKTKMSQELMAGQSCEIETLTPLIHRCNKLILVGDPKQLPPTVISMKAQEYGYDQSMMARFCRLLEENVEHNMISRLPILQLTVQYRMHPDICLFPSNYVYNRNLKTNRQTEAIRCSSDWPFQPYLVFDVGDGSERRDNDSYINVQEIKLVMEIIKLIKDKRKDVSFRNIGIITHYKAQKTMIQKDLDKEFDRKGFLASLQRLNVTITRAKYSLFILGHLRTLMENQHWNQLIQDAQKRGAIIKTCDKNYRHDAVKILKLKPVLQRSLTHPPTIAPEGSRPQGGLPSSKLDSGFAKTSVAASLYHTPSDSKEITLTVTSKDPERPPVHDQLQDPRLLKRMGIEVKGGIFLWDPQPSSPQHPGATPPTGEPGFPVVHQDLSHIQQPAAVVAALSSHKPPVRGEPPAASPEASTCQSKCDDPEEELCHRREARAFSEGEQEKCGSETHHTRRNSRWDKRTLEQEDSSSKKRKLL

SEQ ID NO: 37563 - protein, 952 aa, Artificial Sequence
  Synthetic polypeptide
MDKQVAQEWLNSPNRENFYQLQVRKFPADYIKYWEFAVYLEECELAKQLYPKENDLVFLAPERINEEKKDTERNDIQDLHEYHSGYVHKFRRTSVMRNGKTECYLSIQTQENFPANLNELVNCIVISSLVTTQRKLKAMSLLGSRNQLARAVLNPNPMDFCTKDLLTTTSERIIAYLRDFNEDQKKAIETAYAMVKHSPSVAKICLIHGPPGTGKSKTIVGLLYRLLTENQRKGHSDENSNAKIKQNRVLVCAPSNAAVDELMKKIILEFKEKCKDKKNPLGNCGDINLVRLGPEKSINSEVLKFSLDSQVNHRMKKELPSHVQAMHKRKEFLDYQLDELSRQRALCRGGREIQRQELDENISKVSKERQELASKIKEVQGRPQKTQSIIILESHIICCTLSTSGGLLLESAFRGQGGVPFSCVIVDEAGQSCEIETLTPLIHRCNKLILVGDPKQLPPTVISMKAQEYGYDQSMMARFCRLLEENVEHNMISRLPILQLTVQYRMHPDICLFPSNYVYNRNLKTNRQTEAIRCSSDWPFQPYLVFDVGDGSERRDNDSYINVQEIKLVMEIIKLIKDKRKDVSFRNIGIITHYKAQKTMIQKDLDKEFDRKGPAEVDTVDAFQGRQKDCVIVTCVRANSIQGSIGFLASLQRLNVTITRAKYSLFILGHLRTLMQLLPRSFCVHVNHSPFFSPEPKYLHWALKENQHWNQLIQDAQKRGAIIKTCDKNYRHDAVKILKLKPVLQRSLTHPPTIAPEGSRPQGGLPSSKLDSGFAKTSVAASLYHTPSDSKEITLTVTSKDPERPPVHDQLQDPRLLKRMGIEVKGGIFLWDPQPSSPQHPGATPPTGEPGFPVVHQDLSHIQQPAAVVAALSSHKPPVRGEPPAASPEASTCQSKCDDPEEELCHRREARAFSEGEQEKCGSETHHTRRNSRWDKRTLEQEDSSSKKRKLL

SEQ ID NO: 37564 - protein, 49 aa, Artificial Sequence
  Synthetic polypeptide
TLFMVAKKWKQPKCVSVDEWINRWHKNGSTLQIERISISCKYENFLPII

SEQ ID NO: 37565 - protein, 11 aa, Artificial Sequence
  Synthetic polypeptide
TGGTRMAQLSK

SEQ ID NO: 37566 - protein, 923 aa, Artificial Sequence
  Synthetic polypeptide
MDKQVAQEWLNSPNRENFYQLQVRKFPADYIKYWEFAVYLEECELAKQLYPKENDLVFLAPERINEEKKDTERNDIQDLHEYHSGYVHKFRRTSVMRNGKTECYLSIQTQENFPANLNELVNCIVISSLVTTQRKLKAMSLLGSRNQLARAVLNPNPMDFCTKDLLTTTSERIIAYLRDFNEDQKKAIETAYAMVKHSPSVAKICLIHGPPGTGKSKTIVGLLYRLLTENQRKGHSDENSNAKIKQNRVLVCAPSNAAVDELMKKIILEFKEKCKDKKNPLGNCGDINLVRLGPEKSINSEVLKFSLDSQVNHRMKKELPSHVQAMHKRKEFLDYQLDELSRQRALCRGGREIQRQELDENISKVSKERQELASKIKEVQGRPQKTQSIIILESHIICCTLSTSGGLLLESAFRGQGGVPFSCVIVDEAGQSCEIETLTPLIHRCNKLILVGDPKQLPPTVISMKAQEYGYDQSMMARFCRLLEENVEHNMISRLPILQLTVQYRMHPDICLFPSNYVYNRNLKTNRQTEAIRCSSDWPFQPYLVFDVGDGSERRDNDSYINVQEIKLVMEIIKLIKDKRKDVSFRNIGIITHYKAQKTMIQKDLDKEFDRKGPAEVDTVDAFQGRQKDCVIVTCVRANSIQGSIGFLASLQRLNVTITRAKYSLFILGHLRTLMENQHWNQLIQDAQKRGAIIKTCDKNYRHDAVKILKLKPVLQRSLTHPPTIAPEGSRPQGGLPSSKLDSGFAKTSVAASLYHTPSDSKEITLTVTSKDPERPPVHDQLQDPRLLKRMGIEVKGGIFLWDPQPSSPQHPGATPPTGEPGFPVVHQDLSHIQQPAAVVAALSSHKPPVRGEPPAASPEASTCQSKCDDPEEELCHRREARAFSEGEQEKCGSETHHTRRNSRWDKRTLEQEDSSSKKRKLL

SEQ ID NO: 37567 - protein, 890 aa, Artificial Sequence
  Synthetic polypeptide
MDKQVAQEWLNSPNRENFYQLQVRKFPADYIKYWEFAVYLEECELAKQLYPKENDLVFLAPERINEEKKDTERNDIQDLHEYHSGYVHKFRRTSVMRNGKTECYLSIQTQENFPANLNELVNCIVISSLVTTQRKLKAMSLLGSRNQLARAVLNPNPMDFCTKDLLTTTSERIIAYLRDFNEDQKKAIETAYAMVKHSPSVAKICLIHGPPGTGKSKTIVGLLYRLLTENQRKGHSDENSNAKIKQNRVLVCAPSNAAVDELMKKIILEFKEKCKDKKNPLGNCGDINLVRLGPEKSINSEVLKFSLDSQVNHRMKKELPSHVQAMHKRKEFLDYQLDELSRQRALCRGGREIQRQELDENISKVSKERQELASKIKEVQGRPQKTQSIIILESHIICCTLSTSGGLLLESAFRGQGGVPFSCVIVDEAGQSCEIETLTPLIHRCNKLILVGDPKQLPPTVISMKAQEYGYDQSMMARFCRLLEENVEHNMISRLPILQLTVQYRMHPDICLFPSNYVYNRNLKTNRQTEAIRCSSDWPFQPYLVFDVGDGSERRDNDSYINVQEIKLVMEIIKLIKDKRKDVSFRNIGIITHYKAQKTMIQKDLDKEFDRKGFLASLQRLNVTITRAKYSLFILGHLRTLMENQHWNQLIQDAQKRGAIIKTCDKNYRHDAVKILKLKPVLQRSLTHPPTIAPEGSRPQGGLPSSKLDSGFAKTSVAASLYHTPSDSKEITLTVTSKDPERPPVHDQLQDPRLLKRMGIEVKGGIFLWDPQPSSPQHPGATPPTGEPGFPVVHQDLSHIQQPAAVVAALSSHKPPVRGEPPAASPEASTCQSKCDDPEEELCHRREARAFSEGEQEKCGSETHHTRRNSRWDKRTLEQEDSSSKKRKLL

SEQ ID NO: 37568 - protein, 43 aa, Artificial Sequence
  Synthetic polypeptide
LRNTAPWVRISFRPFTRKEQQCFRNFHIPEEASFFARMLQLGA

SEQ ID NO: 37569 - protein, 105 aa, Artificial Sequence
  Synthetic polypeptide
STDSGTQLPGFGYHSGPLPGKNSSVSGIFTFQKRRPSLHGCCSSGLRSPSSHVDCSVQRSIFTCRIHPPDWKNRPDWLPWEQPAHFGSFGGRICQLVGFSQNQRF

SEQ ID NO: 37570 - protein, 305 aa, Artificial Sequence
  Synthetic polypeptide
ALTPEHSSLGSDIIPALYQERTAVFQEFSHSRRGVLLCTDVAARGLDLPQVTWIVQYNAPSSPAEYIHRIGRTARIGCHGSSLLILAPSEAEYVNSLASHKINVSEIKMEDILCVLTRDDCFKGKRWGAQKSHAVGPQEIRERATVLQTVFEDYVHSSERRVSWAKKALQSFIQAYATYPRELKHIFHVRSLHLGHVAKSFGLRDAPRNLSALTRKKRKAHVKRPDLHKKTQSKHSLAEILRSEYSSGMEADIAKVKKQNAPGEPGGRPLQHSLQPTPCFGRGKTLKWRKTQKGVQRDSKTSQKV

SEQ ID NO: 37571 - protein, 137 aa, Artificial Sequence
  Synthetic polypeptide
STDSGTQLPGFGYHSGPLPGKNSSVSGIFTFQKRRPSLHGCCSSGLRSPSSHVDCSEYIHRIGRTARIGCHGSSLLILAPSEAEYVNSLASHKINSAVLHPSLRHLPQGAEAHLPRPIPPPWACGEELRTKRCPQES

SEQ ID NO: 37572 - protein, 232 aa, Artificial Sequence
  Synthetic polypeptide
ALTPEHSSLGSDIIPALYQERTAVFQEFSHSRRGVLLCTDVAARGLDLPQVTWIVQNTSTGLEEPPGLAAMGAACSFWLLRRQNMSTRWLLTKSTLQSFIQAYATYPRELKHIFHVRSLHLGHVAKSFGLRDAPRNLSALTRKKRKAHVKRPDLHKKTQSKHSLAEILRSEYSSGMEADIAKVKKQNAPGEPGGRPLQHSLQPTPCFGRGKTLKWRKTQKGVQRDSKTSQKV

SEQ ID NO: 37573 - protein, 37 aa, Artificial Sequence
  Synthetic polypeptide
LRNTAPWVRISFRPFTRKEQQCFRNFHIPEEASFFAR

SEQ ID NO: 37574 - protein, 40 aa, Artificial Sequence
  Synthetic polypeptide
STDSGTQLPGFGYHSGPLPGKNSSVSGIFTFQKRRPSLHV

SEQ ID NO: 37575 - protein, 39 aa, Artificial Sequence
  Synthetic polypeptide
ALTPEHSSLGSDIIPALYQERTAVFQEFSHSRRGVLLCT

SEQ ID NO: 37576 - protein, 17 aa, Artificial Sequence
  Synthetic polypeptide
CLAHWSLEEQMRGPHSC

SEQ ID NO: 37577 - protein, 899 aa, Artificial Sequence
  Synthetic polypeptide
EAHTAADTHTLVGAHRLRGNLQPRASAAHLPATEPDHWGHGVCRGESSTQEIGEELINGVIYSISLRKVQLHHGGNKGQRWLGYENESALNLYETCKVRTVKAGTLEKLVEHLVPAFQGSDLSYVTIFLCTYRAFTTTQQVLDLLFKRYGRCDALTASSRYGCILPYSDEDGGPQDQLKNAISSILGTWLDQYSEDFCQPPDFPCLKQLVAYVQLNMPGSDLERRAHLLLAQLEHSEPIEAEPEALSPVPALKPTPELELALTPARAPSPVPAPAPEPEPAPTPAPGSELEVAPAPAPELQQAPEPAVGLESAPAPALELEPAPEQDPAPSQTLELEPAPAPVPSLQPSWPSPVVAENGLSEEKPHLLVFPPDLVAEQFTLMDAELFKKVVPYHCLGSIWSQRDKKGKEHLAPTIRATVTQFNSVANCVITTCLGNRSTKAPDRARVVEHWIEVARECRILKNFSSLYAILSALQSNSIHRLKKTWEDVSRDSFRIFQKLSEIFSDENNYSLSRELLIKEGTSKFATLEMNPKRAQKRPKETGIIQGTVPYLGTFLTDLVMLDTAMKDYLYGRLINFEKRRKEFEVIAQIKLLQSACNNYSIAPDEQFGAWFRAVERLSETESYNLSCELEPPSESASNTLRTKKNTAIVKRWSDRQAPSTELSTSGSSHSKSCDQLRCGPYLSSGDIADALSVHSAGSSSSDVEEINISFVPESPDGQEKKFWESASQSSPETSGISSASSSTSSSSASTTPVAATRTHKRSVSGLCNSSSALPLYNQQVGDCCIIRVSLDVDNGNMYKSILVTSQDKAPAVIRKAMDKHNLEEEEPEDYELLQILSDDRKLKIPENANVFYAMNSTANYDFVLKKRTFTKGVKVKHGASSTLPRMKQKGLKIAKGIF

SEQ ID NO: 37578 - protein, 101 aa, Artificial Sequence
  Synthetic polypeptide
GLWKDTGLGVRDLGCVTLGSVPNCSELFLCRWIVVPSSLEFGGADERPTQLLTLTPWLAPIVSEGTFNPELLQHIYQPLNLTIGVTVFAVGKAPRRRSVRS

SEQ ID NO: 37579 - protein, 221 aa, Artificial Sequence
  Synthetic polypeptide
EAHTAADTHTLVGAHRLRGNLQPRASAAHLPATEPDHWGHGVCRGESFLESAEEFFMRGYRVHYYIFTDNPAAVPGVPLGPHRLLSSIPIQGHSHWEETSMRRMETISQHIAKRAHREVDYLFCLDVDMVFRNPWGPETLGDLVAAIHPSYYAVPRQQFPYERRRVSTAFVADSEGDFYYGGAVFGGQVARVYEFTRGCHMAILADKANGIMAAWREESHL

SEQ ID NO: 37580 - protein, 266 aa, Artificial Sequence
  Synthetic polypeptide
GLWKDTGLGVRDLGCVTLGSVPNCSELFLCRWIVVPSSLEFGGADERPTQLLTLTPWLAPIVSEGTFNPELLQHIYQPLNLTIGVTVFAVGNPSWSQPRSSSCVGTGCTTTSSLTTLQPFPGSRWVPTGFSAPSPSRVTPTGRRHPCAGWRPSASTLLRGLTGRWTTSSALMWTWCFGTRGALRPWETWWLPFTQATTPFPASSSPMSAGVFPLPLWQTAKGTSIMVGQSSGGRWPGYMSLLGAATWPSWRTRPMASWLPGGRKAT

SEQ ID NO: 37581 - protein, 74 aa, Artificial Sequence
  Synthetic polypeptide
EAHTAADTHTLVGAHRLRGNLQPRASAAHLPATEPDHWGHGVCRGEVHSFHPVLPGVSRGVLHAWVPGALLHLH

SEQ ID NO: 37582 - protein, 319 aa, Artificial Sequence
  Synthetic polypeptide
GLWKDTGLGVRDLGCVTLGSVPNCSELFLCRWIVVPSSLEFGGADERPTQLLTLTPWLAPIVSEGTFNPELLQHIYQPLNLTIGVTVFAVGKYTHFIQSFLESAEEFFMRGYRVHYYIFTDNPAAVPGVPLGPHRLLSSIPIQGHSHWEETSMRRMETISQHIAKRAHREVDYLFCLDVDMVFRNPWGPETLGDLVAAIHPSYYAVPRQQFPYERRRVSTAFVADSEGDFYYGGAVFGGQVARVYEFTRGCHMAILADKANGIMAAWREESHLNRHFISNKPSKVLSPEYLWDDRKPQPPSLKLIRFSTLDKDISCLRS

SEQ ID NO: 37583 - protein, 120 aa, Artificial Sequence
  Synthetic polypeptide
GLWKDTGLGVRDLGCVTLGSVPNCSELFLCRWIVVPSSLEFGGADERPTQLLTLTPWLAPIVSEGTFNPELLQHIYQPLNLTIGVTVFAVGKYTHFIQSFLESAEEFFMRGYRVHYYIFT

SEQ ID NO: 37584 - protein, 17 aa, Artificial Sequence
  Synthetic polypeptide
TLISQGPSSSNETSPAL

SEQ ID NO: 37585 - protein, 31 aa, Artificial Sequence
  Synthetic polypeptide
FLRAPPAQTRPHPLCEMAPLYQVAAAESHPL

SEQ ID NO: 37586 - protein, 231 aa, Artificial Sequence
  Synthetic polypeptide
YVDSDFSGPLQLKRDLTRFVKWPRYIRLQRQRAILYKRLKVPPAINQFTQALDRQTATQLLKLAHKYRPETKQEKKQRLLARAEKKAAGKGDVPTKRPPVLRAGVNTVTTLVENKKAQLVVIAHDVDPIELVVFLPALCRKMGVPYCIIKGKARLGRLVHRKTCTTVAFTQVNSEDKGALAKLVEAIRTNYNDRYDEIRRHWGGNVLGPKSVARIAKLEKAKAKELATKLG

SEQ ID NO: 37587 - protein, 129 aa, Artificial Sequence
  Synthetic polypeptide
YVDSDFSGPLQLKRDLTRFVKWPRYIRLQRQRAILYKRLKVPPAINQFTQALDRQTATQLLKLAHKYRPETKQEKKQRLLARAEKKAAGKGDVPTKRPPVLRAGVNTVTTLVENKKAQLVVIAHDVDPI

SEQ ID NO: 37588 - protein, 160 aa, Artificial Sequence
  Synthetic polypeptide
LIEDETQVSRATQGEQDNYEMHVRAANIVRAGESLMKLVSDLKQFLILNDFPSVNEAIDQRNQQLRTLQEECDRKLITLRDEISIDLYELEEEYYSSSSSLCEANDLPLCEAYGRLDLDTDSADGLSAPLLASPEPSAGPLQVAAPAHSHAGGPGPTEHA

SEQ ID NO: 37589 - protein, 26 aa, Artificial Sequence
  Synthetic polypeptide
QYGFGWRFHFLVPQFLLHGGVLVMTD

SEQ ID NO: 37590 - protein, 100 aa, Artificial Sequence
  Synthetic polypeptide
LIEDETQVSRATQGEQDNYEMHVRAANIVRAGESLMKLVSDLKQFLILNDFPSVNEAIDQRNQQLRTLQEECDRKLITLRDEISIDLYELEEEYYSSRYK

SEQ ID NO: 37591 - protein, 94 aa, Artificial Sequence
  Synthetic polypeptide
LIEDETQVSRATQGEQDNYEMHVRAGESLMKLVSDLKQFLILNDFPSVNEAIDQRNQQLRTLQEECDRKLITLRDEISIDLYELEEEYYSSRYK

SEQ ID NO: 37592 - protein, 97 aa, Artificial Sequence
  Synthetic polypeptide
LIEDETQVSRATQGEQDNYEMHVRAANIVRAGESLMKLVSDLKQFLILNDFPSVNEAIDQRNQQLRTLQEECDRKLITLRDEISIDLYELEEEYYSS

SEQ ID NO: 37593 - protein, 95 aa, Artificial Sequence
  Synthetic polypeptide
LIEDETQVSRATQGEQDNYEMHVRAANIVRAGESLMKLVSDLKQFLILNDFPSVNEAIDQRNQQLRTLQEECDRKLITLRDEISIDLYELEEEYY

SEQ ID NO: 37594 - protein, 71 aa, Artificial Sequence
  Synthetic polypeptide
LIEDETQVSRATQGEQDNYEMHVRAANIVRAGESLMKLVSDLKQFLILNDFPSVNEAIDQRNQQLRTLQEE

SEQ ID NO: 37595 - protein, 257 aa, Artificial Sequence
  Synthetic polypeptide
FYIMFLRVTKQYLPHVARLCLISTFLEDGIRMWFQWSEQRDYIDTTWNCGYLLASSFVFLNLLGQLTGCVLVLSRNFVQYACFGLFGIIALQTIAYSILWDLKFLMRNLALGGGLLLLLAESRSEGKSMFAGVPTMRESSPKQYMQLGGRVLLVLMFMTLLHFDASFFSIVQNIVGTALMILVAIGFKTKLAALTLVVWLFAINVYFNAFWTIPVYKPMHDFLKYDFFQTMSVIGGLLLVVALGPGGVSMDEKKKEW

SEQ ID NO: 37596 - protein, 31 aa, Artificial Sequence
  Synthetic polypeptide
LQENKLRAPTDSTLCSSVSQSSTCPTWRASV

SEQ ID NO: 37597 - protein, 211 aa, Artificial Sequence
  Synthetic polypeptide
AAGSGAKLHLYLQPLPMARITTQAPPPVSSAAALDSHGSVNPIVNSACEGSRLHAPYEKQMPDDPSLSPIIPRGWSSCKKTSSGLPLILHYVPPCHKAVPAPRGAPLSDQHLPGGRHPYVVPVERAARLHRHHLELRLPAGLVLRLPQLAGTADWLRPGVEQELRAVRLLRALWNHSSADDCLQHFMGLEVFDEEPGPGRRPVAAPSRIPF

SEQ ID NO: 37598 - protein, 147 aa, Artificial Sequence
  Synthetic polypeptide
FYIMFLRVTKQYLPHVARLCLISTFLEDGIRMWFQWSEQRDYIDTTWNCGYLLASSFVFLNLLGQLTGCVLVLSRNFVQYACFGLFGIIALQTIAYSILWDLKFLMRNLALGGGLLLLLAESRSEGKSMFAGVPTMRESSPKQYLPG

SEQ ID NO: 37599 - protein, 116 aa, Artificial Sequence
  Synthetic polypeptide
FYIMFLRVTKQYLPHVARLCLISTFLEDGIRMWFQWSEQRDYIDTTWNCGYLLASSFVFLNLLGQLTGCVLVLSRNFVQYACFGLFGIIALQTIAYSILWDLKFLMRLSRTSWAQL

SEQ ID NO: 37600 - protein, 204 aa, Artificial Sequence
  Synthetic polypeptide
AAGSGAKLHLYLQPLPMARITTQAPPPVSSAAALDSHGSVNPIVNSACEGSRLHAPYEKQMPDDPSLSPIIPRGWSSCKKTSSGLPLILHYVPPCHKAVPAPRGAPLSDQHLPGGRHPYVVPVERAARLHRHHLELRLPAGLVLRLPQLAGTADWLRPGVEQELRAVRLLRALWNHSSADDCLQHFMGLEVFDEIVQNIVGTAL

SEQ ID NO: 37601 - protein, 174 aa, Artificial Sequence
  Synthetic polypeptide
FYIMFLRVTKQYLPHVARLCLISTFLEDGIRMWFQWSEQRDYIDTTWNCGYLLASSFVFLNLLGQLTGCVLVLSRNFVQYACFGLFGIIALQTIAYSILWDLKFLMRNLALGGGLLLLLAESRSEGKSMFAGVPTMRESSPKQYMQLGGRVLLVLMFMTLLHFDASFFSQPSQQ

SEQ ID NO: 37602 - protein, 6 aa, Artificial Sequence
  Synthetic polypeptide
VDGPLS

SEQ ID NO: 37603 - protein, 487 aa, Artificial Sequence
  Synthetic polypeptide
MDPFRKSWMAPEALNFSFSQKSDIWSLGCIILDMTSCSFMDGTEAMHLRKSLRQSPGSLKAVLKTMEEKQIPDVETFRNLLPLMLQIDPSDRITIKDVVHITFLRGSFKSSCVSLTLHRQMVPASITDMLLEGNVASILEVMQKFSGWPEVQLRAMKRLLKMPADQLGLPWPPELVEVVVTTMELHDRVLDVQLCACSLLLHLLGQALVHHPEAKAPCNQAITSTLLSALQSHPEEEPLLVMVYSLLAITTTQESESLSEELQNAGLLEHILEHLNSSLKSRDVCASGLGLLWALLLDGIIVNKAPLEKVPDLISQVLATYPADGEMAEASCGVFWLLSLLGCIKEQQFEQVVALLLQSIRLCQDRALLVNNAYRGLASLVKVSELAAFKVVVQEEGGSGLSLIKETYQLHRDDPEVVENVGMLLVHLASYEEILPELVSSSMKALLQEIKERFTSSLVSDSSAFSKPGLPPGGSPQLGCTTSGGLE

SEQ ID NO: 37604 - protein, 35 aa, Artificial Sequence
  Synthetic polypeptide
SRWTPFVSPGWPLKPSTSPSARNQTSGPWAASFWT

SEQ ID NO: 37605 - protein, 20 aa, Artificial Sequence
  Synthetic polypeptide
VDGAQKPCICGSPSARAQAA

SEQ ID NO: 37606 - protein, 146 aa, Artificial Sequence
  Synthetic polypeptide
MGHRSHASAEVPPPEPRQPEGRPEDNGGEADPGCGNLQESSALDAPDRPLGSNNDKGRGAHHLLERLLQVLVRLSDPAPADGACVHHRHAVRRQRGQHFRGHAEILWLARSPAQGHEEASENACRSARSAVAPGAGGGGGHDHGAT

SEQ ID NO: 37607 - protein, 449 aa, Artificial Sequence
  Synthetic polypeptide
SRWGTEAMHLRKSLRQSPGSLKAVLKTMEEKQIPDVETFRNLLPLMLQIDPSDRITIKDVVHITFLRGSFKSSCVSLTLHRQMVPASITDMLLEGNVASILEVMQKFSGWPEVQLRAMKRLLKMPADQLGLPWPPELVEVVVTTMELHDRVLDVQLCACSLLLHLLGQALVHHPEAKAPCNQAITSTLLSALQSHPEEEPLLVMVYSLLAITTTQESESLSEELQNAGLLEHILEHLNSSLKSRDVCASGLGLLWALLLDGIIVNKAPLEKVPDLISQVLATYPADGEMAEASCGVFWLLSLLGCIKEQQFEQVVALLLQSIRLCQDRALLVNNAYRGLASLVKVSELAAFKVVVQEEGGSGLSLIKETYQLHRDDPEVVENVGMLLVHLASYEEILPELVSSSMKALLQEIKERFTSSLVSDSSAFSKPGLPPGGSPQLGCTTSGGLE

SEQ ID NO: 37608 - protein, 7 aa, Artificial Sequence
  Synthetic polypeptide
RHQHIVR

SEQ ID NO: 37609 - protein, 51 aa, Artificial Sequence
  Synthetic polypeptide
TPAHSSLSSCSACRLCAPSGSNAWNISSSSSSSGTHPLTPSLWRCWRRRTK

SEQ ID NO: 37610 - protein, 50 aa, Artificial Sequence
  Synthetic polypeptide
LGARCPHLPSRGGDIHTTAFDGSSKGIRLGQCHSRRSSGLHGREEPGRVP

SEQ ID NO: 37611 - protein, 69 aa, Artificial Sequence
  Synthetic polypeptide
WKLKRNKTGPVPFASQLWTAWKRRTRPCAMTTTSTSTPPSGILKHLQRSLQLEKILKDLTESCEQSDRR

SEQ ID NO: 37612 - protein, 627 aa, Artificial Sequence
  Synthetic polypeptide
RHFCQRHFLITWMREKKLVLLCVLPLQATVSRSLSVTRNWASAIRVAALDCMEEKNQAVCHDYDIHFYPTFRYFKAFTKEFTTGENFKGPDRELRTVRQTMIDFLQNHTEGSRPPACPRLDPIQPSDVLSLLDNRGSHYVAIVFESNSSYLGREVILDLIPYESIVVTRALDGDKAFLEKLGVSSVPSCYLIYPNGSHGLINVVKPLRAFFSSYLKSLPDVRKKSLPLPEKPHKEENSEIVVWREFDKSKLYTVDLESGLHYLLRVELAAHKSLAGAELKTLKDFVTVLAKLFPGRPPVKKLLEMLQEWLASLPLDRIPYNAVLDLVNNKMRISGIFLTNHIKWVGCQGSRSELRGYPCSLWKLFHTLTVEASTHPDALVGTGFEDDPQAVLQTMRRYVHTFFGCKECGEHFEEMAKESMDSVKTPDQAILWLWKKHNMVNGRLAGHLSEDPRFPKLQWPTPDLCPACHEEIKGLASWDEGHVLTFLKQHYGRDNLLDTYSADQGDSSEGGTLARGEEEEKRLTPPEVSHGDRDTQSVRPPGALGPRPALPESLHHSLDGKLQSLDGPGAHKEVGGAAPFLGVDFSSLDMSLCVVLYVASSLFLMVMYFFFRVRSRRWKVKHHHPAV

SEQ ID NO: 37613 - protein, 64 aa, Artificial Sequence
  Synthetic polypeptide
HETGPVPFASQLWTAWKRRTRPCAMTTTSTSTPPSGILKHLQRSLQLEKILKDLTESCEQSDRR

SEQ ID NO: 37614 - protein, 86 aa, Artificial Sequence
  Synthetic polypeptide
ALTAQPQRFLQTATRSARKTAGPQITTFLSTSFPYNVDERKKTGFVMCPSPSSHRFQEPVSDTKLGQCHSRRSSGLHGREEPGRVP

SEQ ID NO: 37615 - protein, 28 aa, Artificial Sequence
  Synthetic polypeptide
SRYFGRLGQCHSRRSSGLHGREEPGRVP

SEQ ID NO: 37616 - protein, 603 aa, Artificial Sequence
  Synthetic polypeptide
AGAVAPACNPGTLEDWASAIRVAALDCMEEKNQAVCHDYDIHFYPTFRYFKAFTKEFTTGENFKGPDRELRTVRQTMIDFLQNHTEGSRPPACPRLDPIQPSDVLSLLDNRGSHYVAIVFESNSSYLGREVILDLIPYESIVVTRALDGDKAFLEKLGVSSVPSCYLIYPNGSHGLINVVKPLRAFFSSYLKSLPDVRKKSLPLPEKPHKEENSEIVVWREFDKSKLYTVDLESGLHYLLRVELAAHKSLAGAELKTLKDFVTVLAKLFPGRPPVKKLLEMLQEWLASLPLDRIPYNAVLDLVNNKMRISGIFLTNHIKWVGCQGSRSELRGYPCSLWKLFHTLTVEASTHPDALVGTGFEDDPQAVLQTMRRYVHTFFGCKECGEHFEEMAKESMDSVKTPDQAILWLWKKHNMVNGRLAGHLSEDPRFPKLQWPTPDLCPACHEEIKGLASWDEGHVLTFLKQHYGRDNLLDTYSADQGDSSEGGTLARGEEEEKRLTPPEVSHGDRDTQSVRPPGALGPRPALPESLHHSLDGKLQSLDGPGAHKEVGGAAPFLGVDFSSLDMSLCVVLYVASSLFLMVMYFFFRVRSRRWKVKHHHPAV

SEQ ID NO: 37617 - protein, 76 aa, Artificial Sequence
  Synthetic polypeptide
PGQWLPPVIPVLWKTGPVPFASQLWTAWKRRTRPCAMTTTSTSTPPSGILKHLQRSLQLEKILKDLTESCEQSDRR

SEQ ID NO: 37618 - protein, 35 aa, Artificial Sequence
  Synthetic polypeptide
GWTWCLSPVIPALWEAEAGGSLEPRSSRAAWATRP

SEQ ID NO: 37619 - protein, 67 aa, Artificial Sequence
  Synthetic polypeptide
AGRGVSRLSSQHFGRLRRADHLSPGVPEQPGQHGHSHAGGAARTARPGPAGEGRAAQAGAGAGREGG

SEQ ID NO: 37620 - protein, 188 aa, Artificial Sequence
  Synthetic polypeptide
AQEFQSSLGNTAIATREELHAQHARGLQEKDALRKQVRELGEKADELQLQVFQCEAQLLAVEGRLRRQQLETLVLSSDLEDGSPRRSQELSLPQDLEDTQLSDKGCLAGGGSPKQPFAALHQEQVLRNPHDAGLSSGEPPEKERRRLKESFENYRRKRALRKMQKGWRQGEEDRENTTGSDNTDTEGS

SEQ ID NO: 37621 - protein, 144 aa, Artificial Sequence
  Synthetic polypeptide
AQEFQSSLGNTAIATREELHAQHARGLQEKDALRKQVRELGEKADELQLQVFQCEAQLLAVEGRLRRQQLETLVLSSDLEDGSPRRSQELSLPQDLEDTQLSDKGCLAGGGSPKQPFAALHQEQVLRNPHDAGPAGLPGIGAVC

SEQ ID NO: 37622 - protein, 127 aa, Artificial Sequence
  Synthetic polypeptide
GRARWLTPVIPALWEAEAGRSRGQEIKTSLANMLWRGLRGPAMPGPQPVPQHPLQERRDMPRGGPQRRGRLCLQLCPGLLWAPLPDTPGQCLPHQPLPQRGHLRPAHADGVQVPLPARLVREIVPAG

SEQ ID NO: 37623 - protein, 2532 aa, Artificial Sequence
  Synthetic polypeptide
SQHFGRPRRADHEVKRSRPAWPTCCGGAFVGPRCQDPNPCLSTPCKNAGTCHVVDRRGVADYACSCALGFSGPLCLTPLDNACLTNPCRNGGTCDLLTLTEYKCRCPPGWSGKSCQQADPCASNPCANGGQCLPFEASYICHCPPSFHGPTCRQDVNECGQKPGLCRHGGTCHNEVGSYRCVCRATHTGPNCERPYVPCSPSPCQNGGTCRPTGDVTHECACLPGFTGQNCEENIDDCPGNNCKNGGACVDGVNTYNCRCPPEWTGQYCTEDVDECQLMPNACQNGGTCHNTHGGYNCVCVNGWTGEDCSENIDDCASAACFHGATCHDRVASFYCECPHGRTGLLCHLNDACISNPCNEGSNCDTNPVNGKAICTCPSGYTGPACSQDVDECSLGANPCEHAGKCINTLGSFECQCLQGYTGPRCEIDVNECVSNPCQNDATCLDQIGEFQCICMPGYEGVHCEVNTDECASSPCLHNGRCLDKINEFQCECPTGFTGHLCQYDVDECASTPCKNGAKCLDGPNTYTCVCTEGYTGTHCEVDIDECDPDPCHYGSCKDGVATFTCLCRPGYTGHHCETNINECSSQPCRHGGTCQDRDNAYLCFCLKGTTGPNCEINLDDCASSPCDSGTCLDKIDGYECACEPGYTGSMCNINIDECAGNPCHNGGTCEDGINGFTCRCPEGYHDPTCLSEVNECNSNPCVHGACRDSLNGYKCDCDPGWSGTNCDINNNECESNPCVNGGTCKDMTSGYVCTCREGFSGPNCQTNINECASNPCLNQGTCIDDVAGYKCNCLLPYTGATCEVVLAPCAPSPCRNGGECRQSEDYESFSCVCPTGWQGQTCEVDINECVLSPCRHGASCQNTHGGYRCHCQAGYSGRNCETDIDDCRPNPCHNGGSCTDGINTAFCDCLPGFRGTFCEEDINECASDPCRNGANCTDCVDSYTCTCPAGFSGIHCENNTPDCTESSCFNGGTCVDGINSFTCLCPPGFTGSYCQHDVNECDSQPCLHGGTCQDGCGSYRCTCPQGYTGPNCQNLVHWCDSSPCKNGGKCWQTHTQYRCECPSGWTGLYCDVPSVSCEVAAQRQGVDVARLCQHGGLCVDAGNTHHCRCQAGYTGSYCEDLVDECSPSPCQNGATCTDYLGGYSCKCVAGYHGVNCSEEIDECLSHPCQNGGTCLDLPNTYKCSCPRGTQGVHCEINVDDCNPPVDPVSRSPKCFNNGTCVDQVGGYSCTCPPGFVGERCEGDVNECLSNPCDARGTQNCVQRVNDFHCECRAGHTGRRCESVINGCKGKPCKNGGTCAVASNTARGFICKCPAGFEGATCENDARTCGSLRCLNGGTCISGPRSPTCLCLGPFTGPECQFPASSPCLGGNPCYNQGTCEPTSESPFYRCLCPAKFNGLLCHILDYSFGGGAGRDIPPPLIEEACELPECQEDAGNKVCSLQCNNHACGWDGGDCSLNFNDPWKNCTQSLQCWKYFSDGHCDSQCNSAGCLFDGFDCQRAEGQCNPLYDQYCKDHFSDGHCDQGCNSAECEWDGLDCAEHVPERLAAGTLVVVVLMPPEQLRNSSFHFLRELSRVLHTNVVFKRDAHGQQMIFPYYGREEELRKHPIKRAAEGWAAPDALLGQVKASLLPGGSEGGRRRRELDPMDVRGSIVYLEIDNRQCVQASSQCFQSATDVAAFLGALASLGSLNIPYKIEAVQSETVEPPPPAQLHFMYVAAAAFVLLFFVGCGVLLSRKRRRQHGQLWFPEGFKVSEASKKKRREPLGEDSVGLKPLKNASDGALMDDNQNEWGDEDLETKKFRFEEPVVLPDLDDQTDHRQWTQQHLDAADLRMSAMAPTPPQGEVDADCMDVNVRGPDGFTPLMIASCSGGGLETGNSEEEEDAPAVISDFIYQGASLHNQTDRTGETALHLAARYSRSDAAKRLLEASADANIQDNMGRTPLHAAVSADAQGVFQILIRNRATDLDARMHDGTTPLILAARLAVEGMLEDLINSHADVNAVDDLGKSALHWAAAVNNVDAAVVLLKNGANKDMQNNREETPLFLAAREGSYETAKVLLDHFANRDITDHMDRLPRDIAQERMHHDIVRLLDEYNLVRSPQLHGAPLGGTPTLSPPLCSPNGYLGSLKPGVQGKKVRKPSSKGLACGSKEAKDLKARRKKSQDGKGCLLDSSGMLSPVDSLESPHGYLSDVASPPLLPSPFQQSPSVPLNHLPGMPDTHLGIGHLNVAAKPEMAALGGGGRLAFETGPPRLSHLPVASGTSTVLGSSSGGALNFTVGGSTSLNGQCEWLSRLQSGMVPNQYNPLRGSVAPGPLSTQAPSLQHGMVGPLHSSLAASALSQMMSYQGLPSTRLATQPHLVQTQQVQPQNLQMQQQNLQPANIQQQQSLQPPPPPPQPHLGVSSAASGHLGRSFLSGEPSQADVQPLGPSSLAVHTILPQESPALPTSLPSSLVPPVTAAQFLTPPSQHSYSSPVDNTPSHQLQVPEHPFLTPSPESPDQWSSSSPHSNVSDWSEGVSSPPTSMQSQIARIPEAFK

SEQ ID NO: 37624 - protein, 84 aa, Artificial Sequence
  Synthetic polypeptide
PGAVAYACNPSTLGGRGGQITRSRDQDQPGQHAVAGPSWARDARTPTRASAPPARTPGHATWWTAEAWQTMPAAVPWASLGPSA

SEQ ID NO: 37625 - protein, 94 aa, Artificial Sequence
  Synthetic polypeptide
STWAGSQASGSAASSWPGWASLQAAGWCTCTTRPTRSAVAAMSARWSFVTSTARGSSRAPSARTCVSCIWWSGGPASRWPRASRCTAGSGGTRM

SEQ ID NO: 37626 - protein, 70 aa, Artificial Sequence
  Synthetic polypeptide
SQHFGRPRQVDHLRSGVQDQPSQHGPAPRPQGPLHLPGLAGRLCRQLAGVRALLVLLGALSRPCLPGGHL

SEQ ID NO: 37627 - protein, 421 aa, Artificial Sequence
  Synthetic polypeptide
GPEFKTSLVNMGRLPGLRVRCIFLAWLGVFAGSWLVYVHYSSYSERCRGHVCQVVICDQYRKGIISGSVCQDLCELHMVEWRTCLSVAPGQQVYSGLWRDKDVTIKCGIEETLDSKARSDAAPRRELVLFDKPTRGTSIKEFREMTLSFLKANLGDLPSLPALVGQVLLMADFNKDNRVSLAEAKSVWALLQRNEFLLLLSLQEKEHASRLLGYCGDLYLTEGVPHGAWHAAALPPLLRPLLPPALQGALQQWLGPAWPWRAKIAIGLLEFVEELFHGSYGTFYMCETTLANVGYTATYDFKMADLQQVAPEATVRRFLQGRRCEHSTDCTYGRDCRAPCDRLMRQCKGDLIQPNLAKVCALLRGYLLPGAPADLREELGTQLRTCTTLSGLASQVEAHHSLVLSHLKTLLWKKISNTKYS

SEQ ID NO: 37628 - protein, 126 aa, Artificial Sequence
  Synthetic polypeptide
EAEASGSQAGTYCECSLGLSREALIALLVVLAGISASCFCALVIVAIGVLRAKGETCPRQVDNRLVENFGVQEDLMDLHPVYVESQLMDADLEVSLVPPLEDQSLVAIPMEASSEEPPPPPPLPPE

SEQ ID NO: 37629 - protein, 91 aa, Artificial Sequence
  Synthetic polypeptide
SQHFERPRRADHKLEPTVNAALASAARPSSPSLWCWRASVPAASVPSSSWQLVSCGPRVKHARDKWTTGWWRILGSRKISWTCTRFTWSPS

SEQ ID NO: 37630 - protein, 26 aa, Artificial Sequence
  Synthetic polypeptide
MGAVAHTCNPSTLRGRGERITSWNLL

SEQ ID NO: 37631 - protein, 75 aa, Artificial Sequence
  Synthetic polypeptide
WFYKGQLPCTCALACHHVRCASAPPSPSTMIVRPPQPRGTRLCPGGRSQGLGGVRHPCGHGGRHVHRGLRGCPVL

SEQ ID NO: 37632 - protein, 389 aa, Artificial Sequence
  Synthetic polypeptide
GLPSHVELGCAQVGVLKALAECGIPVDMVGGTSIGAFVGALYSEERNYSQMRIRAKQWAEGMTSLMKAALDLTYPITSMFSGAGFNSSIFSVFKDQQIEDLWIPYFAITTDITASAMRVHTDGSLWWYVRASMSLSGYMPPLCDPKDGHLLMDGGYINNLPADVARSMGAKVVIAIDVGSRDETDLTNYGDALSGWWLLWKRWNPLATKVKVLNMAEIQTRLAYVCCVRQLEVVKSSDYCEYLRPPIDSYSTLDFGKFNEICEVGYQHGRTVFDIWGRSGVLEKMLRDQQGPSKKPASAVLTCPNASFTDLAEIVSRIEPAKPAMVDDESDYQTEYEEELLDVPRDAYADFQSTSAQQGSDLEDESSLRHRHPSLAFPKLSEGSSDQDG

SEQ ID NO: 37633 - protein, 362 aa, Artificial Sequence
  Synthetic polypeptide
GLPSHVELGCAQVGVLKALAECGIPVDMVGGTSIGAFVGALYSEERNYSQMRIRAKQWAEGMTSLMKAALDLTYPITSMFSGAGFNSSIFSVFKDQQIEDLWIPYFAITTDITASAMRVHTDGSLWWYVRASMSLSGYMPPLCDPKDGHLLMDGGYINNLPADVARSMGAKVVIAIDVGSRDETDLTNYGDALSGWWLLWKRWNPLATKVKVLNMAEIQTRLAYVCCVRQLEVVKSSDYCEYLRPPIDSYSTLDFGKFNEICEVGYQHGRTVFDIWGRSGVLEKMLRDQQGPSKKPASAVLTCPNASFTDLAEIVSRIEPAKPAMVDDESDYQTEYEEELLDVPRDAYADFQSTSAQQGSDL

SEQ ID NO: 37634 - protein, 237 aa, Artificial Sequence
  Synthetic polypeptide
CQHLQVFLGFGAKKSPCQEQPPTNDCKTKYTLIDEQDIPLVESYSFEARMEVDADGNGAKIFAYAFDKNRGRGSGRLLHELLWERHRGGVAPGFQVVHLNAVTVDNRLDNLQLVPWGWRPKAEETSSKQREQSLYWLAIQQLPTDPIEEQFPVLNVTRYYNANGDVVEEEENSCTYYECHYPPCTVIEKQLREFNICGRCQVARYCGSQCQQKDWPAHKKHCRERKRPFQHELEPER

SEQ ID NO: 37635 - protein, 31 aa, Artificial Sequence
  Synthetic polypeptide
VNTCRSFSALEPRSHLARNSLQPMTARPNTR

SEQ ID NO: 37636 - protein, 9 aa, Artificial Sequence
  Synthetic polypeptide
LQDQIHADR

SEQ ID NO: 37637 - protein, 67 aa, Artificial Sequence
  Synthetic polypeptide
LHHCTPAWRHLWLPMKAQQRNRQERPTWLRTVRPMGLVKTAMPAVMQMLQSTLRTAQGSTPRMAPTH

SEQ ID NO: 37638 - protein, 42 aa, Artificial Sequence
  Synthetic polypeptide
CTPVVPATQEAEVGGSRAWEFEAAVSCDCTTALQPGDTYGCR

SEQ ID NO: 37639 - protein, 790 aa, Artificial Sequence
  Synthetic polypeptide
AVIAPLHSSLETPMAADEGSAEKQAGEAHMAADGETNGSCENSDASSHANAAKHTQDSARVNPQDGTNTLTRIAENGVSERDSEAAKQNHVTADDFVQTSVIGSNGYILNKPALQAQPLRTTSTLASSLPGHAAKTLPGGAGKGRTPSAFPQTPAAPPATLGEGSADTEDRKLPAPGADVKVHRARKTMPKSVVGLHAASKDPREVREARDHKEPKEEINKNISDFGRQQLLPPFPSLHQSLPQNQCYMATTKSQTACLPFVLAAAVSRKKKRRMGTYSLVPKKKTKVLKQRTVIEMFKSITHSTVGSKGEKDLGASSLHVNGESLEMDSDEDDSEELEEDDGHGAEQAAAFPTEDSRTSKESMSEADRAQKMDGESEEEQESVDTGEEEEGGDESDLSSESSIKKKFLKRKGKTDSPWIKPARKRRRRSRKKPSGALGSESYKSSAGSAEQTAPGDSTGYMEVSLDSLDLRVKGILSSQAEGLANGPDVLETDGLQEVPLCSCRMETPKSREITTLANNQCMATESVDHELGRCTNSVVKYELMRPSNKAPLLVLCEDHRGRMVKHQCCPGCGYFCTAGNFMECQPESSISHRFHKDCASRVNNASYCPHCGEESSKAKEVTIAKADTTSTVTPVPGQEKGSALEGRADTTTGSAAGPPLSEDDKLQGAASHVPEGFDPTGPAGLGRPTPGLSQGPGKETLESALIALDSEKPKKLRFHPKQLYFSARQGELQKVLLMLVDGIDPNFKMEHQNKRSPLHAAAEAGHVDICHMLVQFCRLGSPRSRGCLW

SEQ ID NO: 37640 - protein, 1280 aa, Artificial Sequence
  Synthetic polypeptide
AVIAPLHSSLETPMAADEGSAEKQAGEAHMAADGETNGSCENSDASSHANAAKHTQDSARVNPQDGTNTLTRIAENGVSERDSEAAKQNHVTADDFVQTSVIGSNGYILNKPALQAQPLRTTSTLASSLPGHAAKTLPGGAGKGRTPSAFPQTPAAPPATLGEGSADTEDRKLPAPGADVKVHRARKTMPKSVVGLHAASKDPREVREARDHKEPKEEINKNISDFGRQQLLPPFPSLHQSLPQNQCYMATTKSQTACLPFVLAAAVSRKKKRRMGTYSLVPKKKTKVLKQRTVIEMFKSITHSTVGSKGEKDLGASSLHVNGESLEMDSDEDDSEELEEDDGHGAEQAAAFPTEDSRTSKESMSEADRAQKMDGESEEEQESVDTGEEEEGGDESDLSSESSIKKKFLKRKGKTDSPWIKPARKRRRRSRKKPSGALGSESYKSSAGSAEQTAPGDSTGYMEVSLDSLDLRVKGILSSQAEGLANGPDVLETDGLQEVPLCSCRMETPKSREITTLANNQCMATESVDHELGRCTNSVVKYELMRPSNKAPLLVLCEDHRGRMVKHQCCPGCGYFCTAGNFMECQPESSISHRFHKDCASRVNNASYCPHCGEESSKAKEVTIAKADTTSTVTPVPGQEKGSALEGRADTTTGSAAGPPLSEDDKLQGAASHVPEGFDPTGPAGLGRPTPGLSQGPGKETLESALIALDSEKPKKLRFHPKQLYFSARQGELQKVLLMLVDGIDPNFKMEHQNKRSPLHAAAEAGHVDICHMLVQAGANIDTCSEDQRTPLMEAAENNHLEAVKYLIKAGALVDPKDAEGSTCLHLAAKKGHYEVVQYLLSNGQMDVNCQDDGGWTPMIWATEYKHVDLVKLLLSKGSDINIRDNEENICLHWAAFSGCVDIAEILLAAKCDLHAVNIHGDSPLHIAARENRYDCVVLFLSRDSDVTLKNKEGETPLQCASLNSQVWSALQMSKALQDSAPDRPSPVERIVSRDIARGYERIPIPCVNAVDSEPCPSNYKYVSQNCVTSPMNIDRNITHLQYCVCIDDCSSSNCMCGQLSMRCWYDKDGRLLPEFNMAEPPLIFECNHACSCWRNCRNRVVQNGLRARLQLYRTRDMGWGVRSLQDIPPGTFVCEYVGELISDSEADVREEDSYLFDLDNKDGEVYCIDARFYGNVSRFINHHCEPNLVPVRVFMAHQDLRFPRIAFFSTRLIEAGEQLGFDYGERFWDIKGKLFSCRCGSPKCRHSSAALAQRQASAAQEAQEDGLPDTSSAAAADPL

SEQ ID NO: 37641 - protein, 810 aa, Artificial Sequence
  Synthetic polypeptide
RSSRGQDVEAVPARGEPQQDCCVKTELLGEETPMAADEGSAEKQAGEAHMAADGETNGSCENSDASSHANAAKHTQDSARVNPQDGTNTLTRIAENGVSERDSEAAKQNHVTADDFVQTSVIGSNGYILNKPALQAQPLRTTSTLASSLPGHAAKTLPGGAGKGRTPSAFPQTPAAPPATLGEGSADTEDRKLPAPGADVKVHRARKTMPKSVVGLHAASKDPREVREARDHKEPKEEINKNISDFGRQQLLPPFPSLHQSLPQNQCYMATTKSQTACLPFVLAAAVSRKKKRRMGTYSLVPKKKTKVLKQRTVIEMFKSITHSTVGSKGEKDLGASSLHVNGESLEMDSDEDDSEELEEDDGHGAEQAAAFPTEDSRTSKESMSEADRAQKMDGESEEEQESVDTGEEEEGGDESDLSSESSIKKKFLKRKGKTDSPWIKPARKRRRRSRKKPSGALGSESYKSSAGSAEQTAPGDSTGYMEVSLDSLDLRVKGILSSQAEGLANGPDVLETDGLQEVPLCSCRMETPKSREITTLANNQCMATESVDHELGRCTNSVVKYELMRPSNKAPLLVLCEDHRGRMVKHQCCPGCGYFCTAGNFMECQPESSISHRFHKDCASRVNNASYCPHCGEESSKAKEVTIAKADTTSTVTPVPGQEKGSALEGRADTTTGSAAGPPLSEDDKLQGAASHVPEGFDPTGPAGLGRPTPGLSQGPGKETLESALIALDSEKPKKLRFHPKQLYFSARQGELQKVLLMLVDGIDPNFKMEHQNKRSPLHAAAEAGHVDICHMLVQFCRLGSPRSRGCLW

SEQ ID NO: 37642 - protein, 57 aa, Artificial Sequence
  Synthetic polypeptide
KKVNCKTVSGRPFRRSLEDTVTIGDDGSMHVSASEDLLGDKMWRQFRRGGSLSRIAV

SEQ ID NO: 37643 - protein, 33 aa, Artificial Sequence
  Synthetic polypeptide
GTRCGGSSGEGGASAGLLCENRAAGRRDTYGCR

SEQ ID NO: 37644 - protein, 1300 aa, Artificial Sequence
  Synthetic polypeptide
RSSRGQDVEAVPARGEPQQDCCVKTELLGEETPMAADEGSAEKQAGEAHMAADGETNGSCENSDASSHANAAKHTQDSARVNPQDGTNTLTRIAENGVSERDSEAAKQNHVTADDFVQTSVIGSNGYILNKPALQAQPLRTTSTLASSLPGHAAKTLPGGAGKGRTPSAFPQTPAAPPATLGEGSADTEDRKLPAPGADVKVHRARKTMPKSVVGLHAASKDPREVREARDHKEPKEEINKNISDFGRQQLLPPFPSLHQSLPQNQCYMATTKSQTACLPFVLAAAVSRKKKRRMGTYSLVPKKKTKVLKQRTVIEMFKSITHSTVGSKGEKDLGASSLHVNGESLEMDSDEDDSEELEEDDGHGAEQAAAFPTEDSRTSKESMSEADRAQKMDGESEEEQESVDTGEEEEGGDESDLSSESSIKKKFLKRKGKTDSPWIKPARKRRRRSRKKPSGALGSESYKSSAGSAEQTAPGDSTGYMEVSLDSLDLRVKGILSSQAEGLANGPDVLETDGLQEVPLCSCRMETPKSREITTLANNQCMATESVDHELGRCTNSVVKYELMRPSNKAPLLVLCEDHRGRMVKHQCCPGCGYFCTAGNFMECQPESSISHRFHKDCASRVNNASYCPHCGEESSKAKEVTIAKADTTSTVTPVPGQEKGSALEGRADTTTGSAAGPPLSEDDKLQGAASHVPEGFDPTGPAGLGRPTPGLSQGPGKETLESALIALDSEKPKKLRFHPKQLYFSARQGELQKVLLMLVDGIDPNFKMEHQNKRSPLHAAAEAGHVDICHMLVQAGANIDTCSEDQRTPLMEAAENNHLEAVKYLIKAGALVDPKDAEGSTCLHLAAKKGHYEVVQYLLSNGQMDVNCQDDGGWTPMIWATEYKHVDLVKLLLSKGSDINIRDNEENICLHWAAFSGCVDIAEILLAAKCDLHAVNIHGDSPLHIAARENRYDCVVLFLSRDSDVTLKNKEGETPLQCASLNSQVWSALQMSKALQDSAPDRPSPVERIVSRDIARGYERIPIPCVNAVDSEPCPSNYKYVSQNCVTSPMNIDRNITHLQYCVCIDDCSSSNCMCGQLSMRCWYDKDGRLLPEFNMAEPPLIFECNHACSCWRNCRNRVVQNGLRARLQLYRTRDMGWGVRSLQDIPPGTFVCEYVGELISDSEADVREEDSYLFDLDNKDGEVYCIDARFYGNVSRFINHHCEPNLVPVRVFMAHQDLRFPRIAFFSTRLIEAGEQLGFDYGERFWDIKGKLFSCRCGSPKCRHSSAALAQRQASAAQEAQEDGLPDTSSAAAADPL

SEQ ID NO: 37645 - protein, 67 aa, Artificial Sequence
  Synthetic polypeptide
RRAMDEAFRHLWLPMKAQQRNRQERPTWLRTVRPMGLVKTAMPAVMQMLQSTLRTAQGSTPRMAPTH

SEQ ID NO: 37646 - protein, 37 aa, Artificial Sequence
  Synthetic polypeptide
TDRGTSTQWDSGQQPRRAHSMTDAAPWMKLLDTYGCR

SEQ ID NO: 37647 - protein, 16 aa, Artificial Sequence
  Synthetic polypeptide
RRAMDEAFVRDTYGCR

SEQ ID NO: 37648 - protein, 812 aa, Artificial Sequence
  Synthetic polypeptide
TDRGTSTQWDSGQQPRRAHSMTDAAPWMKLLYETPMAADEGSAEKQAGEAHMAADGETNGSCENSDASSHANAAKHTQDSARVNPQDGTNTLTRIAENGVSERDSEAAKQNHVTADDFVQTSVIGSNGYILNKPALQAQPLRTTSTLASSLPGHAAKTLPGGAGKGRTPSAFPQTPAAPPATLGEGSADTEDRKLPAPGADVKVHRARKTMPKSVVGLHAASKDPREVREARDHKEPKEEINKNISDFGRQQLLPPFPSLHQSLPQNQCYMATTKSQTACLPFVLAAAVSRKKKRRMGTYSLVPKKKTKVLKQRTVIEMFKSITHSTVGSKGEKDLGASSLHVNGESLEMDSDEDDSEELEEDDGHGAEQAAAFPTEDSRTSKESMSEADRAQKMDGESEEEQESVDTGEEEEGGDESDLSSESSIKKKFLKRKGKTDSPWIKPARKRRRRSRKKPSGALGSESYKSSAGSAEQTAPGDSTGYMEVSLDSLDLRVKGILSSQAEGLANGPDVLETDGLQEVPLCSCRMETPKSREITTLANNQCMATESVDHELGRCTNSVVKYELMRPSNKAPLLVLCEDHRGRMVKHQCCPGCGYFCTAGNFMECQPESSISHRFHKDCASRVNNASYCPHCGEESSKAKEVTIAKADTTSTVTPVPGQEKGSALEGRADTTTGSAAGPPLSEDDKLQGAASHVPEGFDPTGPAGLGRPTPGLSQGPGKETLESALIALDSEKPKKLRFHPKQLYFSARQGELQKVLLMLVDGIDPNFKMEHQNKRSPLHAAAEAGHVDICHMLVQFCRLGSPRSRGCLW

SEQ ID NO: 37649 - protein, 63 aa, Artificial Sequence
  Synthetic polypeptide
SFCTRHLWLPMKAQQRNRQERPTWLRTVRPMGLVKTAMPAVMQMLQSTLRTAQGSTPRMAPTH

SEQ ID NO: 37650 - protein, 1302 aa, Artificial Sequence
  Synthetic polypeptide
TDRGTSTQWDSGQQPRRAHSMTDAAPWMKLLYETPMAADEGSAEKQAGEAHMAADGETNGSCENSDASSHANAAKHTQDSARVNPQDGTNTLTRIAENGVSERDSEAAKQNHVTADDFVQTSVIGSNGYILNKPALQAQPLRTTSTLASSLPGHAAKTLPGGAGKGRTPSAFPQTPAAPPATLGEGSADTEDRKLPAPGADVKVHRARKTMPKSVVGLHAASKDPREVREARDHKEPKEEINKNISDFGRQQLLPPFPSLHQSLPQNQCYMATTKSQTACLPFVLAAAVSRKKKRRMGTYSLVPKKKTKVLKQRTVIEMFKSITHSTVGSKGEKDLGASSLHVNGESLEMDSDEDDSEELEEDDGHGAEQAAAFPTEDSRTSKESMSEADRAQKMDGESEEEQESVDTGEEEEGGDESDLSSESSIKKKFLKRKGKTDSPWIKPARKRRRRSRKKPSGALGSESYKSSAGSAEQTAPGDSTGYMEVSLDSLDLRVKGILSSQAEGLANGPDVLETDGLQEVPLCSCRMETPKSREITTLANNQCMATESVDHELGRCTNSVVKYELMRPSNKAPLLVLCEDHRGRMVKHQCCPGCGYFCTAGNFMECQPESSISHRFHKDCASRVNNASYCPHCGEESSKAKEVTIAKADTTSTVTPVPGQEKGSALEGRADTTTGSAAGPPLSEDDKLQGAASHVPEGFDPTGPAGLGRPTPGLSQGPGKETLESALIALDSEKPKKLRFHPKQLYFSARQGELQKVLLMLVDGIDPNFKMEHQNKRSPLHAAAEAGHVDICHMLVQAGANIDTCSEDQRTPLMEAAENNHLEAVKYLIKAGALVDPKDAEGSTCLHLAAKKGHYEVVQYLLSNGQMDVNCQDDGGWTPMIWATEYKHVDLVKLLLSKGSDINIRDNEENICLHWAAFSGCVDIAEILLAAKCDLHAVNIHGDSPLHIAARENRYDCVVLFLSRDSDVTLKNKEGETPLQCASLNSQVWSALQMSKALQDSAPDRPSPVERIVSRDIARGYERIPIPCVNAVDSEPCPSNYKYVSQNCVTSPMNIDRNITHLQYCVCIDDCSSSNCMCGQLSMRCWYDKDGRLLPEFNMAEPPLIFECNHACSCWRNCRNRVVQNGLRARLQLYRTRDMGWGVRSLQDIPPGTFVCEYVGELISDSEADVREEDSYLFDLDNKDGEVYCIDARFYGNVSRFINHHCEPNLVPVRVFMAHQDLRFPRIAFFSTRLIEAGEQLGFDYGERFWDIKGKLFSCRCGSPKCRHSSAALAQRQASAAQEAQEDGLPDTSSAAAADPL

SEQ ID NO: 37651 - protein, 50 aa, Artificial Sequence
  Synthetic polypeptide
LSLRSSEAGARAAAWMSLGDTVPNEQLQYLGRKNEEWEPIAWFLRKRPKY

SEQ ID NO: 37652 - protein, 23 aa, Artificial Sequence
  Synthetic polypeptide
ASGTLCRMNSCSISEEKTKNGNL

SEQ ID NO: 37653 - protein, 49 aa, Artificial Sequence
  Synthetic polypeptide
LSLRSSEAGARAAAWMSLGDTVPNELQYLGRKNEEWEPIAWFLRKRPKY

SEQ ID NO: 37654 - protein, 22 aa, Artificial Sequence
  Synthetic polypeptide
ASGTLCRMNCSISEEKTKNGNL

SEQ ID NO: 37655 - protein, 31 aa, Artificial Sequence
  Synthetic polypeptide
VYCFNFDSHPSLQQPPPWPIRSCQLGGYNIY

SEQ ID NO: 37656 - protein, 84 aa, Artificial Sequence
  Synthetic polypeptide
FIVLILTATPAFSSHHPGQSEAVNLEDTTSIEKMSNCCEDISRPRKPWQQTFSEVFGTRWKILWFIPFRQRQPLRVPYHFANHV

SEQ ID NO: 37657 - protein, 78 aa, Artificial Sequence
  Synthetic polypeptide
QPPQPSAATTLANQKLSTWRIQHLLKRCQTVVKIYRGPESHGSRPSQKFLALVGRSCGSFLSGRGNHCEFPTTLPIMS

SEQ ID NO: 37658 - protein, 34 aa, Artificial Sequence
  Synthetic polypeptide
LNASLFLPWLPGSSEVILSSLQNHSWCLKVIEVS

SEQ ID NO: 37659 - protein, 14 aa, Artificial Sequence
  Synthetic polypeptide
MLPFFCLGCQEAQR

SEQ ID NO: 37660 - protein, 802 aa, Artificial Sequence
  Synthetic polypeptide
TECFPFFALAARKLRGDIVILTKPLVVSKGDRGFLTTTTLLAVDGTDKPEELLYVITSPPRYGQIEYVHYPGVPITNFSQMDVVGQTVCYVHKSKVTVSSDRFRFIISNGLRTEHGVFEITLETVDRALPVVTRNKGLRLAQGAVGLLSPDLLQLTDPDTPAENLTFLLVQLPQHGQLYLWGTGLLQHNFTQQDVDSKNVAYRHSGGDSQTDCFTFMATDGTNQGFIVNGRVWEEPVLFTIQVDQLDKTAPRITLLHSPSQVGLLKNGCYGIYITSRVLKASDPDTEDDQIIFKILQGPKHGHLENTTTGEFIHEKFSQKDLNSKTILYIINPSLEVNSDTVEFQIMDPTGNSATPQILELKWSHIEWSQTEYEVCENVGLLPLEIIRRGYSMDSAFVGIKVNQVSAAVGKDFTVIPSKLIQFDPGMSTKMWNIAITYDGLEEDDEVFEVILNSPVNAVLGTKTKAAVKILDSKGGQCHPSYSSNQSKHSTWEKGIWHLLPPGSSSSTTSGSFHLERRPLPSSMQLAVIRGDTLRGFDSTDLSQRKLRTRGNGKTVRPSSVYRNGTDIIYNYHGIVSLKLEDDSFPTHKRKAKVSIISQPQKTIKVAELPQADKVESTTDSHFPRQDQLPSFPKNCTLELKGLFHFEEGIQKLYQCNGIAWKAWSPQTKDVEDKSCPAGWHQHSGYCHILITEQKGTWNAAAQACREQYLGNLVTVFSRQHMRWLWDIGGRKSFWIGLNDQVHAGHWEWIGGEPVAFTNGRRGPSQRSKLGKSCVLVQRQGKWQTKDCRRAKPHNYVCSRKL

SEQ ID NO: 37661 - protein, 153 aa, Artificial Sequence
  Synthetic polypeptide
CARCSLLALIFKFTSFSCSVKMDLGLLNTFLLPTSTSLSFVSEGQWRDFSGVSKVLLPDLMCWLSRILQCTQLPQCPAPAIHCSLKHPAPSSFPANPISLHSSPEQVFLVPLRVDFQQVPLMQYHSNFFLQLVWISVQEEKRTSLRSFSALGG

SEQ ID NO: 37662 - protein, 41 aa, Artificial Sequence
  Synthetic polypeptide
QLLSPARLDLCPGRKKDFPALFLSPRGLEKGSWNIGKKPLQ

SEQ ID NO: 37663 - protein, 50 aa, Artificial Sequence
  Synthetic polypeptide
ASGIFPACMHSLLWPCEEVPSAMIVSFLGPPQPCGTCFFRTKGYISLLRK

SEQ ID NO: 37664 - protein, 491 aa, Artificial Sequence
  Synthetic polypeptide
VSWGLPSRVELAFLGPKDIFPYSENKEKYGKPNKRKGFNEGLWEIDNNPKVKFSSQQAATKQSNASSDVEVEEKETSVSKEDTDHEEKASNEDVTKAVDITTPKAARRGRKRKAEKQVETEEAGVVTTATASVNLKVSPKRGRPAATEVKIPKPRGRPKMVKQPCPSESDIITEEDKSKKKGQEEKQPKKQPKKDEEGQKEEDKPRKEPDKKEGKKEVESKRKNLAKTGVTSTSDSEEEGDDQEGEKKRKGGRNFQTAHRRNMLKGQHEKEAADRKRKQEEQMETEQQNKDEGKKPEVKKVEKKRETSMDSRLQRIHAEIKNSLKIDNLDVNRCIEALDELASLQVTMQQAQKHTEMITTLKKIRRFKVSQVIMEKSTMLYNKFKNMFLVGEGDSVITQVLNKSLAEQRQHEEANKTKDQGKKGPNKKLEKEQTGSKTLNGGSDAQDGNQPQHNGESNEDSKDNHEASTKKKPSSEERETEISLKDSTLDN

SEQ ID NO: 37665 - protein, 22 aa, Artificial Sequence
  Synthetic polypeptide
RGAFCHDCKFLGASPAVWNLLF

SEQ ID NO: 37666 - protein, 290 aa, Artificial Sequence
  Synthetic polypeptide
VSWGLPSRVELAFLGPKDIFPYSENKEKYGKPNKRKGFNEGLWEIDNNPKVKFSSQQAATKQSNASSDVEVEEKETSVSKEDTDHEEKASNEDVTKAVDITTPKAARRGRKRKAEKQVETEEAGVVTTATASVNLKVSPKRGRPAATEVKIPKPRGRPKMVKQPCPSESDIITEEDKSKKKGQEEKQPKKQPKKDEEGQKEEDKPRKEPDKKEGKKEVESKRKNLAKTGVTSTSDSEEEGDDQEGEKKRKGGRNFQTAHRRNMLKGQHEKEAADRKRKQEEQMETEHFAL

SEQ ID NO: 37667 - protein, 294 aa, Artificial Sequence
  Synthetic polypeptide
VSWGLPSRVELAFLGPKDIFPYSENKEKYGKPNKRKGFNEGLWEIDNNPKVKFSSQQAATKQSNASSDVEVEEKETSVSKEDTDHEEKASNEDVTKAVDITTPKAARRGRKRKAEKQVETEEAGVVTTATASVNLKVSPKRGRPAATEVKIPKPRGRPKMVKQPCPSESDIITEEDKSKKKGQEEKQPKKQPKKDEEGQKEEDKPRKEPDKKEGKKEVESKRKNLAKTGVTSTSDSEEEGDDQEGEKKRKGGRNFQTAHRRNMLKGQHEKEAADRKRKQEEQMETEHQTTCNLQ

SEQ ID NO: 37668 - protein, 38 aa, Artificial Sequence
  Synthetic polypeptide
ASGIFPACMHSLLWPCEEVPSAMICFFRTKGYISLLRK

SEQ ID NO: 37669 - protein, 10 aa, Artificial Sequence
  Synthetic polypeptide
RGAFCHDLLF

SEQ ID NO: 37670 - protein, 72 aa, Artificial Sequence
  Synthetic polypeptide
PLNTWVRIVWVHLYVDLLPTLPSMRQQDQPLLFLLLLSLFNMKNMRMKTFMMIHFHLMNSQRSDLAVMVCGK

SEQ ID NO: 37671 - protein, 74 aa, Artificial Sequence
  Synthetic polypeptide
IVRDQISLSWSAASRNDFTLQLPKLHLETFAMEGLKGGPEVVACQVRVQWCDHSSLQSQMPGLKQSSCLSLLST

SEQ ID NO: 37672 - protein, 171 aa, Artificial Sequence
  Synthetic polypeptide
IVRDQISLSWSAASRNDFTLQLPKLHLETFAMEGLKGGPEVVACQAMIKSFMDVYQLASTRIMTLEKEMTSHRSHIAALKSELHTACLRENASLQSIGSRDHSNLSIPSRAPLPADTTGIGDFLPLKAELDTTYTFLKETFINTVPHALTSSHSSPVTMSANANRPTQIGL

SEQ ID NO: 37673 - protein, 48 aa, Artificial Sequence
  Synthetic polypeptide
IVRDQISLSWSAASRNDFTLQLPKLHLETFAMEGLKGGPEVVACQVRV

SEQ ID NO: 37674 - protein, 62 aa, Artificial Sequence
  Synthetic polypeptide
PLNTWVRIVWVHLYVDLLPTLPSMRQQDQPLLFLLLLSLFNMKNMRMKTFMMIHFHLMNSYD

SEQ ID NO: 37675 - protein, 127 aa, Artificial Sequence
  Synthetic polypeptide
IAMIKSFMDVYQLASTRIMTLEKEMTSHRSHIAALKSELHTACLRENASLQSIGSRDHSNLSIPSRAPLPADTTGIGDFLPLKAELDTTYTFLKETFINTVPHALTSSHSSPVTMSANANRPTQIGL

SEQ ID NO: 37676 - protein, 77 aa, Artificial Sequence
  Synthetic polypeptide
PSCPSTFSHGGGRRAFPPDNTVSMHHPGNSGSHHTPKPLAPRSWTSQSPERMGLGPQLDARWLVFREQRRGKKIGVP

SEQ ID NO: 37677 - protein, 70 aa, Artificial Sequence
  Synthetic polypeptide
LKPLQKRLRAAFDPLALPPSAMGVDAVPSLQTIQYQCTILETAALTIHRSHWRLDHGRLSLQNEWGLAPS

SEQ ID NO: 37678 - protein, 149 aa, Artificial Sequence
  Synthetic polypeptide
SPYKRGFVQHLTLLPFHLQPWGWTPCLPSRQYSINAPSWKQRLSPYTEATGASIMDVSVSRTNGAWPPARREMARFQRTKEREEDRCSLNIYYVRNTTQGTAPACVGKRMQPSPTGKGGKCCTVHGLTRKIHNVQPNLQSPILSAACVD

SEQ ID NO: 37679 - protein, 134 aa, Artificial Sequence
  Synthetic polypeptide
SPYKRGFVQHLTLLPFHLQPWGWTPCLPSRQYSINAPSWKQRLSPYTEATGASIMDVSVSRTNGAWPPARREMARFQRTKEREEDRCSLNIYYVRNTTQGTAPACSQGRYIMYSRIYSLLFCQLLVLIKTSIKI

SEQ ID NO: 37680 - protein, 1006 aa, Artificial Sequence
  Synthetic polypeptide
DWAPWVTPVIPALWEAKAIRCTLVNCTCECFQPGKINLRTCDQCKHGWVAHALDKLSTQHLYHPTQVEIVQSNVVFDISSLMLYGTQAVPVRLKILLDRLFSVLKQEEVLHILHGLGWTLRDYVRGYILQDAAGKVLDRWAIMSREEEIITLQQFLRFGETKSIVELMAIQEKEGQAVAVPSSKTDSDIRTFIESNNRTRSPSLLAHLENSNPSSIHHFENIPNSLAFLLPFQYINPVSAPLLGLPPNGLLLEQPGLRLREPSLSTQNEYNESSESEVSPTPYKNDQTPNRNALTSITNVEPKTEPACVSPIQNSAPVSDLTKTEHPKSSFRIHRMRRMGSASRKGRVFCNACGKTFYDKGTLKIHYNAVHLKIKHRCTIEGCNMVFSSLRSRNRHSANPNPRLHMPMLRNNRDKDLIRATSGAATPVIASTKSNLALTSPGRPPMGFTTPPLDPVLQNPLPSQLVFSGLKTVQPVPPFYRSLLTPGEMVSPPTSLPTSPIIPTSGTIEQHPPPPSEPVVPAVMMATHEPSADLAPKKKPRKSSMPVKIEKEIIDTADEFDDEDDDPNDGGAVVNDMSHDNHCHSQEEMSPGMSVKDFSKHNRTRCISRTEIRRADSMTSEDQEPERDYENESESSEPKLGEESMEGDEHIHSEVSEKVLMNSERPDENHSEPSHQDVIKVKEEFTDPTYDMFYMSQYGLYNGGGASMAALHESFTSSLNYGSPQKFSPEGDLCSSPDPKICYVCKKSFKSSYSVKLHYRNVHLKEMHVCTVAGCNAAFPSRRSRDRHSANINLHRKLLTKELDDMGLDSSQPSLSKDLRDEFLVKIYGAQHPMGLDVREDASSPAGTEDSHLNGYGRGMAEDYMVLDLSTTSSLQSSSSIHSSRESDAGSDEGILLDDIDGASDSGESAHKAEAPALPGSLGAEVSGSLMFSSLSGSNGGIMCNICHKMYSNKGTLRVHYKTVHLREMHKCKVPGCNMMFSSVRSRNRHSQNPNLHKNIPFTSVD

SEQ ID NO: 37681 - protein, 14 aa, Artificial Sequence
  Synthetic polypeptide
SQHFGRPRPSVAHW

SEQ ID NO: 37682 - protein, 27 aa, Artificial Sequence
  Synthetic polypeptide
MGAMGHACNPSTLGGQGHPLHTGKLHM

SEQ ID NO: 37683 - protein, 810 aa, Artificial Sequence
  Synthetic polypeptide
DWAPWVTPVIPALWEAKAIRCTLVNCTCECFQPGKINLRTCDQCKHGWVAHALDKLSTQHLYHPTQVEIVQSNVVFDISSLMLYGTQAVPVRLKILLDRLFSVLKQEEVLHILHGLGWTLRDYVRGYILQDAAGKVLDRWAIMSREEEIITLQQFLRFGETKSIVELMAIQEKEGQAVAVPSSKTDSDIRTFIESNNRTRSPSLLAHLENSNPSSIHHFENIPNSLAFLLPFQYINPVSAPLLGLPPNGLLLEQPGLRLREPSLSTQNEYNESSESEVSPTPYKNDQTPNRNALTSITNVEPKTEPACVSPIQNSAPVSDLTKTEHPKSSFRIHRMRRMGSASRKGRVFCNACGKTFYDKGTLKIHYNAVHLKIKHRCTIEGCNMVFSSLRSRNRHSANPNPRLHMPMLRNNRDKDLIRATSGAATPVIASTKSNLALTSPGRPPMGFTTPPLDPVLQNPLPSQLVFSGLKTVQPVPPFYRSLLTPGEMVSPPTSLPTSPIIPTSGTIEQHPPPPSEPVVPAVMMATHEPSADLAPKKKPRKSSMPVKIEKEIIDTADEFDDEDDDPNDGGAVVNDMSHDNHCHSQEEMSPGMSVKDFSKHNRTRCISRTEIRRADSMTSEDQEPERDYENESESSEPKLGEESMEGDEHIHSEVSEKVLMNSERPDENHSEPSHQDVIKVKEEFTDPTYDMFYMSQYGLYNGGGASMAALHESFTSSLNYGSPQKFSPEGDLCSSPDPKICYVCKKSFKSSYSVKLHYRNVHLKEMHVCTVAGCNAAFPSRRSRDRYWEKSNEQNGLLVSWGETLSSLK

SEQ ID NO: 37684 - protein, 810 aa, Artificial Sequence
  Synthetic polypeptide
DWAPWVTPVIPALWEAKAIRCTLVNCTCECFQPGKINLRTCDQCKHGWVAHALDKLSTQHLYHPTQVEIVQSNVVFDISSLMLYGTQAVPVRLKILLDRLFSVLKQEEVLHILHGLGWTLRDYVRGYILQDAAGKVLDRWAIMSREEEIITLQQFLRFGETKSIVELMAIQEKEGQAVAVPSSKTDSDIRTFIESNNRTRSPSLLAHLENSNPSSIHHFENIPNSLAFLLPFQYINPVSAPLLGLPPNGLLLEQPGLRLREPSLSTQNEYNESSESEVSPTPYKNDQTPNRNALTSITNVEPKTEPACVSPIQNSAPVSDLTKTEHPKSSFRIHRMRRMGSASRKGRVFCNACGKTFYDKGTLKIHYNAVHLKIKHRCTIEGCNMVFSSLRSRNRHSANPNPRLHMPMLRNNRDKDLIRATSGAATPVIASTKSNLALTSPGRPPMGFTTPPLDPVLQNPLPSQLVFSGLKTVQPVPPFYRSLLTPGEMVSPPTSLPTSPIIPTSGTIEQHPPPPSEPVVPAVMMATHEPSADLAPKKKPRKSSMPVKIEKEIIDTADEFDDEDDDPNDGGAVVNDMSHDNHCHSQEEMSPGMSVKDFSKHNRTRCISRTEIRRADSMTSEDQEPERDYENESESSEPKLGEESMEGDEHIHSEVSEKVLMNSERPDENHSEPSHQDVIKVKEEFTDPTYDMFYMSQYGLYNGGGASMAALHESFTSSLNYGSPQKFSPEGDLCSSPDPKICYVCKKSFKSSYSVKLHYRNVHLKEMHVCTVAGCNAAFPSRRSRDRNRNLRMERTIGPGHRDSLHLLPT

SEQ ID NO: 37685 - protein, 230 aa, Artificial Sequence
  Synthetic polypeptide
DWAPWVTPVIPALWEAKAIRCTLVNCTCECFQPGKINLRTCDQCKHGWVAHALDKLSTQHLYHPTQVEIVQSNVVFDISSLMLYGTQAVPVRLKILLDRLFSVLKQEEVLHILHGLGWTLRDYVRGYILQDAAGKVLDRWAIMSREEEIITLQQFLRFGETKSIVELMAIQEKEGQAVAVPSSKTDSDIRTFIESNNRTRSPSLLAHLENSNPSSIHHFENIPNSLAFLL

SEQ ID NO: 37686 - protein, 113 aa, Artificial Sequence
  Synthetic polypeptide
DWAPWVTPVIPALWEAKAIRCTLVNCTCECFQPGKINLRTCDQCKHGWVAHALDKLSTQHLYHPTQVEIVQSNVVFDISSLMLYGTQAVPVRLKILLDRLFSVLKQEEVLHIL

SEQ ID NO: 37687 - protein, 106 aa, Artificial Sequence
  Synthetic polypeptide
DWAPWVTPVIPALWEAKAIRCTLVNCTCECFQPGKINLRTCDQCKHGWVAHALDKLSTQHLYHPTQVEIVQSNVVFDISSLMLYGTQAVPVRLKILLDRLFSVLKQ

SEQ ID NO: 37688 - protein, 59 aa, Artificial Sequence
  Synthetic polypeptide
DWAPWVTPVIPALWEAKAIRCTLVNCTCECFQPGKINLRTCDQCKHGWVAHETLKSCLQ

SEQ ID NO: 37689 - protein, 17 aa, Artificial Sequence
  Synthetic polypeptide
DQPGQHGHPLHTGKLHM

SEQ ID NO: 37690 - protein, 1000 aa, Artificial Sequence
  Synthetic polypeptide
AQEFEISLGNMAIRCTLVNCTCECFQPGKINLRTCDQCKHGWVAHALDKLSTQHLYHPTQVEIVQSNVVFDISSLMLYGTQAVPVRLKILLDRLFSVLKQEEVLHILHGLGWTLRDYVRGYILQDAAGKVLDRWAIMSREEEIITLQQFLRFGETKSIVELMAIQEKEGQAVAVPSSKTDSDIRTFIESNNRTRSPSLLAHLENSNPSSIHHFENIPNSLAFLLPFQYINPVSAPLLGLPPNGLLLEQPGLRLREPSLSTQNEYNESSESEVSPTPYKNDQTPNRNALTSITNVEPKTEPACVSPIQNSAPVSDLTKTEHPKSSFRIHRMRRMGSASRKGRVFCNACGKTFYDKGTLKIHYNAVHLKIKHRCTIEGCNMVFSSLRSRNRHSANPNPRLHMPMLRNNRDKDLIRATSGAATPVIASTKSNLALTSPGRPPMGFTTPPLDPVLQNPLPSQLVFSGLKTVQPVPPFYRSLLTPGEMVSPPTSLPTSPIIPTSGTIEQHPPPPSEPVVPAVMMATHEPSADLAPKKKPRKSSMPVKIEKEIIDTADEFDDEDDDPNDGGAVVNDMSHDNHCHSQEEMSPGMSVKDFSKHNRTRCISRTEIRRADSMTSEDQEPERDYENESESSEPKLGEESMEGDEHIHSEVSEKVLMNSERPDENHSEPSHQDVIKVKEEFTDPTYDMFYMSQYGLYNGGGASMAALHESFTSSLNYGSPQKFSPEGDLCSSPDPKICYVCKKSFKSSYSVKLHYRNVHLKEMHVCTVAGCNAAFPSRRSRDRHSANINLHRKLLTKELDDMGLDSSQPSLSKDLRDEFLVKIYGAQHPMGLDVREDASSPAGTEDSHLNGYGRGMAEDYMVLDLSTTSSLQSSSSIHSSRESDAGSDEGILLDDIDGASDSGESAHKAEAPALPGSLGAEVSGSLMFSSLSGSNGGIMCNICHKMYSNKGTLRVHYKTVHLREMHKCKVPGCNMMFSSVRSRNRHSQNPNLHKNIPFTSVD

SEQ ID NO: 37691 - protein, 20 aa, Artificial Sequence
  Synthetic polypeptide
LPEHRSLRSAWATWPSVAHW

SEQ ID NO: 37692 - protein, 804 aa, Artificial Sequence
  Synthetic polypeptide
AQEFEISLGNMAIRCTLVNCTCECFQPGKINLRTCDQCKHGWVAHALDKLSTQHLYHPTQVEIVQSNVVFDISSLMLYGTQAVPVRLKILLDRLFSVLKQEEVLHILHGLGWTLRDYVRGYILQDAAGKVLDRWAIMSREEEIITLQQFLRFGETKSIVELMAIQEKEGQAVAVPSSKTDSDIRTFIESNNRTRSPSLLAHLENSNPSSIHHFENIPNSLAFLLPFQYINPVSAPLLGLPPNGLLLEQPGLRLREPSLSTQNEYNESSESEVSPTPYKNDQTPNRNALTSITNVEPKTEPACVSPIQNSAPVSDLTKTEHPKSSFRIHRMRRMGSASRKGRVFCNACGKTFYDKGTLKIHYNAVHLKIKHRCTIEGCNMVFSSLRSRNRHSANPNPRLHMPMLRNNRDKDLIRATSGAATPVIASTKSNLALTSPGRPPMGFTTPPLDPVLQNPLPSQLVFSGLKTVQPVPPFYRSLLTPGEMVSPPTSLPTSPIIPTSGTIEQHPPPPSEPVVPAVMMATHEPSADLAPKKKPRKSSMPVKIEKEIIDTADEFDDEDDDPNDGGAVVNDMSHDNHCHSQEEMSPGMSVKDFSKHNRTRCISRTEIRRADSMTSEDQEPERDYENESESSEPKLGEESMEGDEHIHSEVSEKVLMNSERPDENHSEPSHQDVIKVKEEFTDPTYDMFYMSQYGLYNGGGASMAALHESFTSSLNYGSPQKFSPEGDLCSSPDPKICYVCKKSFKSSYSVKLHYRNVHLKEMHVCTVAGCNAAFPSRRSRDRYWEKSNEQNGLLVSWGETLSSLK

SEQ ID NO: 37693 - protein, 804 aa, Artificial Sequence
  Synthetic polypeptide
AQEFEISLGNMAIRCTLVNCTCECFQPGKINLRTCDQCKHGWVAHALDKLSTQHLYHPTQVEIVQSNVVFDISSLMLYGTQAVPVRLKILLDRLFSVLKQEEVLHILHGLGWTLRDYVRGYILQDAAGKVLDRWAIMSREEEIITLQQFLRFGETKSIVELMAIQEKEGQAVAVPSSKTDSDIRTFIESNNRTRSPSLLAHLENSNPSSIHHFENIPNSLAFLLPFQYINPVSAPLLGLPPNGLLLEQPGLRLREPSLSTQNEYNESSESEVSPTPYKNDQTPNRNALTSITNVEPKTEPACVSPIQNSAPVSDLTKTEHPKSSFRIHRMRRMGSASRKGRVFCNACGKTFYDKGTLKIHYNAVHLKIKHRCTIEGCNMVFSSLRSRNRHSANPNPRLHMPMLRNNRDKDLIRATSGAATPVIASTKSNLALTSPGRPPMGFTTPPLDPVLQNPLPSQLVFSGLKTVQPVPPFYRSLLTPGEMVSPPTSLPTSPIIPTSGTIEQHPPPPSEPVVPAVMMATHEPSADLAPKKKPRKSSMPVKIEKEIIDTADEFDDEDDDPNDGGAVVNDMSHDNHCHSQEEMSPGMSVKDFSKHNRTRCISRTEIRRADSMTSEDQEPERDYENESESSEPKLGEESMEGDEHIHSEVSEKVLMNSERPDENHSEPSHQDVIKVKEEFTDPTYDMFYMSQYGLYNGGGASMAALHESFTSSLNYGSPQKFSPEGDLCSSPDPKICYVCKKSFKSSYSVKLHYRNVHLKEMHVCTVAGCNAAFPSRRSRDRNRNLRMERTIGPGHRDSLHLLPT

SEQ ID NO: 37694 - protein, 224 aa, Artificial Sequence
  Synthetic polypeptide
AQEFEISLGNMAIRCTLVNCTCECFQPGKINLRTCDQCKHGWVAHALDKLSTQHLYHPTQVEIVQSNVVFDISSLMLYGTQAVPVRLKILLDRLFSVLKQEEVLHILHGLGWTLRDYVRGYILQDAAGKVLDRWAIMSREEEIITLQQFLRFGETKSIVELMAIQEKEGQAVAVPSSKTDSDIRTFIESNNRTRSPSLLAHLENSNPSSIHHFENIPNSLAFLL

SEQ ID NO: 37695 - protein, 107 aa, Artificial Sequence
  Synthetic polypeptide
AQEFEISLGNMAIRCTLVNCTCECFQPGKINLRTCDQCKHGWVAHALDKLSTQHLYHPTQVEIVQSNVVFDISSLMLYGTQAVPVRLKILLDRLFSVLKQEEVLHIL

SEQ ID NO: 37696 - protein, 100 aa, Artificial Sequence
  Synthetic polypeptide
AQEFEISLGNMAIRCTLVNCTCECFQPGKINLRTCDQCKHGWVAHALDKLSTQHLYHPTQVEIVQSNVVFDISSLMLYGTQAVPVRLKILLDRLFSVLKQ

SEQ ID NO: 37697 - protein, 53 aa, Artificial Sequence
  Synthetic polypeptide
AQEFEISLGNMAIRCTLVNCTCECFQPGKINLRTCDQCKHGWVAHETLKSCLQ

SEQ ID NO: 37698 - protein, 1264 aa, Artificial Sequence
  Synthetic polypeptide
GLPSHVELEKQKSEAKDRKVLEILQVKDAKIQEFEQRESVLKQEINDLVKRKIAVDEENAFLRKEFSDLEKKFKDKSQEIKDTKECVQNKEEQNRLVIKNLEEENKKLSTRCTDLLNDLEKLRKQEAHLRKEKYSTDAKIKTFEDNLIEARKEVEVSQSKYNALSLQLSNKQTELIQKDMDITLVRKELQELQNLYKQNSTHTAQQAELIQQLQVLNMDTQKVLRNQEDVHTAESISYQKLYNELHICFETTKSNEAMLRQSVTNLQDQLLQKEQENAKLKEKLQESQGAPLPLPQESDPDYSAQVPHRPSLSSLETLMVSQKSEIEYLQEKLKIANEKLSENISANKGFSRKSIMTSAEGKHKEPPVKRSRSLSPKSSFTDSEELQKLRKAERKIENLEKALQLKSQENDELRDAHEKRKERLQMLQTNYRAVKEQLKQWEEGSGMTEIRKIKRADPQQLRQEDSDAVWNELAYFKRENQELMIQKMNLEEELDELKVHISIDKAAIQELNRCVAERREEQLFRSGEDDEVKRSTPEKNGKEMLEQTLQKVTELENRLKSFEKRSRKLKEGNKKLMKENDFLKSLLKQQQEDTETREKELEQIIKGSKDVEKENTELQVKISELETEVTSLRRQVAEANALRNENEELINPMEKSHQSADRAKSEMATMKVRSGRYDCKTTMTKVKFKAAKKNCSVGRHHTVLNHSIKVMSNVFENLSKDGWEDVSESSSDSEAQTSQTLGTIIVETSQKISPTEDGKDQKESDPTEDSQTQGKEIVQTYLNIDGKTPKDYFHDKNAKKPTFQKKNCKMQKSSHTAVPTRVNREKYKNITAQKSSSNIILLRERIISLQQQNSVLQNAKKTAELSVKEYKEVNEKLLHQQQVSDQRFQTSRQTIKKLNLDLAGLRKEKEDLLKKLESSSEITSLAEENSQVTFPRIQVTSLSPSRSMDLEMKQLQYKLKNATNELTKQSSNVKTLKFELLAKEEHIKEMHEKISRMERDITMKRHLIEDLKFRQKVNLESNKSFSEMLQNLDKKVKTLTEECSNKKVSIDSLKQRLNVAVKEKSQYEQMYQKSKEELEKKDLKLTLLVSRISETESAMAEIETAASKQLQELALQSEQVLEGAQKTLLLANEKVEEFTTFVKALAKELQNDVHVVRRQIRELKKMKKNRDACKTSTHKAQTLAASILNISRSDLEEILDTEDQVEIEKTKIDAENDKEWMLYIQKLLEGQLPFASYLLEAVLEKINEKKKLVEGYFTIMKDIR

SEQ ID NO: 37699 - protein, 56 aa, Artificial Sequence
  Synthetic polypeptide
NIVVYESKGDLMVLSGVSAFASSSFSLAAAMCKKYLSPPAMILRPPQPCRTRKTEI

SEQ ID NO: 37700 - protein, 1263 aa, Artificial Sequence
  Synthetic polypeptide
GLPSHVELEKQKSEAKDRKVLEILQVKDAKIQEFEQRESVLKQEINDLVKRKIAVDEENAFLRKEFSDLEKKFKDKSQEIKDTKECVQNKEEQNRLVIKNLEEENKKLSTRCTDLLNDLEKLRKQEAHLRKEKYSTDAKIKTFEDNLIEARKEVEVSQSKYNALSLQLSNKQTELIQKDMDITLVRQELQELQNLYKQNSTHTAQQAELIQQLQVLNMDTQKVLRNQEDVHTAESISYQKLYNELHICFETTKSNEAMLRQSVTNLQDQLLQKEQENAKLKEKLQESQGAPLPLPQESDPDYSAQVPHRPSLSSLETLMVSQKSEIEYLQEKLKIANEKLSENISANKGFSRKSIMTSAEGKHKEPPVKRSRSLSPKSSFTDSEELQKLRKAERKIENLEKALQLKSQENDELRDAHEKRKERLQMLQTNYRAVKEQLKQWEEGSGMTEIRKIKRADPQQLRQEDSDAVWNELAYFKRENQELMIQKMNLEEELDELKVHISIDKAAIQELNRCVAERREEQLFRSGEDDEVKRSTPEKNGKEMLEQTLQKVTELENRLKSFEKRSRKLKEGNKKLMKENDFLKSLLKQQQEDTETREKELEQIIKGSKDVEKENTELQVKISELETEVTSLRRQVAEANALRNENEELINPMEKSHQSADRAKSEMATMKVRSGRYDCKTTMTKVKFKAAKKNCSVGRHHTVLNHSIKVMSNVFENLSKDGWEDVSESSSDSEAQTSQTLGTIIVETSQKISPTEDGKDQKESDPTEDSQTQGKEIVQTYLNIDGKTPKDYFHDKNAKKPTFQKKNCKMQKSSHTAVPTRVNREKYKNITAQKSSSNIILLRERIISLQQQNSVLQNAKKTAELSVKEYKEVNEKLLHQQQVSDQRFQTSRQTIKKLNLDLAGLRKEKEDLLKKLESSSEITSLAEENSQVTFPRIQVTSLSPSRSMDLEMKQLQYKLKNATNELTKQSSNVKTLKFELLAKEEHIKEMHEKISRMERDITMKRHLIEDLKFRQKVNLESNKSFSEMLQNLDKKVKTLTEECSNKKVSIDSLKQRLNVAVKEKSQYEQMYQKSKEELEKKDLKLTLLVSRISETESAMAEIETAASKQLQELALQSEQVLEGAQKTLLLANEKVEEFTTFVKALAKELQNDVHVVRRQIRELKKMKKNRDACKTSTHKAQTLAASILNISRSDLEEILDTEDQVEIEKTKIDAENDKEWMLYIQKLLEGQSLALSPRLKCNGAIVAHQNLRLPDSSSSASAS

SEQ ID NO: 37701 - protein, 1264 aa, Artificial Sequence
  Synthetic polypeptide
GLPSHVELEKQKSEAKDRKVLEILQVKDAKIQEFEQRESVLKQEINDLVKRKIAVDEENAFLRKEFSDLEKKFKDKSQEIKDTKECVQNKEEQNRLVIKNLEEENKKLSTRCTDLLNDLEKLRKQEAHLRKEKYSTDAKIKTFEDNLIEARKEVEVSQSKYNALSLQLSNKQTELIQKDMDITLVRQELQELQNLYKQNSTHTAQQAELIQQLQVLNMDTQKVLRNQEDVHTAESISYQKLYNELHICFETTKSNEAMLRQSVTNLQDQLLQKEQENAKLKEKLQESQGAPLPLPQESDPDYSAQVPHRPSLSSLETLMVSQKSEIEYLQEKLKIANEKLSENISANKGFSRKSIMTSAEGKHKEPPVKRSRSLSPKSSFTDSEELQKLRKAERKIENLEKALQLKSQENDELRDAHEKRKERLQMLQTNYRAVKEQLKQWEEGSGMTEIRKIKRADPQQLRQEDSDAVWNELAYFKRENQELMIQKMNLEEELDELKVHISIDKAAIQELNRCVAERREEQLFRSGEDDEVKRSTPEKNGKEMLEQTLQKVTELENRLKSFEKRSRKLKEGNKKLMKENDFLKSLLKQQQEDTETREKELEQIIKGSKDVEKENTELQVKISELETEVTSLRRQVAEANALRNENEELINPMEKSHQSADRAKSEMATMKVRSGRYDCKTTMTKVKFKAAKKNCSVGRHHTVLNHSIKVMSNVFENLSKDGWEDVSESSSDSEAQTSQTLGTIIVETSQKISPTEDGKDQKESDPTEDSQTQGKEIVQTYLNIDGKTPKDYFHDKNAKKPTFQKKNCKMQKSSHTAVPTRVNREKYKNITAQKSSSNIILLRERIISLQQQNSVLQNAKKTAELSVKEYKEVNEKLLHQQQVSDQRFQTSRQTIKKLNLDLAGLRKEKEDLLKKLESSSEITSLAEENSQVTFPRIQVTSLSPSRSMDLEMKQLQYKLKNATNELTKQSSNVKTLKFELLAKEEHIKEMHEKISRMERDITMKRHLIEDLKFRQKVNLESNKSFSEMLQNLDKKVKTLTEECSNKKVSIDSLKQRLNVAVKEKSQYEQMYQKSKEELEKKDLKLTLLVSRISETESAMAEIETAASKQLQELALQSEQVLEGAQKTLLLANEKVEEFTTFVKALAKELQNDVHVVRRQIRELKKMKKNRDACKTSTHKAQTLAASILNISRSDLEEILDTEDQVEIEKTKIDAENDKEWMLYIQKLLEGQLPFASYLLEAVLEKINEKKKLVEGYFTIMKDIR

SEQ ID NO: 37702 - protein, 249 aa, Artificial Sequence
  Synthetic polypeptide
GLPSHVELEKQKSEAKDRKVLEILQVKDAKIQEFEQRESVLKQEINDLVKRKIAVDEENAFLRKEFSDLEKKFKDKSQEIKDTKECVQNKEEQNRLVIKNLEEENKKLSTRCTDLLNDLEKLRKQEAHLRKEKYSTDAKIKTFEDNLIEARKEVEVSQSKYNALSLQLSNKQTELIQKDMDITLVRKELQELQNLYKQNSTHTAQQAELIQQLQVLNMDTQKVLRNQEDVHTAESISYQKVCFYSVIKM

SEQ ID NO: 37703 - protein, 807 aa, Artificial Sequence
  Synthetic polypeptide
DLPASCSPSAMNVKFHEASSAMLPVQSVELMNLEEELDELKVHISIDKAAIQELNRCVAERREEQLFRSGEDDEVKRSTPEKNGKEMLEQTLQKVTELENRLKSFEKRSRKLKEGNKKLMKENDFLKSLLKQQQEDTETREKELEQIIKGSKDVEKENTELQVKISELETEVTSLRRQVAEANALRNENEELINPMEKSHQSADRAKSEMATMKVRSGRYDCKTTMTKVKFKAAKKNCSVGRHHTVLNHSIKVMSNVFENLSKDGWEDVSESSSDSEAQTSQTLGTIIVETSQKISPTEDGKDQKESDPTEDSQTQGKEIVQTYLNIDGKTPKDYFHDKNAKKPTFQKKNCKMQKSSHTAVPTRVNREKYKNITAQKSSSNIILLRERIISLQQQNSVLQNAKKTAELSVKEYKEVNEKLLHQQQVSDQRFQTSRQTIKKLNLDLAGLRKEKEDLLKKLESSSEITSLAEENSQVTFPRIQVTSLSPSRSMDLEMKQLQYKLKNATNELTKQSSNVKTLKFELLAKEEHIKEMHEKISRMERDITMKRHLIEDLKFRQKVNLESNKSFSEMLQNLDKKVKTLTEECSNKKVSIDSLKQRLNVAVKEKSQYEQMYQKSKEELEKKDLKLTLLVSRISETESAMAEIETAASKQLQELALQSEQVLEGAQKTLLLANEKVEEFTTFVKALAKELQNDVHVVRRQIRELKKMKKNRDACKTSTHKAQTLAASILNISRSDLEEILDTEDQVEIEKTKIDAENDKEWMLYIQKLLEGQLPFASYLLEAVLEKINEKKKLVEGYFTIMKDIR

SEQ ID NO: 37704 - protein, 16 aa, Artificial Sequence
  Synthetic polypeptide
GLLSHASCTVCGTDES

SEQ ID NO: 37705 - protein, 806 aa, Artificial Sequence
  Synthetic polypeptide
DLPASCSPSAMNVKFHEASSAMLPVQSVELMNLEEELDELKVHISIDKAAIQELNRCVAERREEQLFRSGEDDEVKRSTPEKNGKEMLEQTLQKVTELENRLKSFEKRSRKLKEGNKKLMKENDFLKSLLKQQQEDTETREKELEQIIKGSKDVEKENTELQVKISELETEVTSLRRQVAEANALRNENEELINPMEKSHQSADRAKSEMATMKVRSGRYDCKTTMTKVKFKAAKKNCSVGRHHTVLNHSIKVMSNVFENLSKDGWEDVSESSSDSEAQTSQTLGTIIVETSQKISPTEDGKDQKESDPTEDSQTQGKEIVQTYLNIDGKTPKDYFHDKNAKKPTFQKKNCKMQKSSHTAVPTRVNREKYKNITAQKSSSNIILLRERIISLQQQNSVLQNAKKTAELSVKEYKEVNEKLLHQQQVSDQRFQTSRQTIKKLNLDLAGLRKEKEDLLKKLESSSEITSLAEENSQVTFPRIQVTSLSPSRSMDLEMKQLQYKLKNATNELTKQSSNVKTLKFELLAKEEHIKEMHEKISRMERDITMKRHLIEDLKFRQKVNLESNKSFSEMLQNLDKKVKTLTEECSNKKVSIDSLKQRLNVAVKEKSQYEQMYQKSKEELEKKDLKLTLLVSRISETESAMAEIETAASKQLQELALQSEQVLEGAQKTLLLANEKVEEFTTFVKALAKELQNDVHVVRRQIRELKKMKKNRDACKTSTHKAQTLAASILNISRSDLEEILDTEDQVEIEKTKIDAENDKEWMLYIQKLLEGQSLALSPRLKCNGAIVAHQNLRLPDSSSSASAS

SEQ ID NO: 37706 - protein, 771 aa, Artificial Sequence
  Synthetic polypeptide
KTLCCGNSKFKNYLHTQKKHLHKNQKSEQLFRSGEDDEVKRSTPEKNGKEMLEQTLQKVTELENRLKSFEKRSRKLKEGNKKLMKENDFLKSLLKQQQEDTETREKELEQIIKGSKDVEKENTELQVKISELETEVTSLRRQVAEANALRNENEELINPMEKSHQSADRAKSEMATMKVRSGRYDCKTTMTKVKFKAAKKNCSVGRHHTVLNHSIKVMSNVFENLSKDGWEDVSESSSDSEAQTSQTLGTIIVETSQKISPTEDGKDQKESDPTEDSQTQGKEIVQTYLNIDGKTPKDYFHDKNAKKPTFQKKNCKMQKSSHTAVPTRVNREKYKNITAQKSSSNIILLRERIISLQQQNSVLQNAKKTAELSVKEYKEVNEKLLHQQQVSDQRFQTSRQTIKKLNLDLAGLRKEKEDLLKKLESSSEITSLAEENSQVTFPRIQVTSLSPSRSMDLEMKQLQYKLKNATNELTKQSSNVKTLKFELLAKEEHIKEMHEKISRMERDITMKRHLIEDLKFRQKVNLESNKSFSEMLQNLDKKVKTLTEECSNKKVSIDSLKQRLNVAVKEKSQYEQMYQKSKEELEKKDLKLTLLVSRISETESAMAEIETAASKQLQELALQSEQVLEGAQKTLLLANEKVEEFTTFVKALAKELQNDVHVVRRQIRELKKMKKNRDACKTSTHKAQTLAASILNISRSDLEEILDTEDQVEIEKTKIDAENDKEWMLYIQKLLEGQLPFASYLLEAVLEKINEKKKLVEGYFTIMKDIR

SEQ ID NO: 37707 - protein, 71 aa, Artificial Sequence
  Synthetic polypeptide
ARWPNRRLYAVGTPNLRTTYTHKKNTYIRIRNQNSSLDLVKMMRSRGVLQRRMEKKCWSRHYRRSLSWKIG

SEQ ID NO: 37708 - protein, 8 aa, Artificial Sequence
  Synthetic polypeptide
ESEIRTAL

SEQ ID NO: 37709 - protein, 770 aa, Artificial Sequence
  Synthetic polypeptide
KTLCCGNSKFKNYLHTQKKHLHKNQKSEQLFRSGEDDEVKRSTPEKNGKEMLEQTLQKVTELENRLKSFEKRSRKLKEGNKKLMKENDFLKSLLKQQQEDTETREKELEQIIKGSKDVEKENTELQVKISELETEVTSLRRQVAEANALRNENEELINPMEKSHQSADRAKSEMATMKVRSGRYDCKTTMTKVKFKAAKKNCSVGRHHTVLNHSIKVMSNVFENLSKDGWEDVSESSSDSEAQTSQTLGTIIVETSQKISPTEDGKDQKESDPTEDSQTQGKEIVQTYLNIDGKTPKDYFHDKNAKKPTFQKKNCKMQKSSHTAVPTRVNREKYKNITAQKSSSNIILLRERIISLQQQNSVLQNAKKTAELSVKEYKEVNEKLLHQQQVSDQRFQTSRQTIKKLNLDLAGLRKEKEDLLKKLESSSEITSLAEENSQVTFPRIQVTSLSPSRSMDLEMKQLQYKLKNATNELTKQSSNVKTLKFELLAKEEHIKEMHEKISRMERDITMKRHLIEDLKFRQKVNLESNKSFSEMLQNLDKKVKTLTEECSNKKVSIDSLKQRLNVAVKEKSQYEQMYQKSKEELEKKDLKLTLLVSRISETESAMAEIETAASKQLQELALQSEQVLEGAQKTLLLANEKVEEFTTFVKALAKELQNDVHVVRRQIRELKKMKKNRDACKTSTHKAQTLAASILNISRSDLEEILDTEDQVEIEKTKIDAENDKEWMLYIQKLLEGQSLALSPRLKCNGAIVAHQNLRLPDSSSSASAS

SEQ ID NO: 37710 - protein, 724 aa, Artificial Sequence
  Synthetic polypeptide
HLDLGLLDSRNVTELENRLKSFEKRSRKLKEGNKKLMKENDFLKSLLKQQQEDTETREKELEQIIKGSKDVEKENTELQVKISELETEVTSLRRQVAEANALRNENEELINPMEKSHQSADRAKSEMATMKVRSGRYDCKTTMTKVKFKAAKKNCSVGRHHTVLNHSIKVMSNVFENLSKDGWEDVSESSSDSEAQTSQTLGTIIVETSQKISPTEDGKDQKESDPTEDSQTQGKEIVQTYLNIDGKTPKDYFHDKNAKKPTFQKKNCKMQKSSHTAVPTRVNREKYKNITAQKSSSNIILLRERIISLQQQNSVLQNAKKTAELSVKEYKEVNEKLLHQQQVSDQRFQTSRQTIKKLNLDLAGLRKEKEDLLKKLESSSEITSLAEENSQVTFPRIQVTSLSPSRSMDLEMKQLQYKLKNATNELTKQSSNVKTLKFELLAKEEHIKEMHEKISRMERDITMKRHLIEDLKFRQKVNLESNKSFSEMLQNLDKKVKTLTEECSNKKVSIDSLKQRLNVAVKEKSQYEQMYQKSKEELEKKDLKLTLLVSRISETESAMAEIETAASKQLQELALQSEQVLEGAQKTLLLANEKVEEFTTFVKALAKELQNDVHVVRRQIRELKKMKKNRDACKTSTHKAQTLAASILNISRSDLEEILDTEDQVEIEKTKIDAENDKEWMLYIQKLLEGQLPFASYLLEAVLEKINEKKKLVEGYFTIMKDIR

SEQ ID NO: 37711 - protein, 11 aa, Artificial Sequence
  Synthetic polypeptide
TPGMSLSWKIG

SEQ ID NO: 37712 - protein, 10 aa, Artificial Sequence
  Synthetic polypeptide
SWTSRLQECH

SEQ ID NO: 37713 - protein, 723 aa, Artificial Sequence
  Synthetic polypeptide
HLDLGLLDSRNVTELENRLKSFEKRSRKLKEGNKKLMKENDFLKSLLKQQQEDTETREKELEQIIKGSKDVEKENTELQVKISELETEVTSLRRQVAEANALRNENEELINPMEKSHQSADRAKSEMATMKVRSGRYDCKTTMTKVKFKAAKKNCSVGRHHTVLNHSIKVMSNVFENLSKDGWEDVSESSSDSEAQTSQTLGTIIVETSQKISPTEDGKDQKESDPTEDSQTQGKEIVQTYLNIDGKTPKDYFHDKNAKKPTFQKKNCKMQKSSHTAVPTRVNREKYKNITAQKSSSNIILLRERIISLQQQNSVLQNAKKTAELSVKEYKEVNEKLLHQQQVSDQRFQTSRQTIKKLNLDLAGLRKEKEDLLKKLESSSEITSLAEENSQVTFPRIQVTSLSPSRSMDLEMKQLQYKLKNATNELTKQSSNVKTLKFELLAKEEHIKEMHEKISRMERDITMKRHLIEDLKFRQKVNLESNKSFSEMLQNLDKKVKTLTEECSNKKVSIDSLKQRLNVAVKEKSQYEQMYQKSKEELEKKDLKLTLLVSRISETESAMAEIETAASKQLQELALQSEQVLEGAQKTLLLANEKVEEFTTFVKALAKELQNDVHVVRRQIRELKKMKKNRDACKTSTHKAQTLAASILNISRSDLEEILDTEDQVEIEKTKIDAENDKEWMLYIQKLLEGQSLALSPRLKCNGAIVAHQNLRLPDSSSSASAS

SEQ ID NO: 37714 - protein, 25 aa, Artificial Sequence
  Synthetic polypeptide
GRILSEPPEGTNFADTLISDFRFQS

SEQ ID NO: 37715 - protein, 294 aa, Artificial Sequence
  Synthetic polypeptide
FQTSASRAKLSMINTMSKIRGQEKGPGYPQAEALLAEAMLKFGRELGDDCNFGPALGEVGEAMRELSEVKDSLDIEVKQNFIDPLQNLHDKDLREIQHHLKKLEGRRLDFDYKKKRQGKIPDEELRQALEKFDESKEIAESSMFNLLEMDIEQVSQLSALVQAQLEYHKQAVQILQQVTVRLEERIRQASSQPRREYQPKPRMSLEFPTGDSTQPNGGLSHTGTPKPSGVQMDQPCCRALYDFEPENEGELGFKEGDIITLTNQIDENWYEGMLHGHSGFFPINYVEILVALPH

SEQ ID NO: 37716 - protein, 52 aa, Artificial Sequence
  Synthetic polypeptide
EEVEVTRHEQRNARSHHHKLEDMRKDSLRASRGNQLCRHLDFRLPLPELSSA

SEQ ID NO: 37717 - protein, 38 aa, Artificial Sequence
  Synthetic polypeptide
ARSQDGRIGTAPIYSSQRELRRRRVISAFPSEVSRRLW

SEQ ID NO: 37718 - protein, 24 aa, Artificial Sequence
  Synthetic polypeptide
FLHFHLRCPGGCGELLEQTDSGAC

SEQ ID NO: 37719 - protein, 36 aa, Artificial Sequence
  Synthetic polypeptide
HYATSGKFYTIFKKSRSCLCKILYPFIQNTDFYSFH

SEQ ID NO: 37720 - protein, 1371 aa, Artificial Sequence
  Synthetic polypeptide
NFLRADIMPQVENSTRFLKSRDRAYAKFYTLLSKTQIFIRFIEECSFVSDKDTGLAFFDDCIEKLFPDKGTEKTDKVDFDSAEDTRLIELDDSQKSEHTVFIMPPEPPPDDGKDLSPKYSYKYFPRLDLKLFDRPQELKLCFSRHPTGNSITKSPPLMAKRTKQEIKTAHKLAKRCYTNPPQWAKCLFSHCYSLWFICLPAYVRVSHPKVRALQQAYDVLIKMRKTDVDPLDEVCYRVVMQLCGLWGHPVLAVRVLFEMKTARIKPNAITYGYYNKVVLESPWPSSTRSGIFLWTKVRNVVRGLAQFRQPLKKTVQRSQVSSISALQNVTGGSDGDTVSHGSVDSSNDANNGEHTVFVRDLIRLESIDNHSSTGGQSDQGYGSKDELIKDDAEIHVPEEQAARELITKTKMQTEEVCDASAIVAKHSQPSPEPHSPTEPPAWGSSIVKVPSGIFDVNSRKSSTGSISNVLFSTQDPVEDAVFGEATNLKKNGDRGEKRQKHFPERSCSFSSESRAGMLLKKSSLDSNSSEMAIMMGADAKILTAALTCPKTSLLHIARTHSFENVSCHLPDSRTCMSESTWNPEHRSSPVPEMLEESQELLEPVVDDVPKTTATVDTYESLLSDSNSNQSRDLKTVSKDLRNKRSSLYGIAKVVQREDVETGLDPLSLLATECTGGKTPDSEDKLFSPVIARNLADEIESYMNLKSPLGSKSSSMELHREENRESGMTTAFIHALERRSSLPLDHGSPAQENPESEKSSPAVSRSKTFTGRFKQQTPSRTHKERSTSLSALVRSSPHGSLGSVVNSLSGLKLDNILSGPKIDVLKSGMKQAATVASKMWVAVASAYSYSDDEEETNRDYSFPAGLEDHILGENISPNTSISGLVPSELTQSNTSLGSSSSSGDVGKLHYPTGEVPFPRGMKGQDFEKSDHGSSQNTSMSSIYQNCAMEVLMSSCSQCRACGALVYDEEIMAGWTADDSNLNTACPFCKSNFLPLLNIEFKDLRGSASFFLKPSTSGDSLQSGSIPLANESLEHKPVSSLAEPDLINFMDFPKHNQIITEETGSAVEPSDEIKRASGDVQTMKISSVPNSLSKRNVSLTRSHSVGGPLQNIDFTQRPFHGISTVSLPNSLQEVVDPLGKRPNPPPVSVPYLSPLVLRKELESLLENEGDQVIHTSSFINQHPIIFWNLVWYFRRLDLPSNLPGLILTSEHCNEGVQLPLSSLSQDSKLVYIQLLWDNINLHQEPREPLYVSWRNFNSEKKSSLLSEEQQETSTLVETIRQSIQHNNVLKPINLLSQQMKPGMKRQRSLYREILFLSLVSLGRENIDIEAFDNEYGIAYNSLSSEILERLQKIDAPPSASVEWCRKCFGAPLI

SEQ ID NO: 37721 - protein, 14 aa, Artificial Sequence
  Synthetic polypeptide
GLTLCHKWKILHDF

SEQ ID NO: 37722 - protein, 1322 aa, Artificial Sequence
  Synthetic polypeptide
NFLRADIMPQVENSTRFLKSRDRAYAKFYTLLSKTQIFIRFIEECSFVSDKDTGLAFFDDCIEKLFPDKGTEKTDKVDFDSAEDTRLIELDDSQKSEHTVFIMPPEPPPDDGKDLSPKYSYKYFPRLDLKLFDRPQELKLCFSRHPTGNSITKSPPLMAKRTKQEIKTAHKLAKRCYTNPPQWAKCLFSHCYSLWFICLPAYVRVSHPKVRALQQAYDVLIKMRKTDVDPLDEVCYRVVMQLCGLWGHPVLAVRVLFEMKTARIKPNAITYGYYNKVVLESPWPSSTRSGIFLWTKVRNVVRGLAQFRQPLKKTVQRSQVSSISGGQSDQGYGSKDELIKDDAEIHVPEEQAARELITKTKMQTEEVCDASAIVAKHSQPSPEPHSPTEPPAWGSSIVKVPSGIFDVNSRKSSTGSISNVLFSTQDPVEDAVFGEATNLKKNGDRGEKRQKHFPERSCSFSSESRAGMLLKKSSLDSNSSEMAIMMGADAKILTAALTCPKTSLLHIARTHSFENVSCHLPDSRTCMSESTWNPEHRSSPVPEMLEESQELLEPVVDDVPKTTATVDTYESLLSDSNSNQSRDLKTVSKDLRNKRSSLYGIAKVVQREDVETGLDPLSLLATECTGGKTPDSEDKLFSPVIARNLADEIESYMNLKSPLGSKSSSMELHREENRESGMTTAFIHALERRSSLPLDHGSPAQENPESEKSSPAVSRSKTFTGRFKQQTPSRTHKERSTSLSALVRSSPHGSLGSVVNSLSGLKLDNILSGPKIDVLKSGMKQAATVASKMWVAVASAYSYSDDEEETNRDYSFPAGLEDHILGENISPNTSISGLVPSELTQSNTSLGSSSSSGDVGKLHYPTGEVPFPRGMKGQDFEKSDHGSSQNTSMSSIYQNCAMEVLMSSCSQCRACGALVYDEEIMAGWTADDSNLNTACPFCKSNFLPLLNIEFKDLRGSASFFLKPSTSGDSLQSGSIPLANESLEHKPVSSLAEPDLINFMDFPKHNQIITEETGSAVEPSDEIKRASGDVQTMKISSVPNSLSKRNVSLTRSHSVGGPLQNIDFTQRPFHGISTVSLPNSLQEVVDPLGKRPNPPPVSVPYLSPLVLRKELESLLENEGDQVIHTSSFINQHPIIFWNLVWYFRRLDLPSNLPGLILTSEHCNEGVQLPLSSLSQDSKLVYIQLLWDNINLHQEPREPLYVSWRNFNSEKKSSLLSEEQQETSTLVETIRQSIQHNNVLKPINLLSQQMKPGMKRQRSLYREILFLSLVSLGRENIDIEAFDNEYGIAYNSLSSEILERLQKIDAPPSASVEWCRKCFGAPLI

SEQ ID NO: 37723 - protein, 200 aa, Artificial Sequence
  Synthetic polypeptide
GRSQDGRIGTAPVYSSQRERRRRRVISAFPSESSRKFFPITFFGSITWIAVFSYLMVWWAHQVGETIGISEEIMGLTILAAGTSIPDLITSVIVARKGLGDMAVSSSVGSNIFDITVGLPLPWLLYTVIHRFQPVAVSSNGLFCAIVLLFIMLLFVILSIALCKWRMNKILGFIMFGLYFVFLVVSVLLEDRILTCPVSI

SEQ ID NO: 37724 - protein, 29 aa, Artificial Sequence
  Synthetic polypeptide
FLHFHLSHRGSFFPSRSLAPLPGLQYSLT

SEQ ID NO: 37725 - protein, 28 aa, Artificial Sequence
  Synthetic polypeptide
GLSCHMELVQRSTLQSRRIWVCWFHFAN

SEQ ID NO: 37726 - protein, 546 aa, Artificial Sequence
  Synthetic polypeptide
KCGTSPLVLSLLLSYKVCLASPLPSAFSHDCKFPEASPAIWNLCKDPPYKVEESGYAGFILPIEVYFKNKEEPRKVRFDYDLFLHLEGHPPVNHLRCEKLTFNNPTEDFRRKLLKAGGDPNRSIHTSSSSSSSSSSSSSSSSSSSSSSSSSSSSSSSSSSSSSSSSSSTSFSKPHKLMKEHKEKPSKDSREHKSAFKEPSRDHNKSSKESSKKPKENKPLKEEKIVPKMAFKEPKPMSKEPKPDSNLLTITSGQDKKAPSKRPPISDSEELSAKKRKKSSSEALFKSFSSAPPLILTCSADKKQIKDKSHVKMGKVKIESETSEKKKSTLPPFDDIVDPNDSDVEENISSKSDSEQPSPASSSSSSSSSFTPSQTRQQGPLRSIMKDLHSDDNEEESDEVEDNDNDSEMERPVNRGGSRSRRVSLSDGSDSESSSASSPLHHEPPPPLLKTNNNQILEVKSPIKQSKSDKQIKNGECDKAYLDELVELHRRLMTLRERHILQQIVNLIEETGHFHITNTTFDFDLCSLDKTTVRKLQSYLETSGTS

SEQ ID NO: 37727 - protein, 53 aa, Artificial Sequence
  Synthetic polypeptide
WFKSVALLPLFSLSCCPIRCALLPLCLQPSAMIVSFLRPLLPYGTCAKIHLTK

SEQ ID NO: 37728 - protein, 17 aa, Artificial Sequence
  Synthetic polypeptide
LQFYNILKKCAKIHLTK

SEQ ID NO: 37729 - protein, 22 aa, Artificial Sequence
  Synthetic polypeptide
KSVQRSTLQSRRIWVCWFHFAN

SEQ ID NO: 37730 - protein, 508 aa, Artificial Sequence
  Synthetic polypeptide
HSEKVCKDPPYKVEESGYAGFILPIEVYFKNKEEPRKVRFDYDLFLHLEGHPPVNHLRCEKLTFNNPTEDFRRKLLKAGGDPNRSIHTSSSSSSSSSSSSSSSSSSSSSSSSSSSSSSSSSSSSSSSSSSTSFSKPHKLMKEHKEKPSKDSREHKSAFKEPSRDHNKSSKESSKKPKENKPLKEEKIVPKMAFKEPKPMSKEPKPDSNLLTITSGQDKKAPSKRPPISDSEELSAKKRKKSSSEALFKSFSSAPPLILTCSADKKQIKDKSHVKMGKVKIESETSEKKKSTLPPFDDIVDPNDSDVEENISSKSDSEQPSPASSSSSSSSSFTPSQTRQQGPLRSIMKDLHSDDNEEESDEVEDNDNDSEMERPVNRGGSRSRRVSLSDGSDSESSSASSPLHHEPPPPLLKTNNNQILEVKSPIKQSKSDKQIKNGECDKAYLDELVELHRRLMTLRERHILQQIVNLIEETGHFHITNTTFDFDLCSLDKTTVRKLQSYLETSGTS

SEQ ID NO: 37731 - protein, 28 aa, Artificial Sequence
  Synthetic polypeptide
GLRSHMELVQRSTLQSRRIWVCWFHFAN

SEQ ID NO: 37732 - protein, 522 aa, Artificial Sequence
  Synthetic polypeptide
EVCFTSYHDSEASAAIWNLCKDPPYKVEESGYAGFILPIEVYFKNKEEPRKVRFDYDLFLHLEGHPPVNHLRCEKLTFNNPTEDFRRKLLKAGGDPNRSIHTSSSSSSSSSSSSSSSSSSSSSSSSSSSSSSSSSSSSSSSSSSTSFSKPHKLMKEHKEKPSKDSREHKSAFKEPSRDHNKSSKESSKKPKENKPLKEEKIVPKMAFKEPKPMSKEPKPDSNLLTITSGQDKKAPSKRPPISDSEELSAKKRKKSSSEALFKSFSSAPPLILTCSADKKQIKDKSHVKMGKVKIESETSEKKKSTLPPFDDIVDPNDSDVEENISSKSDSEQPSPASSSSSSSSSFTPSQTRQQGPLRSIMKDLHSDDNEEESDEVEDNDNDSEMERPVNRGGSRSRRVSLSDGSDSESSSASSPLHHEPPPPLLKTNNNQILEVKSPIKQSKSDKQIKNGECDKAYLDELVELHRRLMTLRERHILQQIVNLIEETGHFHITNTTFDFDLCSLDKTTVRKLQSYLETSGTS

SEQ ID NO: 37733 - protein, 67 aa, Artificial Sequence
  Synthetic polypeptide
IMEAGLSCVILTIVCLTRSDGFIRGFCFCFFLIFLLLLPCKKCVSPPIMILRPPQPYGTCAKIHLTK

SEQ ID NO: 37734 - protein, 66 aa, Artificial Sequence
  Synthetic polypeptide
ISLVRSDGFIRGFHFCFFLIYLLLLPCMKCLSPPAMILRPPSHVELVQRSTLQSRRIWVCWFHFAN

SEQ ID NO: 37735 - protein, 511 aa, Artificial Sequence
  Synthetic polypeptide
GLPATWNLCKDPPYKVEESGYAGFILPIEVYFKNKEEPRKVRFDYDLFLHLEGHPPVNHLRCEKLTFNNPTEDFRRKLLKAGGDPNRSIHTSSSSSSSSSSSSSSSSSSSSSSSSSSSSSSSSSSSSSSSSSSTSFSKPHKLMKEHKEKPSKDSREHKSAFKEPSRDHNKSSKESSKKPKENKPLKEEKIVPKMAFKEPKPMSKEPKPDSNLLTITSGQDKKAPSKRPPISDSEELSAKKRKKSSSEALFKSFSSAPPLILTCSADKKQIKDKSHVKMGKVKIESETSEKKKSTLPPFDDIVDPNDSDVEENISSKSDSEQPSPASSSSSSSSSFTPSQTRQQGPLRSIMKDLHSDDNEEESDEVEDNDNDSEMERPVNRGGSRSRRVSLSDGSDSESSSASSPLHHEPPPPLLKTNNNQILEVKSPIKQSKSDKQIKNGECDKAYLDELVELHRRLMTLRERHILQQIVNLIEETGHFHITNTTFDFDLCSLDKTTVRKLQSYLETSGTS

SEQ ID NO: 37736 - protein, 47 aa, Artificial Sequence
  Synthetic polypeptide
WVYQRFPLLLLPHLSLAAAMYEVPFTSCHDTEASQPRGTCAKIHLTK

SEQ ID NO: 37737 - protein, 32 aa, Artificial Sequence
  Synthetic polypeptide
QWSPMPGPQTGIGSLLVRNWATHRRIFLLNWS

SEQ ID NO: 37738 - protein, 28 aa, Artificial Sequence
  Synthetic polypeptide
SGPQCLGHRLVLVPCLLGTGPHTGGFSC

SEQ ID NO: 37739 - protein, 1506 aa, Artificial Sequence
  Synthetic polypeptide
ELGHTQEDFPVELVIIGIALLLLQTPASQQKPILNLALKLLSVTEDQKIPKSSLLLVMPILQILSSTALEDCISVDEEGPSRQQLALNLLEMIQQECYRDDHQKLSYKLVCPVTSMYGTIFTAWRILEVMTDSSAASDWLASVESLLPITAVIPAPAFLLLAHLLVEDKGQNLHQILKVTTELAQADSSQVPNLIPVLMFKLGRPLEPILYNDILYTLPKLGVHKVCIGQILRIIQLLGTTPRLRAVTLRLLTSLWEKQDRVYPELQRFMAVSDVPSLSVGKEVQWEKLIAKAASIRDICKQRPYQHGADMLAAISQVLNECTKPDQATPAALVLQGLHALCQAEVVCIRSTWNALSPKLSCDTRPLILKTLSELFSLVPSLTVNTTEYENFKVQVLSFLWTHTQNKDPIVANAAYRSLANFTAGEHTILHLPEKIRPEIPIPEELDDDEDVEDVDLSVPGSCYLKLLSLTPPLVLPALEEFFTSLVKQEMVNMPRGIYHSALKGGARSDQGKTVAGIPNFILKMYETNKQPGLKPGLAGGMLFCYDVSMYQSKDGKPLNRLMASRGRSFKQTSLALVHEVHIQLSEWHRAIFLPQAWLAYMNRAYHAILQGRLGELELQLKHGKEEPEEVQYKKSTAWLWVRDMLTDEITKAAAKESPVVKGNALLALSSLAVVVSRHEASLSSDSDGLLEVQPNFLSMKEWVSMVLDTLLVIVDSHYQPRGQLLSWFYYKSYSGENTASAIARSAAATALSLLVPVFIISCKEKVEEILNMLTARLPGKPSADESQAVQIHMGLALGMFLSRLCEEKLSDISGQEMNLLLMKSLDALENCCFDTSLEYNTGCILGVGLVLSLMSHSSQMQSRVHVAALLRKLSAHVDDSGSQSRTFQEVLAYTLSCVCTSAFSAGIIEATEAEDVMNKLRLLVENSQQTSGFALALGNIVHGLSVCGHGKAEDLGSKLLPAWIRIVLTEGTPTMLCLAALHGMVALVGSEGDVMQLKSEAIQTSHFQGRLNEVIRTLTQVISVSGVIGLQSNAVWLLGHLHLSTLSSSQSRASVPTDYSYLPESSFIGAAIGFFITGGKKGPESVPPSLLKVVMKPIATVGESYQYPPVNWAALLSPLMRLNFGEEIQQLCLEIMVTQAQSSQNAAALLGLWVTPPLIHSLSLNTKRYLLISAPLWIKHISDEQILGFVENLMVAVFKAASPLGSPELCPSALHGLSQAMKLPSPAHHLWSLLSEATGKIFDLLPNKIRRKDLELYISIAKCLLEMTDDDANRIAQVTKSNIEKAAFVKLYLVSQGRFPLVNLTDMLSVAVQHREKEVLAWMILHSLYQARIVSHANTGVLKRMEWLLELMGYIRNVAYQSTSFHNTALDKALDFFLLIFATAVVAWADHTAPLLLGLSASWLPWHQENGPAGPVPSFLGRSPMHRVTLQEVLTLLPNSMALLLQKEPWKEQTQKFIDWLFSIMESPKEALSAQSRDLLKATLLSLRVLPEFKKKAVWTRAYGW

SEQ ID NO: 37740 - protein, 1328 aa, Artificial Sequence
  Synthetic polypeptide
LTPVIPALWKAEVPNLIPVLMFKLGRPLEPILYNDILYTLPKLGVHKVCIGQILRIIQLLGTTPRLRAVTLRLLTSLWEKQDRVYPELQRFMAVSDVPSLSVGKEVQWEKLIAKAASIRDICKQRPYQHGADMLAAISQVLNECTKPDQATPAALVLQGLHALCQAEVVCIRSTWNALSPKLSCDTRPLILKTLSELFSLVPSLTVNTTEYENFKVQVLSFLWTHTQNKDPIVANAAYRSLANFTAGEHTILHLPEKIRPEIPIPEELDDDEDVEDVDLSVPGSCYLKLLSLTPPLVLPALEEFFTSLVKQEMVNMPRGIYHSALKGGARSDQGKTVAGIPNFILKMYETNKQPGLKPGLAGGMLFCYDVSMYQSKDGKPLNRLMASRGRSFKQTSLALVHEVHIQLSEWHRAIFLPQAWLAYMNRAYHAILQGRLGELELQLKHGKEEPEEVQYKKSTAWLWVRDMLTDEITKAAAKESPVVKGNALLALSSLAVVVSRHEASLSSDSDGLLEVQPNFLSMKEWVSMVLDTLLVIVDSHYQPRGQLLSWFYYKSYSGENTASAIARSAAATALSLLVPVFIISCKEKVEEILNMLTARLPGKPSADESQAVQIHMGLALGMFLSRLCEEKLSDISGQEMNLLLMKSLDALENCCFDTSLEYNTGCILGVGLVLSLMSHSSQMQSRVHVAALLRKLSAHVDDSGSQSRTFQEVLAYTLSCVCTSAFSAGIIEATEAEDVMNKLRLLVENSQQTSGFALALGNIVHGLSVCGHGKAEDLGSKLLPAWIRIVLTEGTPTMLCLAALHGMVALVGSEGDVMQLKSEAIQTSHFQGRLNEVIRTLTQVISVSGVIGLQSNAVWLLGHLHLSTLSSSQSRASVPTDYSYLPESSFIGAAIGFFITGGKKGPESVPPSLLKVVMKPIATVGESYQYPPVNWAALLSPLMRLNFGEEIQQLCLEIMVTQAQSSQNAAALLGLWVTPPLIHSLSLNTKRYLLISAPLWIKHISDEQILGFVENLMVAVFKAASPLGSPELCPSALHGLSQAMKLPSPAHHLWSLLSEATGKIFDLLPNKIRRKDLELYISIAKCLLEMTDDDANRIAQVTKSNIEKAAFVKLYLVSQGRFPLVNLTDMLSVAVQHREKEVLAWMILHSLYQARIVSHANTGVLKRMEWLLELMGYIRNVAYQSTSFHNTALDKALDFFLLIFATAVVAWADHTAPLLLGLSASWLPWHQENGPAGPVPSFLGRSPMHRVTLQEVLTLLPNSMALLLQKEPWKEQTQKFIDWLFSIMESPKEALSAQSRDLLKATLLSLRVLPEFKKKAVWTRAYGW

SEQ ID NO: 37741 - protein, 11 aa, Artificial Sequence
  Synthetic polypeptide
SQHFGRLRCQI

SEQ ID NO: 37742 - protein, 31 aa, Artificial Sequence
  Synthetic polypeptide
FCIMVCILPTVIYTQKEETSSESFPLKKRRC

SEQ ID NO: 37743 - protein, 36 aa, Artificial Sequence
  Synthetic polypeptide
LQENKLRAPTDSALWYVFYLQSSILRKKRHPRNLSH

SEQ ID NO: 37744 - protein, 55 aa, Artificial Sequence
  Synthetic polypeptide
SFTVSHHPQMKPSSCRKISSGLPLILHYGMYFTYSHLYSERRDILGIFPIKKKKM

SEQ ID NO: 37745 - protein, 58 aa, Artificial Sequence
  Synthetic polypeptide
EAALHSRQNTGQKATASEAFTSLTHCHLPSINRCLILNHLALIPPSCPLTYPSISHMC

SEQ ID NO: 37746 - protein, 13 aa, Artificial Sequence
  Synthetic polypeptide
LTVICHLSIAALF

SEQ ID NO: 37747 - protein, 77 aa, Artificial Sequence
  Synthetic polypeptide
GLHFINSLSFAIYQSLPYFESFGTYSTKLPFDLSIYFPYVLKIYLMMLFIGMYFTYSHLYSERRDILGIFPIKKKKM

SEQ ID NO: 37748 - protein, 268 aa, Artificial Sequence
  Synthetic polypeptide
RCAGMISFHDAGPRHQAAAPSRPHDQEGKQPVLHSALCCQMIPPNCKLMYRKNAYLFIYYLIQFCGHSWIFTNMTVRFFSFGKDSMVDTFYAIGLVMRLCQSVSLLELLHIYVGIESNHLLPRFLQLTERIIILFVVITSQEEVQEKYVVCVLFVFWNLLDMVRYTYSMLSVIGISYAVLTWLSQTLWMPIYPLCVLAEAFAIYQSLPYFESFGTYSTKLPFDLSIYFPYVLKIYLMMLFIGMYFTYSHLYSERRDILGIFPIKKKKM

SEQ ID NO: 37749 - protein, 3 aa, Artificial Sequence
  Synthetic polypeptide
ANV

SEQ ID NO: 37750 - protein, 51 aa, Artificial Sequence
  Synthetic polypeptide
ERSTYDLRSSDQPAQGTSHQFQIRLTEKLSKQGRPLNDMKQELTTEFRSPR

SEQ ID NO: 37751 - protein, 49 aa, Artificial Sequence
  Synthetic polypeptide
LGTGDLPWEINPPSSCSLLCEKDPPTTSGPQTNQPKEHLTNFKSVSQKN

SEQ ID NO: 37752 - protein, 71 aa, Artificial Sequence
  Synthetic polypeptide
WCLDSEQGTSLGRSIPHPPALCSVRKIHLRPQVLRPTSPRNISPISNPSHRKTEQTRKTLERHEARAYYRV

SEQ ID NO: 37753 - protein, 324 aa, Artificial Sequence
  Synthetic polypeptide
CCACKRLGHGHIQREDHVKTHGERCHLQAKETDLRRNQSQSHLNVGLLASRTIGIIGGTGLDDPEILEGRTEKYVDTPFGKPSDALILGKIKNVDCVLLARHGRQHTIMPSKVNYQANIWALKEEGCTHVIVTTACGSLREEIQPGDIVIIDQFIDRTTMRPQSFYDGSHSCARGVCHIPMAEPFCPKTREVLIETAKKLGLRCHSKGTMVTIEGPRFSSRAESFMFRTWGADVINMTTVPEVVLAKEAGICYASIAMATDYDCWKEHEEAVSVDRVLKTLKENANKAKSLLLTTIPQIGSTEWSETLHNLKNMAQFSVLLPRH

SEQ ID NO: 37754 - protein, 6 aa, Artificial Sequence
  Synthetic polypeptide
PPELLE

SEQ ID NO: 37755 - protein, 18 aa, Artificial Sequence
  Synthetic polypeptide
CWTSSLQNYWNNWWNRPG

SEQ ID NO: 37756 - protein, 184 aa, Artificial Sequence
  Synthetic polypeptide
CCACKRLGHGHIQREDHVKTHGERCHLQAKETDLRRNQSQSHLNVGLLASRTIGIIGGTGLDDPEILEGRTEKYVDTPFGKPSDALILGKIKNVDCVLLARHGRQHTIMPSKVNYQANIWALKEEGCTHVIVTTACGSLREEIQPGDIVIIDQFIDRTICHDISKDSKREYWCPCCDDSSAPLI

SEQ ID NO: 37757 - protein, 375 aa, Artificial Sequence
  Synthetic polypeptide
CCACKRLGHGHIQREDHVKTHGERCHLQAKETDLRRNQSQSHLNVGLLASRTIGIIGGTGLDDPEILEGRTEKYVDTPFGKPSDALILGKIKNVDCVLLARHGRQHTIMPSKVNYQANIWALKEEGCTHVIVTTACGSLREEIQPGDIVIIDQFIDRTTMRPQSFYDGSHSCARGVCHIPMAEPFCPKTREVLIETAKKLGLRCHSKGTMVTIEGPRFSSRAESFMFRTWGADVINMTTVPEVVLAKEAGICYASIAMATDYDCWKEHEEAVSVDRVLKTLKENANKAKSLLLTTIPQIGSTEWSETLHNLKMIKFQMILSEGYHPFNIQESPFYRGLLDFPSVGHGRGEILPLSPLDLAGYCFQQPMQPPCPDS

SEQ ID NO: 37758 - protein, 91 aa, Artificial Sequence
  Synthetic polypeptide
CCACKRLGHGHIQREDHVKTHGERCHLQAKETDLRRNQSQSHLNVGLLASRTIGIIGGTGLDDPEILEGRTEKYVDTPFGKVNIQLVETSI

SEQ ID NO: 37759 - protein, 283 aa, Artificial Sequence
  Synthetic polypeptide
CCACKRLGHGHIQREDHVKTHGERCHLQAKETDLRRNQSQSHLNVGLLASRTIGIIGGTGLDDPEILEGRTEKYVDTPFGKPSDALILGKIKNVDCVLLARHGRQHTIMPSKVNYQANIWALKEEGCTHVIVTTACGSLREEIQPGDIVIIDQFIDRTTMRPQSFYDGSHSCARGVCHIPMAEPFCPKTREVLIETAKKLGLRCHSKGTMVTIEGPRFSSRAESFMFRTWGADVINMTTVPEVVLAKEAGICYASIAMATDYDCWKEHEEACYCFSRFRWTGS

SEQ ID NO: 37760 - protein, 261 aa, Artificial Sequence
  Synthetic polypeptide
GRTWWLMPVMPALWEFKAGKLKELNGTAPEEKKLTEDDLILLEKILSLICNSSSEKPTVQQLQILWKAINCPEDIVFPALDILRLSIKHPSVNENFCNEKEGAQFSSHLINLLNPKGKPANQLLALRTFCNCFVGQAGQKLMMSQRESLMSHAIELKSGSNKNIHIALATLALNYSVCFHKDHNIEGKAQCLSLISTILEVVQDLEATFRLLVALGTLISDDSNAVQLAKSLGVDSQIKKYSSVSEPAKVSECCRFILNLL

SEQ ID NO: 37761 - protein, 11 aa, Artificial Sequence
  Synthetic polypeptide
CQHFGSSRQVN

SEQ ID NO: 37762 - protein, 18 aa, Artificial Sequence
  Synthetic polypeptide
PDVVAHACNASTLGVQGR

SEQ ID NO: 37763 - protein, 75 aa, Artificial Sequence
  Synthetic polypeptide
GRTWWLMPVMPALWEFKAGKLKELNGTAPEEKKLTEDDLILLEKILSLICNSSSEKPTVQQLQILWKAINCPEGK

SEQ ID NO: 37764 - protein, 35 aa, Artificial Sequence
  Synthetic polypeptide
GQVQWLMPVIPALLEAEVGGSPEERKTNQKCRRRN

SEQ ID NO: 37765 - protein, 418 aa, Artificial Sequence
  Synthetic polypeptide
SQHFWRLKWVDHLRKEKQIRSVEEEIEQEKQATDDIIKNMSFENQVKYLEMKTTNEKLLQELDTLQQQLDSQNMKKESLEAEIAHSQVKQEAVLLHEKLYELESHRDQMIAEDKSIGSPMEEREKLLKQIKDDNQEIASMERQLTDTKEKINQFIEEIRQLDMDLEEHQGEMNQKYKELKKREEHMDTFIETFEETKNQELKRKAQIEANIVALLEHCSRNINRIEQISSITNQELKMMQDDLNFKSTEVQKSQSTAQNLTSDIQRLQLDLQKMELLESKMTEEQHSLKSKIKQMTTDLEIYNDLPALKSSGEEKIKKLHQERMILSTHRNAFKKIMEKQNIEYEALKTQLQENETHSQLTNLERKWQHLEQNNFAMKEFIATKSQESDYQPIKKNVTKQIAEYNKTIVDALHSTSGN

SEQ ID NO: 37766 - protein, 190 aa, Artificial Sequence
  Synthetic polypeptide
SQHFWRLKWVDHLRKEKQIRSVEEEIEQEKQATDDIIKNMSFENQVKYLEMKTTNEKLLQELDTLQQQLDSQNMKKESLEAEIAHSQVKQEAVLLHEKLYELESHRDQMIAEDKSIGSPMEEREKLLKQIKDDNQEIASMERQLTDTKEKINQFIEEIRQLDMDLEEHQDPTNYGWKILEKNTGSFKKQV

SEQ ID NO: 37767 - protein, 1935 aa, Artificial Sequence
  Synthetic polypeptide
VSISRRMDKENVAGPRHLNVLCDVSGKGPVTACDFDLRSLQPDKRLENLLQQVSAEDFEKQNEEARRTNRQAELFALYPSVDEEDAVEIRPVPECPKEHLGNRILVKLLTLKFEIEIEPLFASIALYDVKERKKISENFHCDLNSDQFKGFLRAHTPSVAASSQARSAVFSVTYPSSDIYLVVKIEKVLQQGEIGDCAEPYTVIKESDGGKSKEKIEKLKLQAESFCQRLGKYRMPFAWAPISLSSFFNVSTLEREVTDVDSVVGRSSVGERRTLAQSRRLSERALSLEENGVGSNFKTSTLSVSSFFKQEGDRLSDEDLFKFLADYKRSSSLQRRVKSIPGLLRLEISTAPEIINCCLTPEMLPVKPFPENRTRPHKEILEFPTREVYVPHTVYRNLLYVYPQRLNFVNKLASARNITIKIQFMCGEDASNAMPVIFGKSSGPEFLQEVYTAVTYHNKSPDFYEEVKIKLPAKLTVNHHLLFTFYHISCQQKQGASVETLLGYSWLPILLNERLQTGSYCLPVALEKLPPNYSMHSAEKVPLQNPPIKWAEGHKGVFNIEVQAVSSVHTQDNHLEKFFTLCHSLESQVTFPIRVLDQKISEMALEHELKLSIICLNSSRLEPLVLFLHLVLDKLFQLSVQPMVIAGQTANFSQFAFESVVAIANSLHNSKDLSKDQHGRNCLLASYVHYVFRLPEVQRDVPKSGAPTALLDPRSYHTYGRTSAAAVSSKLLQARVMSSSNPDLAGTHSAADEEVKNIMSSKIADRNCSRMSYYCSGSSDAPSSPAAPRPASKKHFHEELALQMVVSTGMVRETVFKYAWFFFELLVKSMAQHVHNMDKRDSFRRTRFSDRFMDDITTIVNVVTSEIAALLVKPQKENEQAEKMNISLAFFLYDLLSLMDRGFVFNLIRHYCSQLSAKLSNLPTLISMRLEFLRILCSHEHYLNLNLFFMNADTAPTSPCPSISSQNSSSCSSFQDQKIASMFDLTSEYRQQHFLTGLLFTELAAALDAEGEGISKVQRKAVSAIHSLLSSHDLDPRCVKPEVKVKIAALYLPLVGIILDALPQLCDFTVADTRRYRTSGSDEEQEGAGAINQNVALAIAGNNFNLKTSGIVLSSLPYKQYNMLNADTTRNLMICFLWIMKNADQSLIRKWIADLPSTQLNRILDLLFICVLCFEYKGKQSSDKVSTQVLQKSRDVKARLEEALLRGEGARGEMMRRRAPGNDRFPGLNENLRWKKEQTHWRQANEKLDKTKAELDQEALISGNLATEAHLIILDMQENIIQASSALDCKDSLLGGVLRVLVNSLNCDQSTTYLTHCFATLRALIAKFGDLLFEEEVEQCFDLCHQVLHHCSSSMDVTRSQACATLYLLMRFSFGATSNFARVKMQVTMSLASLVGRAPDFNEEHLRRSLRTILAYSEEDTAMQMTPFPTQVEELLCNLNSILYDTVKMREFQEDPEMLMDLMYRIAKSYQASPDLRLTWLQNMAEKHTKKKCYTEAAMCLVHAAALVAEYLSMLEDHSYLPVGSVSFQNISSNVLEESVVSEDTLSPDEDGVCAGQYFTESGLVGLLEQAAELFSTGGLYETVNEVYKLVIPILEAHREFRKLTLTHSKLQRAFDSIVNKDHKRMFGTYFRVGFFGSKFGDLDEQEFVYKEPAITKLPEISHRLEAFYGQCFGAEFVEVIKDSTPVDKTKLDPNKAYIQITFVEPYFDEYEMKDRVTYFEKNFNLRRFMYTTPFTLEGRPRGELHEQYRRNTVLTTMHAFPYIKTRISVIQKEEFVLTPIEVAIEDMKKKTLQLAVAINQEPPDAKMLQMVLQGSVGATVNQGPLEVAQVFLAEIPADPKLYRHHNKLRLCFKEFIMRCGEAVEKNKRLITADQREYQQELKKNYNKLKENLRPMIERKIPELYKPIFRVESQKRDSFHRSSFRKCETQLSQGS

SEQ ID NO: 37768 - protein, 61 aa, Artificial Sequence
  Synthetic polypeptide
SYDPAVSLLDICPEERISVYQRDICTPMFIAALFTVTKTWTQPKYPSAEEWIKKMWQAPAT

SEQ ID NO: 37769 - protein, 24 aa, Artificial Sequence
  Synthetic polypeptide
RKCGRPPPLKRAVRRVWERPRHCL

SEQ ID NO: 37770 - protein, 406 aa, Artificial Sequence
  Synthetic polypeptide
VSISRRMDKENVAGPRHLNVLCDVSGKGPVTACDFDLRSLQPDKRLENLLQQVSAEDFEKQNEEARRTNRQAELFALYPSVDEEDAVEIRPVPECPKEHLGNRILVKLLTLKFEIEIEPLFASIALYDVKERKKISENFHCDLNSDQFKGFLRAHTPSVAASSQARSAVFSVTYPSSDIYLVVKIEKVLQQGEIGDCAEPYTVIKESDGGKSKEKIEKLKLQAESFCQRLGKYRMPFAWAPISLSSFFNVSTLEREVTDVDSVVGRSSVGERRTLAQSRRLSERALSLEENGVGSNFKTSTLSVSSFFKQEGDRLSDEDLFKFLADYKRSSSLQRRVKSIPGLLRLEISTAPEIINCCLTPEMLPVKPFPENRTRPHKEILEFPTREVYVPHTVYREVFQVSAVAH

SEQ ID NO: 37771 - protein, 1903 aa, Artificial Sequence
  Synthetic polypeptide
VSISRRMDKENVAGPRHLNVLCDVSGKGPVTACDFDLRSLQPDKRLENLLQQVSAEDFEKQNEEARRTNRQAELFALYPSVDEEDAVEIRPVPECPKEHLGNRILVKLLTLKFEIEIEPLFASIALYDVKERKKISENFHCDLNSDQFKGFLRAHTPSVAASSQARSAVFSVTYPSSDIYLVVKIEKVLQQGEIGDCAEPYTVIKESDGGKSKEKIEKLKLQAESFCQRLGKYRMPFAWAPISLSSFFNVSTLEREVTDVDSVVGRSSVGERRTLAQSRRLSERALSLEENGVGSNFKTSTLSVSSFFKQEGDRLSDEDLFKFLADYKRSSSLQRRVKSIPGLLRLEISTAPEIINCCLTPEMLPVKPFPENRTRPHKEILEFPTREVYVPHTVYRNLLYVYPQRLNFVNKLASARNITIKIQFMCGEDASNAMPVIFGKSSGPEFLQEVYTAVTYHNKSPDFYEEVKIKLPAKLTVNHHLLFTFYHISCQQKQGASVETLLGYSWLPILLNERLQTGSYCLPVALEKLPPNYSMHSAEKVPLQNPPIKWAEGHKGVFNIEVQAVSSVHTQDNHLEKFFTLCHSLESQVTFPIRVLDQKISEMALEHELKLSIICLNSSRLEPLVLFLHLVLDKLFQLSVQPMVIAGQTANFSQFAFESVVAIANSLHNSKDLSKDQHGRNCLLASYVHYVFRLPEVQRDVPKSGAPTALLDPRSYHTYGRTSAAAVSSKLLQARVMSSSNPDLAGTHSAADEEVKNIMSSKHFHEELALQMVVSTGMVRETVFKYAWFFFELLVKSMAQHVHNMDKRDSFRRTRFSDRFMDDITTIVNVVTSEIAALLVKPQKENEQAEKMNISLAFFLYDLLSLMDRGFVFNLIRHYCSQLSAKLSNLPTLISMRLEFLRILCSHEHYLNLNLFFMNADTAPTSPCPSISSQNSSSCSSFQDQKIASMFDLTSEYRQQHFLTGLLFTELAAALDAEGEGISKVQRKAVSAIHSLLSSHDLDPRCVKPEVKVKIAALYLPLVGIILDALPQLCDFTVADTRRYRTSGSDEEQEGAGAINQNVALAIAGNNFNLKTSGIVLSSLPYKQYNMLNADTTRNLMICFLWIMKNADQSLIRKWIADLPSTQLNRILDLLFICVLCFEYKGKQSSDKVSTQVLQKSRDVKARLEEALLRGEGARGEMMRRRAPGNDRFPGLNENLRWKKEQTHWRQANEKLDKTKAELDQEALISGNLATEAHLIILDMQENIIQASSALDCKDSLLGGVLRVLVNSLNCDQSTTYLTHCFATLRALIAKFGDLLFEEEVEQCFDLCHQVLHHCSSSMDVTRSQACATLYLLMRFSFGATSNFARVKMQVTMSLASLVGRAPDFNEEHLRRSLRTILAYSEEDTAMQMTPFPTQVEELLCNLNSILYDTVKMREFQEDPEMLMDLMYRIAKSYQASPDLRLTWLQNMAEKHTKKKCYTEAAMCLVHAAALVAEYLSMLEDHSYLPVGSVSFQNISSNVLEESVVSEDTLSPDEDGVCAGQYFTESGLVGLLEQAAELFSTGGLYETVNEVYKLVIPILEAHREFRKLTLTHSKLQRAFDSIVNKDHKRMFGTYFRVGFFGSKFGDLDEQEFVYKEPAITKLPEISHRLEAFYGQCFGAEFVEVIKDSTPVDKTKLDPNKAYIQITFVEPYFDEYEMKDRVTYFEKNFNLRRFMYTTPFTLEGRPRGELHEQYRRNTVLTTMHAFPYIKTRISVIQKEEFVLTPIEVAIEDMKKKTLQLAVAINQEPPDAKMLQMVLQGSVGATVNQGPLEVAQVFLAEIPADPKLYRHHNKLRLCFKEFIMRCGEAVEKNKRLITADQREYQQELKKNYNKLKENLRPMIERKIPELYKPIFRVESQKRDSFHRSSFRKCETQLSQGS

SEQ ID NO: 37772 - protein, 12 aa, Artificial Sequence
  Synthetic polypeptide
SLHIVHRQAPAT

SEQ ID NO: 37773 - protein, 29 aa, Artificial Sequence
  Synthetic polypeptide
FDHYTLYTGRPPPLKRAVRRVWERPRHCL

SEQ ID NO: 37774 - protein, 1940 aa, Artificial Sequence
  Synthetic polypeptide
GNGYTNYPDLIITHCTQAGPRHLNVLCDVSGKGPVTACDFDLRSLQPDKRLENLLQQVSAEDFEKQNEEARRTNRQAELFALYPSVDEEDAVEIRPVPECPKEHLGNRILVKLLTLKFEIEIEPLFASIALYDVKERKKISENFHCDLNSDQFKGFLRAHTPSVAASSQARSAVFSVTYPSSDIYLVVKIEKVLQQGEIGDCAEPYTVIKESDGGKSKEKIEKLKLQAESFCQRLGKYRMPFAWAPISLSSFFNVSTLEREVTDVDSVVGRSSVGERRTLAQSRRLSERALSLEENGVGSNFKTSTLSVSSFFKQEGDRLSDEDLFKFLADYKRSSSLQRRVKSIPGLLRLEISTAPEIINCCLTPEMLPVKPFPENRTRPHKEILEFPTREVYVPHTVYRNLLYVYPQRLNFVNKLASARNITIKIQFMCGEDASNAMPVIFGKSSGPEFLQEVYTAVTYHNKSPDFYEEVKIKLPAKLTVNHHLLFTFYHISCQQKQGASVETLLGYSWLPILLNERLQTGSYCLPVALEKLPPNYSMHSAEKVPLQNPPIKWAEGHKGVFNIEVQAVSSVHTQDNHLEKFFTLCHSLESQVTFPIRVLDQKISEMALEHELKLSIICLNSSRLEPLVLFLHLVLDKLFQLSVQPMVIAGQTANFSQFAFESVVAIANSLHNSKDLSKDQHGRNCLLASYVHYVFRLPEVQRDVPKSGAPTALLDPRSYHTYGRTSAAAVSSKLLQARVMSSSNPDLAGTHSAADEEVKNIMSSKIADRNCSRMSYYCSGSSDAPSSPAAPRPASKKHFHEELALQMVVSTGMVRETVFKYAWFFFELLVKSMAQHVHNMDKRDSFRRTRFSDRFMDDITTIVNVVTSEIAALLVKPQKENEQAEKMNISLAFFLYDLLSLMDRGFVFNLIRHYCSQLSAKLSNLPTLISMRLEFLRILCSHEHYLNLNLFFMNADTAPTSPCPSISSQNSSSCSSFQDQKIASMFDLTSEYRQQHFLTGLLFTELAAALDAEGEGISKVQRKAVSAIHSLLSSHDLDPRCVKPEVKVKIAALYLPLVGIILDALPQLCDFTVADTRRYRTSGSDEEQEGAGAINQNVALAIAGNNFNLKTSGIVLSSLPYKQYNMLNADTTRNLMICFLWIMKNADQSLIRKWIADLPSTQLNRILDLLFICVLCFEYKGKQSSDKVSTQVLQKSRDVKARLEEALLRGEGARGEMMRRRAPGNDRFPGLNENLRWKKEQTHWRQANEKLDKTKAELDQEALISGNLATEAHLIILDMQENIIQASSALDCKDSLLGGVLRVLVNSLNCDQSTTYLTHCFATLRALIAKFGDLLFEEEVEQCFDLCHQVLHHCSSSMDVTRSQACATLYLLMRFSFGATSNFARVKMQVTMSLASLVGRAPDFNEEHLRRSLRTILAYSEEDTAMQMTPFPTQVEELLCNLNSILYDTVKMREFQEDPEMLMDLMYRIAKSYQASPDLRLTWLQNMAEKHTKKKCYTEAAMCLVHAAALVAEYLSMLEDHSYLPVGSVSFQNISSNVLEESVVSEDTLSPDEDGVCAGQYFTESGLVGLLEQAAELFSTGGLYETVNEVYKLVIPILEAHREFRKLTLTHSKLQRAFDSIVNKDHKRMFGTYFRVGFFGSKFGDLDEQEFVYKEPAITKLPEISHRLEAFYGQCFGAEFVEVIKDSTPVDKTKLDPNKAYIQITFVEPYFDEYEMKDRVTYFEKNFNLRRFMYTTPFTLEGRPRGELHEQYRRNTVLTTMHAFPYIKTRISVIQKEEFVLTPIEVAIEDMKKKTLQLAVAINQEPPDAKMLQMVLQGSVGATVNQGPLEVAQVFLAEIPADPKLYRHHNKLRLCFKEFIMRCGEAVEKNKRLITADQREYQQELKKNYNKLKENLRPMIERKIPELYKPIFRVESQKRDSFHRSSFRKCETQLSQGS

SEQ ID NO: 37775 - protein, 411 aa, Artificial Sequence
  Synthetic polypeptide
GNGYTNYPDLIITHCTQAGPRHLNVLCDVSGKGPVTACDFDLRSLQPDKRLENLLQQVSAEDFEKQNEEARRTNRQAELFALYPSVDEEDAVEIRPVPECPKEHLGNRILVKLLTLKFEIEIEPLFASIALYDVKERKKISENFHCDLNSDQFKGFLRAHTPSVAASSQARSAVFSVTYPSSDIYLVVKIEKVLQQGEIGDCAEPYTVIKESDGGKSKEKIEKLKLQAESFCQRLGKYRMPFAWAPISLSSFFNVSTLEREVTDVDSVVGRSSVGERRTLAQSRRLSERALSLEENGVGSNFKTSTLSVSSFFKQEGDRLSDEDLFKFLADYKRSSSLQRRVKSIPGLLRLEISTAPEIINCCLTPEMLPVKPFPENRTRPHKEILEFPTREVYVPHTVYREVFQVSAVAH

SEQ ID NO: 37776 - protein, 1908 aa, Artificial Sequence
  Synthetic polypeptide
GNGYTNYPDLIITHCTQAGPRHLNVLCDVSGKGPVTACDFDLRSLQPDKRLENLLQQVSAEDFEKQNEEARRTNRQAELFALYPSVDEEDAVEIRPVPECPKEHLGNRILVKLLTLKFEIEIEPLFASIALYDVKERKKISENFHCDLNSDQFKGFLRAHTPSVAASSQARSAVFSVTYPSSDIYLVVKIEKVLQQGEIGDCAEPYTVIKESDGGKSKEKIEKLKLQAESFCQRLGKYRMPFAWAPISLSSFFNVSTLEREVTDVDSVVGRSSVGERRTLAQSRRLSERALSLEENGVGSNFKTSTLSVSSFFKQEGDRLSDEDLFKFLADYKRSSSLQRRVKSIPGLLRLEISTAPEIINCCLTPEMLPVKPFPENRTRPHKEILEFPTREVYVPHTVYRNLLYVYPQRLNFVNKLASARNITIKIQFMCGEDASNAMPVIFGKSSGPEFLQEVYTAVTYHNKSPDFYEEVKIKLPAKLTVNHHLLFTFYHISCQQKQGASVETLLGYSWLPILLNERLQTGSYCLPVALEKLPPNYSMHSAEKVPLQNPPIKWAEGHKGVFNIEVQAVSSVHTQDNHLEKFFTLCHSLESQVTFPIRVLDQKISEMALEHELKLSIICLNSSRLEPLVLFLHLVLDKLFQLSVQPMVIAGQTANFSQFAFESVVAIANSLHNSKDLSKDQHGRNCLLASYVHYVFRLPEVQRDVPKSGAPTALLDPRSYHTYGRTSAAAVSSKLLQARVMSSSNPDLAGTHSAADEEVKNIMSSKHFHEELALQMVVSTGMVRETVFKYAWFFFELLVKSMAQHVHNMDKRDSFRRTRFSDRFMDDITTIVNVVTSEIAALLVKPQKENEQAEKMNISLAFFLYDLLSLMDRGFVFNLIRHYCSQLSAKLSNLPTLISMRLEFLRILCSHEHYLNLNLFFMNADTAPTSPCPSISSQNSSSCSSFQDQKIASMFDLTSEYRQQHFLTGLLFTELAAALDAEGEGISKVQRKAVSAIHSLLSSHDLDPRCVKPEVKVKIAALYLPLVGIILDALPQLCDFTVADTRRYRTSGSDEEQEGAGAINQNVALAIAGNNFNLKTSGIVLSSLPYKQYNMLNADTTRNLMICFLWIMKNADQSLIRKWIADLPSTQLNRILDLLFICVLCFEYKGKQSSDKVSTQVLQKSRDVKARLEEALLRGEGARGEMMRRRAPGNDRFPGLNENLRWKKEQTHWRQANEKLDKTKAELDQEALISGNLATEAHLIILDMQENIIQASSALDCKDSLLGGVLRVLVNSLNCDQSTTYLTHCFATLRALIAKFGDLLFEEEVEQCFDLCHQVLHHCSSSMDVTRSQACATLYLLMRFSFGATSNFARVKMQVTMSLASLVGRAPDFNEEHLRRSLRTILAYSEEDTAMQMTPFPTQVEELLCNLNSILYDTVKMREFQEDPEMLMDLMYRIAKSYQASPDLRLTWLQNMAEKHTKKKCYTEAAMCLVHAAALVAEYLSMLEDHSYLPVGSVSFQNISSNVLEESVVSEDTLSPDEDGVCAGQYFTESGLVGLLEQAAELFSTGGLYETVNEVYKLVIPILEAHREFRKLTLTHSKLQRAFDSIVNKDHKRMFGTYFRVGFFGSKFGDLDEQEFVYKEPAITKLPEISHRLEAFYGQCFGAEFVEVIKDSTPVDKTKLDPNKAYIQITFVEPYFDEYEMKDRVTYFEKNFNLRRFMYTTPFTLEGRPRGELHEQYRRNTVLTTMHAFPYIKTRISVIQKEEFVLTPIEVAIEDMKKKTLQLAVAINQEPPDAKMLQMVLQGSVGATVNQGPLEVAQVFLAEIPADPKLYRHHNKLRLCFKEFIMRCGEAVEKNKRLITADQREYQQELKKNYNKLKENLRPMIERKIPELYKPIFRVESQKRDSFHRSSFRKCETQLSQGS

SEQ ID NO: 37777 - protein, 894 aa, Artificial Sequence
  Synthetic polypeptide
NENDEEVQYIQAEKNNKGPMEAATLFLKFLLELQEEGWFRGFLDALDHAGYSGLYEAIESWDFKKIEKLEEYRLLLKRLQPEFKTRIIPTDIISDLSECLINQECEEILQICSTKGMMAGAEKLVECLLRSDKENWPKTLKLALEKERNKFSELWIVEKGIKDVETEDLEDKMETSDIQIFYQEDPECQNLSENSCPPSEVSDTNLYSPFKPRNYQLELALPAMKGKNTIICAPTGCGKTFVSLLICEHHLKKFPQGQKGKVVFFANQIPVYEQQKSVFSKYFERHGYRVTGISGATAENVPVEQIVENNDIIILTPQILVNNLKKGTIPSLSIFTLMIFDECHNTSKQHPYNMIMFNYLDQKLGGSSGPLPQVIGLTASVGVGDAKNTDEALDYICKLCASLDASVIATVKHNLEELEQVVYKPQKFFRKVESRISDKFKYIIAQLMRDTESLAKRICKDLENLSQIQNREFGTQKYEQWIVTVQKACMVFQMPDKDEESRICKALFLYTSHLRKYNDALIISEHARMKDALDYLKDFFSNVRAAGFDEIEQDLTQRFEEKLQELESVSRDPSNENPKLEDLCFILQEEYHLNPETITILFVKTRALVDALKNWIEGNPKLSFLKPGILTGRGKTNQNTGMTLPAQKCILDAFKASGDHNILIATSVADEGIDIAQCNLVILYEYVGNVIKMIQTRGRGRARGSKCFLLTSNAGVIEKEQINMYKEKMMNDSILRLQTWDEAVFREKILHIQTHEKFIRDSQEKPKPVPDKENKKLLCRKCKALACYTADVRVIEECHYTVLGDAFKECFVSRPHPKPKQFSSFEKRAKIFCARQNCSHDWGIHVKYKTFEIPVIKIESFVVEDIATGVQTLYSKWKDFHFEKIPFDPAEMSK

SEQ ID NO: 37778 - protein, 48 aa, Artificial Sequence
  Synthetic polypeptide
KAKMKTMKRCSIFRLRKTTRAQWRLPHFFSSSCWSSRRKAGSVAFWMP

SEQ ID NO: 37779 - protein, 2 aa, Artificial Sequence
  Synthetic polypeptide
PE

SEQ ID NO: 37780 - protein, 309 aa, Artificial Sequence
  Synthetic polypeptide
PTWRNPVSTKNTKLARVMMRVCWLVRQDSRHQRIRLPHLEAVVIGRGPETKITDKKCSRQQVQLKAECNKGYVKVKQVGVNPTSIDSVVIGKDQEVKLQPGQVLHMVNELYPYIVEFEEEAKNPGLETHRKRKRSGNSDSIERDAAQEAEAGTGLEPGSNSGQCSVPLKKGKDAPIKKESLGHWSQGLKISMQDPKMQVYKDEQVVVIKDKYPKARYHWLVLPWTSISSLKAVAREHLELLKHMHTVGEKVIVDFAGSSKLRFRLGYHAIPSMSHVHLHVISQDFDSPCLKNKKHWNSFNTEYFLESQE

SEQ ID NO: 37781 - protein, 43 aa, Artificial Sequence
  Synthetic polypeptide
KYKTSQSDDAGVLVGETGQPAPANQTSTFGSSCDWAWPRDQDH

SEQ ID NO: 37782 - protein, 287 aa, Artificial Sequence
  Synthetic polypeptide
PTWRNPVSTKNTKLARVMMRVCWLVRQDSRHQRIRLPHLEAVVIGRGPETKITDKKCSRQQVQLKAECNKGYVKVKQVGVNPTSIDSVVIGKDQEVKLQPGQVLHMESLGHWSQGLKISMQDPKMQVYKDEQVVVIKDKYPKARYHWLVLPWTSISSLKAVAREHLELLKHMHTVGEKVIVDFAGSSKLRFRLGYHAIPSMSHVHLHVISQDFDSPCLKNKKHWNSFNTEYFLESQAVIEMVQEAGRVTVRDGMPELLKLPLRCHECQQLLPSIPQLKEHLRKHWTQ

SEQ ID NO: 37783 - protein, 359 aa, Artificial Sequence
  Synthetic polypeptide
PTWRNPVSTKNTKLARVMMRVCWLVRQDSRHQRIRLPHLEAVVIGRGPETKITDKKCSRQQVQLKAECNKGYVKVKQVGVNPTSIDSVVIGKDQEVKLQPGQVLHMVNELYPYIVEFEEEAKNPGLETHRKRKRSGNSDSIERDAAQEAEAGTGLEPGSNSGQCSVPLKKGKDAPIKKESLGHWSQGLKISMQDPKMQVYKDEQVVVIKDKYPKARYHWLVLPWTSISSLKAVAREHLELLKHMHTVGEKVIVDFAGSSKLRFRLGYHAIPSMSHVHLHVISQDFDSPCLKNKKHWNSFNTEYFLESQAVIEMVQEAGRVTVRDGMPELLKLPLRCHECQQLLPSIPQLKEHLRKHWTQ

SEQ ID NO: 37784 - protein, 85 aa, Artificial Sequence
  Synthetic polypeptide
PTWRNPVSTKNTKLARVMMRVCWLVRQDSRHQRIRLPHLEAVVIGRGPETKITDKKCSRQQGIPGPLESRLEDFYAGPQNAGLQR

SEQ ID NO: 37785 - protein, 305 aa, Artificial Sequence
  Synthetic polypeptide
PTWRNPVSTKNTKLARVMMRVCWLVRQDSRHQRIRLPHLEAVVIGRGPETKITDKKCSRQQEFEEEAKNPGLETHRKRKRSGNSDSIERDAAQEAEAGTGLEPGSNSGQCSVPLKKGKDAPIKKESLGHWSQGLKISMQDPKMQVYKDEQVVVIKDKYPKARYHWLVLPWTSISSLKAVAREHLELLKHMHTVGEKVIVDFAGSSKLRFRLGYHAIPSMSHVHLHVISQDFDSPCLKNKKHWNSFNTEYFLESQAVIEMVQEAGRVTVRDGMPELLKLPLRCHECQQLLPSIPQLKEHLRKHWTQ

SEQ ID NO: 37786 - protein, 201 aa, Artificial Sequence
  Synthetic polypeptide
PTWRNPVSTKNTKLARVMMRVCWLVRQDSRHQRIRLPHLEAVVIGRGPETKITDKKCSRQQVQLKAECNKGYVKVKQVGVNPTSIDSVVIGKDQEVKLQPGQVLHMESLGHWSQGLKISMQDPKMQVYKDEQVVVIKDKYPKARYHWLVLPWTSISSLKAVAREHLELLKHMHTVGEKVIVDFAGSSKLRFRLGYHAIPSM

SEQ ID NO: 37787 - protein, 219 aa, Artificial Sequence
  Synthetic polypeptide
PTWRNPVSTKNTKLARVMMRVCWLVRQDSRHQRIRLPHLEAVVIGRGPETKITDKKCSRQQEFEEEAKNPGLETHRKRKRSGNSDSIERDAAQEAEAGTGLEPGSNSGQCSVPLKKGKDAPIKKESLGHWSQGLKISMQDPKMQVYKDEQVVVIKDKYPKARYHWLVLPWTSISSLKAVAREHLELLKHMHTVGEKVIVDFAGSSKLRFRLGYHAIPSM

SEQ ID NO: 37788 - protein, 66 aa, Artificial Sequence
  Synthetic polypeptide
PTWRNPVSTKNTKLARVMMRVCWLVRQDSRHQRIRLPHLEAVVIGRGPETKITDKKCSRQQVESRV

SEQ ID NO: 37789 - protein, 102 aa, Artificial Sequence
  Synthetic polypeptide
PTWRNPVSTKNTKLARVMMRVCWLVRQDSRHQRIRLPHLEAVVIGRGPETKITDKKCSRQQVQLKAECNKGYVKVKQSLRKRQRTLAWKHTGRERDQATVIL

SEQ ID NO: 37790 - protein, 21 aa, Artificial Sequence
  Synthetic polypeptide
VEDRQLWSGCHIGGRHYIQSC

SEQ ID NO: 37791 - protein, 58 aa, Artificial Sequence
  Synthetic polypeptide
MRDVLWIQCCHILFSRASDSIPQICLSRRQTAVVWVPYRRETLYSIVLSSSMLAFKKP

SEQ ID NO: 37792 - protein, 14 aa, Artificial Sequence
  Synthetic polypeptide
SHSLLICEIRSNRQ

SEQ ID NO: 37793 - protein, 198 aa, Artificial Sequence
  Synthetic polypeptide
EVIGNEKHDLHVTSQQGSSEPVVQDLAQVVEEVIGVPQSFQKLIFKGKSLKEMETPLSALGIQDGCRVMLIGKKNSPQEEVELKKLKHLEKSVEKIADQLEELNKELTGIQQGFLPKDLQAEALCKLDRRVKATIEQFMKILEEIDTLILPENFKDSRLKRKGLVKKVQAFLAECDTVEQNICQETERLQSTNFALAE

SEQ ID NO: 37794 - protein, 128 aa, Artificial Sequence
  Synthetic polypeptide
EVIGNEKHDLHVTSQQGSSEPVVQDLAQVVEEVIGVPQSFQKLIFKVLQQIFIEDLLGIGHSQTPGQVSDLKSYDDGRNLTIFDEAHGQSSLARKISEGNGNTVVSTWNTRWLPGHVNWEKEQSTGRG

SEQ ID NO: 37795 - protein, 112 aa, Artificial Sequence
  Synthetic polypeptide
EVIGNEKHDLHVTSQQGSSEPVVQDLAQVVEEVIGVPQSFQKLIFKGKSLKEMETPLSALGIQDGCRVMLIGKKNSPQEEVELKKLKHLEKSVEKIADQLEELNKELTGIQQ

SEQ ID NO: 37796 - protein, 33 aa, Artificial Sequence
  Synthetic polypeptide
EVIGNEKHDLHVTSQQGSSEPVVQDLAQVVEEV

SEQ ID NO: 37797 - protein, 31 aa, Artificial Sequence
  Synthetic polypeptide
PYMYLYTGWQVLLNSIQMLLNSFLRRKKILV

SEQ ID NO: 37798 - protein, 12 aa, Artificial Sequence
  Synthetic polypeptide
HICICILGGRYF

SEQ ID NO: 37799 - protein, 1121 aa, Artificial Sequence
  Synthetic polypeptide
IYVFVYWVAGTFKFNTDAAEFIPQEKKNSGLNCGTQRRLDSNRIGRRNYSSPPPCHLSRQVPYDEISAVHQHSYHPSGSKPKSQQTSFQSSPCNKSPKSHGLQNQPWQKLRNEKHHIRVKKAQSLAEQTSDTAGLESSTRSESGTDLREHSPSESEKEVVGADPRGAKPKKATQFVYSYGRGPKVKGKLKCEWSNRTTPKPEDAGPESTKPVGVFHPDSSEASSRKGVLDGYGARRNEQRRYPQKRPPWEVEGARPRPGRNPPKQEGHRHTNAGHRNNMGPIPKDDLNERPAKSTCDSENLAVINKSSRRVDQEKCTVRRQDPQVVSPFSRGKQNHVLKNVETHTGSLIEQLTTEKYECMVCCELVRVTAPVWSCQSCYHVFHLNCIKKWARSPASQADGQSGWRCPACQNVSAHVPNTYTCFCGKVKNPEWSRNEIPHSCGEVCRKKQPGQDCPHSCNLLCHPGPCPPCPAFMTKTCECGRTRHTVRCGQAVSVHCSNPCENILNCGQHQCAELCHGGQCQPCQIILNQVCYCGSTSRDVLCGTDVGKSDGFGDFSCLKICGKDLKCGNHTCSQVCHPQPCQQCPRLPQLVRCCPCGQTPLSQLLELGSSSRKTCMDPVPSCGKVCGKPLPCGSLDFIHTCEKLCHEGDCGPCSRTSVISCRCSFRTKELPCTSLKSEDATFMCDKRCNKKRLCGRHKCNEICCVDKEHKCPLICGRKLRCGLHRCEEPCHRGNCQTCWQASFDELTCHCGASVIYPPVPCGTRPPECTQTCARVHECDHPVYHSCHSEEKCPPCTFLTQKWCMGKHEFRSNIPCHLVDISCGLPCSATLPCGMHKCQRLCHKGECLVDEPCKQPCTTPRADCGHPCMAPCHTSSPCPVTACKAKVELQCECGRRKEMVICSEASSTYQRIAAISMASKITDMQLGGSVEISKLITKKEVHQARLECDEECSALERKKRLAEAFHISEDSDPFNIRSSGSKFSDSLKEDARKDLKFVSDVEKEMETLVEAVNKGKNSKKSHSFPPMNRDHRRIIHDLAQVYGLESVSYDSEPKRNVVVTAIRGKSVCPPTTLTGVLEREMQARPPPPIPHHRHQSDKNPGSSNLQKITKEPIIDYFDVQD

SEQ ID NO: 37800 - protein, 1025 aa, Artificial Sequence
  Synthetic polypeptide
IYVFVYWVAGTFKFNTDAAEFIPQEKKNSGLNCGTQRRLDSNRIGRRNYSSPPPCHLSRQVPYDEISAVHQHSYHPSGSKPKSQQTSFQSSPCNKSPKSHGLQNQPWQKLRNEKHHIRVKKAQSLAEQTSDTAGLESSTRSESGTDLREHSPSESEKEVVGADPRGAKPKKATQFVYSYGRGPKVKGKLKCEWSNRTTPKPEDAGPESTKPVGVFHPDSSEASSRKGVLDGYGARRNEQRRYPQKRPPWEVEGARPRPGRNPPKQEGHRHTNAGHRNNMGPIPKDDLNERPAKSTCDSENLAVINKSSRRVDQEKCTVRRQDPQVVSPFSRGKQNHVLKNVETHTGSLIEQLTTEKYECMVCCELVRVTAPVWSCQSCYHVFHLNCIKKWARSPASQADGQSGWRCPACQNVSAHVPNTYTCFCGKVKNPEWSRNEIPHSCGEVCRKKQPGQDCPHSCNLLCHPGPCPPCPAFMTKTCECGRTRHTVRCGQAVSVHCSNPCENILNCGQHQCAELCHGGQCQPCQIILNQVCYCGSTSRDVLCGTDVGKSDGFGDFSCLKICGKDLKCGNHTCSQVCHPQPCQQCPRLPQLVRCCPCGQTPLSQLLELGSSSRKTCMDPVPSCGKVCGKPLPCGSLDFIHTCEKLCHEGDCGPCSRTSVISCRCSFRTKELPCTSLKSEDATFMCDKRCNKKRLCGRHKCNEICCVDKEHKCPLICGRKLRCGLHRCEEPCHRGNCQTCWQASFDELTCHCGASVIYPPVPCGTRPPECTQTCARVHECDHPVYHSCHSEEKCPPCTFLTQKWCMGKHEFRSNIPCHLVDISCGLPCSATLPCGMHKCQRLCHKGECLVDEPCKQPCTTPRADCGHPCMAPCHTSSPCPVTACKAKVELQCECGRRKEMVICSEASSTYQRIAAISMASKITDMQLGGSVEISKLITKKEVHQARLECDEECSALERKKRLAEAFHISEDSDPFNIRSSGSKFSDSLKEDARKDLKFVSDVEKEMETLVEAVNKVEVETSHWTFL

SEQ ID NO: 37801 - protein, 834 aa, Artificial Sequence
  Synthetic polypeptide
IYVFVYWVAGTFKFNTDAAEFIPQEKKNSGLNCGTQRRLDSNRIGRRNYSSPPPCHLSRQVPYDEISAVHQHSYHPSGSKPKSQQTSFQSSPCNKSPKSHGLQNQPWQKLRNEKHHIRVKKAQSLAEQTSDTAGLESSTRSESGTDLREHSPSESEKEVVGADPRGAKPKKATQFVYSYGRGPKVKGKLKCEWSNRTTPKPEDAGPESTKPVGVFHPDSSEASSRKGVLDGYGARRNEQRRYPQKRPPWEVEGARPRPGRNPPKQEGHRHTNAGHRNNMGPIPKDDLNERPAKSTCDSENLAVINKSSRRVDQEKCTVRRQDPQVVSPFSRGKQNHVLKNVETHTGSLIEQLTTEKYECMVCCELVRVTAPVWSCQSCYHVFHLNCIKKWARSPASQADGQSGWRCPACQNVSAHVPNTYTCFCGKVKNPEWSRNEIPHSCGEVCRKKQPGQDCPHSCNLLCHPGPCPPCPAFMTKTCECGRTRHTVRCGQAVSVHCSNPCENILNCGQHQCAELCHGGQCQPCQIILNQVCYCGSTSRDVLCGTDVGKSDGFGDFSCLKICGKDLKCGNHTCSQVCHPQPCQQCPRLPQLVRCCPCGQTPLSQLLELGSSSRKTCMDPVPSCGKVCGKPLPCGSLDFIHTCEKLCHEGDCGPCSRTSVISCRCSFRTKELPCTSLKSEDATFMCDKRCNKKRLCGRHKCNEICCVDKEHKCPLICGRKLRCGLHRCEEPCHRGNCQTCWQASFDELTCHCGASVIYPPVPCGTRPPECTQTCARVHECDHPVYHSCHSEEKCPPCTFLTQKWCMGKHEQSHYWASTQKKRSHYMKKIPAHACL

SEQ ID NO: 37802 - protein, 18 aa, Artificial Sequence
  Synthetic polypeptide
SQYAIAAAPPEMCYVEPM

SEQ ID NO: 37803 - protein, 29 aa, Artificial Sequence
  Synthetic polypeptide
GVLAGAGNPSMLLRQHLPRCVMWNRCRKV

SEQ ID NO: 37804 - protein, 600 aa, Artificial Sequence
  Synthetic polypeptide
ACWRAPVIPVCYCGSTSRDVLCGTDVGKSDGFGDFSCLKICGKDLKCGNHTCSQVCHPQPCQQCPRLPQLVRCCPCGQTPLSQLLELGSSSRKTCMDPVPSCGKVCGKPLPCGSLDFIHTCEKLCHEGDCGPCSRTSVISCRCSFRTKELPCTSLKSEDATFMCDKRCNKKRLCGRHKCNEICCVDKEHKCPLICGRKLRCGLHRCEEPCHRGNCQTCWQASFDELTCHCGASVIYPPVPCGTRPPECTQTCARVHECDHPVYHSCHSEEKCPPCTFLTQKWCMGKHEFRSNIPCHLVDISCGLPCSATLPCGMHKCQRLCHKGECLVDEPCKQPCTTPRADCGHPCMAPCHTSSPCPVTACKAKVELQCECGRRKEMVICSEASSTYQRIAAISMASKITDMQLGGSVEISKLITKKEVHQARLECDEECSALERKKRLAEAFHISEDSDPFNIRSSGSKFSDSLKEDARKDLKFVSDVEKEMETLVEAVNKGKNSKKSHSFPPMNRDHRRIIHDLAQVYGLESVSYDSEPKRNVVVTAIRGKSVCPPTTLTGVLEREMQARPPPPIPHHRHQSDKNPGSSNLQKITKEPIIDYFDVQD

SEQ ID NO: 37805 - protein, 504 aa, Artificial Sequence
  Synthetic polypeptide
ACWRAPVIPVCYCGSTSRDVLCGTDVGKSDGFGDFSCLKICGKDLKCGNHTCSQVCHPQPCQQCPRLPQLVRCCPCGQTPLSQLLELGSSSRKTCMDPVPSCGKVCGKPLPCGSLDFIHTCEKLCHEGDCGPCSRTSVISCRCSFRTKELPCTSLKSEDATFMCDKRCNKKRLCGRHKCNEICCVDKEHKCPLICGRKLRCGLHRCEEPCHRGNCQTCWQASFDELTCHCGASVIYPPVPCGTRPPECTQTCARVHECDHPVYHSCHSEEKCPPCTFLTQKWCMGKHEFRSNIPCHLVDISCGLPCSATLPCGMHKCQRLCHKGECLVDEPCKQPCTTPRADCGHPCMAPCHTSSPCPVTACKAKVELQCECGRRKEMVICSEASSTYQRIAAISMASKITDMQLGGSVEISKLITKKEVHQARLECDEECSALERKKRLAEAFHISEDSDPFNIRSSGSKFSDSLKEDARKDLKFVSDVEKEMETLVEAVNKVEVETSHWTFL

SEQ ID NO: 37806 - protein, 313 aa, Artificial Sequence
  Synthetic polypeptide
ACWRAPVIPVCYCGSTSRDVLCGTDVGKSDGFGDFSCLKICGKDLKCGNHTCSQVCHPQPCQQCPRLPQLVRCCPCGQTPLSQLLELGSSSRKTCMDPVPSCGKVCGKPLPCGSLDFIHTCEKLCHEGDCGPCSRTSVISCRCSFRTKELPCTSLKSEDATFMCDKRCNKKRLCGRHKCNEICCVDKEHKCPLICGRKLRCGLHRCEEPCHRGNCQTCWQASFDELTCHCGASVIYPPVPCGTRPPECTQTCARVHECDHPVYHSCHSEEKCPPCTFLTQKWCMGKHEQSHYWASTQKKRSHYMKKIPAHACL

SEQ ID NO: 37807 - protein, 320 aa, Artificial Sequence
  Synthetic polypeptide
LRNGKPNIFRSNIPCHLVDISCGLPCSATLPCGMHKCQRLCHKGECLVDEPCKQPCTTPRADCGHPCMAPCHTSSPCPVTACKAKVELQCECGRRKEMVICSEASSTYQRIAAISMASKITDMQLGGSVEISKLITKKEVHQARLECDEECSALERKKRLAEAFHISEDSDPFNIRSSGSKFSDSLKEDARKDLKFVSDVEKEMETLVEAVNKGKNSKKSHSFPPMNRDHRRIIHDLAQVYGLESVSYDSEPKRNVVVTAIRGKSVCPPTTLTGVLEREMQARPPPPIPHHRHQSDKNPGSSNLQKITKEPIIDYFDVQD

SEQ ID NO: 37808 - protein, 80 aa, Artificial Sequence
  Synthetic polypeptide
SNSGMENQTSFGATSPVTWLISLADYPAVPRYHVGCTNVRDSVTKGSVLWMSPASSPAPPPELTVVTRVWHPAIPAHPAL

SEQ ID NO: 37809 - protein, 55 aa, Artificial Sequence
  Synthetic polypeptide
RNCGVSIRTMEYYSARNEIMAFTATWMDLETIILSEVTQEWKTKHLSEQHPLSPG

SEQ ID NO: 37810 - protein, 224 aa, Artificial Sequence
  Synthetic polypeptide
LRNGKPNIFRSNIPCHLVDISCGLPCSATLPCGMHKCQRLCHKGECLVDEPCKQPCTTPRADCGHPCMAPCHTSSPCPVTACKAKVELQCECGRRKEMVICSEASSTYQRIAAISMASKITDMQLGGSVEISKLITKKEVHQARLECDEECSALERKKRLAEAFHISEDSDPFNIRSSGSKFSDSLKEDARKDLKFVSDVEKEMETLVEAVNKVEVETSHWTFL

SEQ ID NO: 37811 - protein, 23 aa, Artificial Sequence
  Synthetic polypeptide
IMRSGVRNQPGQQVSEQHPLSPG

SEQ ID NO: 37812 - protein, 323 aa, Artificial Sequence
  Synthetic polypeptide
GREFETSLANKFRSNIPCHLVDISCGLPCSATLPCGMHKCQRLCHKGECLVDEPCKQPCTTPRADCGHPCMAPCHTSSPCPVTACKAKVELQCECGRRKEMVICSEASSTYQRIAAISMASKITDMQLGGSVEISKLITKKEVHQARLECDEECSALERKKRLAEAFHISEDSDPFNIRSSGSKFSDSLKEDARKDLKFVSDVEKEMETLVEAVNKGKNSKKSHSFPPMNRDHRRIIHDLAQVYGLESVSYDSEPKRNVVVTAIRGKSVCPPTTLTGVLEREMQARPPPPIPHHRHQSDKNPGSSNLQKITKEPIIDYFDVQD

SEQ ID NO: 37813 - protein, 94 aa, Artificial Sequence
  Synthetic polypeptide
SQHFGRPRQVDYEVGSSKPAWPTSFGATSPVTWLISLADYPAVPRYHVGCTNVRDSVTKGSVLWMSPASSPAPPPELTVVTRVWHPAIPAHPAL

SEQ ID NO: 37814 - protein, 227 aa, Artificial Sequence
  Synthetic polypeptide
GREFETSLANKFRSNIPCHLVDISCGLPCSATLPCGMHKCQRLCHKGECLVDEPCKQPCTTPRADCGHPCMAPCHTSSPCPVTACKAKVELQCECGRRKEMVICSEASSTYQRIAAISMASKITDMQLGGSVEISKLITKKEVHQARLECDEECSALERKKRLAEAFHISEDSDPFNIRSSGSKFSDSLKEDARKDLKFVSDVEKEMETLVEAVNKVEVETSHWTFL

SEQ ID NO: 37815 - protein, 9 aa, Artificial Sequence
  Synthetic polypeptide
DPGTAKGAY

SEQ ID NO: 37816 - protein, 191 aa, Artificial Sequence
  Synthetic polypeptide
SGILDEILEQQKAHIKFPIDYPYSPPTFRFLTKMWHPNIYENGDVCISILHPPVDDPQSGELPSERWNPTQNVRTILLSVISLLNEPNTFSPANVDASVMFRKWRDSKGKDKEYAEIIRKQVSATKAEAEKDGVKVPTTLAEYCIKTKVPSNDNSSDLLYDDLYDDDIDDEDEEEEDADCYDDDDSGNEES

SEQ ID NO: 37817 - protein, 62 aa, Artificial Sequence
  Synthetic polypeptide
PVFFKTVKVIRTKSKKLPQSRGIYRNRKTECSLVSWMRSWNSKRRILNFLLTTPIHHLPSDS

SEQ ID NO: 37818 - protein, 130 aa, Artificial Sequence
  Synthetic polypeptide
AVILPLHWSLGAGTILLSVISLLNEPNTFSPANVDASVMFRKWRDSKGKDKEYAEIIRKQVSATKAEAEKDGVKVPTTLAEYCIKTKVPSNDNSSDLLYDDLYDDDIDDEDEEEEDADCYDDDDSGNEES

SEQ ID NO: 37819 - protein, 14 aa, Artificial Sequence
  Synthetic polypeptide
FCHCTGAWGPGLSY

SEQ ID NO: 37820 - protein, 31 aa, Artificial Sequence
  Synthetic polypeptide
AQVVKASVSCNSATALEPGGRDYPIKCNLTA

SEQ ID NO: 37821 - protein, 19 aa, Artificial Sequence
  Synthetic polypeptide
SQHFGRLRMDMVVVEVSRH

SEQ ID NO: 37822 - protein, 489 aa, Artificial Sequence
  Synthetic polypeptide
WLTPVIPTFWEAENGHGGGRSQQTLDTPKTTGPPSALPSVSSLPSTTSCTALLPSTSQHTGDLTSSPLSQLSSSLSSHQSSLSAHAALSSSTSHTHASVESASSHQSSATFSTAATSVSSSASSGASLSSSMNTANSLCLGGTPASASSSSSRAAPLVTSGKAPPNLPQGVPPLLHNQYLVGPGGLLPAYPIYGYDELQMLQSRLPVDYYGIPFAAPTALASRDGSLANNPYPGDVTKFGRGDSASPAPATTPAQPQQSQSQTHHTAQQPFVNPALPPGYSYTGLPYYTGMPSAFQYGPTMFVPPASAKQHGVNLSTPTPPFQQASGYGQHGYSTGYDDLTQGTAAGDYSKGGYAGSSQAPNKSAGSGPGKGVSVSSSTTGLPDMTGSVYNKTQTFDKQGFHAGTPPPFSLPSVLGSTGPLASGAAPGYAPPPFLHILPAHQQPHSQLLHHHLPQDAQSGSGQRSQPSSLQPKSQASKPAYGNSPYWTN

SEQ ID NO: 37823 - protein, 109 aa, Artificial Sequence
  Synthetic polypeptide
WLTPVIPTFWEAENGHGGGRSQQTLDTPKTTGPPSALPSVSSLPSTTSCTALLPSTSQHTGDLTSSPLSQLSSMPVWRAPLPTSPQPPSPRQRPPSQVPHPQAPACPVA

SEQ ID NO: 37824 - protein, 62 aa, Artificial Sequence
  Synthetic polypeptide
WLTPVIPTFWEAENGHGGGRSQQTLDSKYSSKLLLSWLVPTKQRKRIAHVMWKTPVGQWLIR

SEQ ID NO: 37825 - protein, 44 aa, Artificial Sequence
  Synthetic polypeptide
AGRGGSHLLFQHFGRPSHPSLAQDLESLHHQKWQTSPAPRFWTS

SEQ ID NO: 37826 - protein, 61 aa, Artificial Sequence
  Synthetic polypeptide
MGAVAHTCYSSTLGGRVIRPWLRIWRACTTKNGKHHQLPDFGPVESSEFGPVYHHPKYTAE

SEQ ID NO: 37827 - protein, 783 aa, Artificial Sequence
  Synthetic polypeptide
WARWLTPVIPALWEAESSVLGSGFGELAPPKMANITSSQILDQLKAPSLGQFTTTPSTQQNSTSHPTTTTSWDLKPPTSQSSVLSHLDFKSQPEPSPVLSQLSQRQQHQSQAVTVPPPGLESFPSQAKLRESTPGDSPSTVNKLLQLPSTTIENISVSVHQPQPKHIKLAKRRIPPASKIPASAVEMPGSADVTGLNVQFGALEFGSEPSLSEFGSAPSSENSNQIPISLYSKSLSEPLNTSLSMTSAVQNSTYTTSVITSCSLTSSSLNSASPVAMSSSYDQSSVHNRIPYQSPVSSSESAPGTIMNGHGGGRSQQTLDTPKTTGPPSALPSVSSLPSTTSCTALLPSTSQHTGDLTSSPLSQLSSSLSSHQSSLSAHAALSSSTSHTHASVESASSHQSSATFSTAATSVSSSASSGASLSSSMNTANSLCLGGTPASASSSSSRAAPLVTSGKAPPNLPQGVPPLLHNQYLVGPGGLLPAYPIYGYDELQMLQSRLPVDYYGIPFAAPTALASRDGSLANNPYPGDVTKFGRGDSASPAPATTPAQPQQSQSQTHHTAQQPFVNPALPPGYSYTGLPYYTGMPSAFQYGPTMFVPPASAKQHGVNLSTPTPPFQQASGYGQHGYSTGYDDLTQGTAAGDYSKGGYAGSSQAPNKSAGSGPGKGVSVSSSTTGLPDMTGSVYNKTQTFDKQGFHAGTPPPFSLPSVLGSTGPLASGAAPGYAPPPFLHILPAHQQPHSQLLHHHLPQDAQSGSGQRSQPSSLQPKSQASKPAYGNSPYWTN

SEQ ID NO: 37828 - protein, 403 aa, Artificial Sequence
  Synthetic polypeptide
WARWLTPVIPALWEAESSVLGSGFGELAPPKMANITSSQILDQLKAPSLGQFTTTPSTQQNSTSHPTTTTSWDLKPPTSQSSVLSHLDFKSQPEPSPVLSQLSQRQQHQSQAVTVPPPGLESFPSQAKLRESTPGDSPSTVNKLLQLPSTTIENISVSVHQPQPKHIKLAKRRIPPASKIPASAVEMPGSADVTGLNVQFGALEFGSEPSLSEFGSAPSSENSNQIPISLYSKSLSEPLNTSLSMTSAVQNSTYTTSVITSCSLTSSSLNSASPVAMSSSYDQSSVHNRIPYQSPVSSSESAPGTIMNGHGGGRSQQTLDTPKTTGPPSALPSVSSLPSTTSCTALLPSTSQHTGDLTSSPLSQLSSMPVWRAPLPTSPQPPSPRQRPPSQVPHPQAPACPVA

SEQ ID NO: 37829 - protein, 129 aa, Artificial Sequence
  Synthetic polypeptide
WARWLTPVIPALWEAESSVLGSGFGELAPPKMANITSSQILDQLKAPSLGQFTTTPSTQQNSTSHPTTTTSWDLKPPTSQSSVLSHLDFKSQPEPSPVLSQLSQRQQHQSQAVTVPPPGLESFPSQAKL

SEQ ID NO: 37830 - protein, 86 aa, Artificial Sequence
  Synthetic polypeptide
WARWLTPVIPALWEAESSVLGSGFGELAPPKMANITSSQILDQLKAPSLGQFTTTPSTQQNSTSHPTTTTSWDLKPPTSQSSVLSH

SEQ ID NO: 37831 - protein, 957 aa, Artificial Sequence
  Synthetic polypeptide
KILAVRNTRNFLNQIRNICKLSAGVTVNGDILNGFPLEQDKNTCGHCFHSHCTGGPSQCNKEKIKLASNTHNIAQDLSNKSSYGLKGAWKNSVEEWTTEDWTEDLSETKVFTASSAPAENHILPGQSIDLVALLQKPVPHSQASEANSFETSQQQGFGQALVFTNSQHNNQMAPGTGSSTAVNSCSPQSLSSVLGSGFGELAPPKMANITSSQILDQLKAPSLGQFTTTPSTQQNSTSHPTTTTSWDLKPPTSQSSVLSHLDFKSQPEPSPVLSQLSQRQQHQSQAVTVPPPGLESFPSQAKLRESTPGDSPSTVNKLLQLPSTTIENISVSVHQPQPKHIKLAKRRIPPASKIPASAVEMPGSADVTGLNVQFGALEFGSEPSLSEFGSAPSSENSNQIPISLYSKSLSEPLNTSLSMTSAVQNSTYTTSVITSCSLTSSSLNSASPVAMSSSYDQSSVHNRIPYQSPVSSSESAPGTIMNGHGGGRSQQTLDTPKTTGPPSALPSVSSLPSTTSCTALLPSTSQHTGDLTSSPLSQLSSSLSSHQSSLSAHAALSSSTSHTHASVESASSHQSSATFSTAATSVSSSASSGASLSSSMNTANSLCLGGTPASASSSSSRAAPLVTSGKAPPNLPQGVPPLLHNQYLVGPGGLLPAYPIYGYDELQMLQSRLPVDYYGIPFAAPTALASRDGSLANNPYPGDVTKFGRGDSASPAPATTPAQPQQSQSQTHHTAQQPFVNPALPPGYSYTGLPYYTGMPSAFQYGPTMFVPPASAKQHGVNLSTPTPPFQQASGYGQHGYSTGYDDLTQGTAAGDYSKGGYAGSSQAPNKSAGSGPGKGVSVSSSTTGLPDMTGSVYNKTQTFDKQGFHAGTPPPFSLPSVLGSTGPLASGAAPGYAPPPFLHILPAHQQPHSQLLHHHLPQDAQSGSGQRSQPSSLQPKSQASKPAYGNSPYWTN

SEQ ID NO: 37832 - protein, 41 aa, Artificial Sequence
  Synthetic polypeptide
RKNKTGIKYSQHSSGSVKQKFLWTQRGLEEFCGRVDNRRLD

SEQ ID NO: 37833 - protein, 577 aa, Artificial Sequence
  Synthetic polypeptide
KILAVRNTRNFLNQIRNICKLSAGVTVNGDILNGFPLEQDKNTCGHCFHSHCTGGPSQCNKEKIKLASNTHNIAQDLSNKSSYGLKGAWKNSVEEWTTEDWTEDLSETKVFTASSAPAENHILPGQSIDLVALLQKPVPHSQASEANSFETSQQQGFGQALVFTNSQHNNQMAPGTGSSTAVNSCSPQSLSSVLGSGFGELAPPKMANITSSQILDQLKAPSLGQFTTTPSTQQNSTSHPTTTTSWDLKPPTSQSSVLSHLDFKSQPEPSPVLSQLSQRQQHQSQAVTVPPPGLESFPSQAKLRESTPGDSPSTVNKLLQLPSTTIENISVSVHQPQPKHIKLAKRRIPPASKIPASAVEMPGSADVTGLNVQFGALEFGSEPSLSEFGSAPSSENSNQIPISLYSKSLSEPLNTSLSMTSAVQNSTYTTSVITSCSLTSSSLNSASPVAMSSSYDQSSVHNRIPYQSPVSSSESAPGTIMNGHGGGRSQQTLDTPKTTGPPSALPSVSSLPSTTSCTALLPSTSQHTGDLTSSPLSQLSSMPVWRAPLPTSPQPPSPRQRPPSQVPHPQAPACPVA

SEQ ID NO: 37834 - protein, 303 aa, Artificial Sequence
  Synthetic polypeptide
KILAVRNTRNFLNQIRNICKLSAGVTVNGDILNGFPLEQDKNTCGHCFHSHCTGGPSQCNKEKIKLASNTHNIAQDLSNKSSYGLKGAWKNSVEEWTTEDWTEDLSETKVFTASSAPAENHILPGQSIDLVALLQKPVPHSQASEANSFETSQQQGFGQALVFTNSQHNNQMAPGTGSSTAVNSCSPQSLSSVLGSGFGELAPPKMANITSSQILDQLKAPSLGQFTTTPSTQQNSTSHPTTTTSWDLKPPTSQSSVLSHLDFKSQPEPSPVLSQLSQRQQHQSQAVTVPPPGLESFPSQAKL

SEQ ID NO: 37835 - protein, 167 aa, Artificial Sequence
  Synthetic polypeptide
QLLSTKLPYCRENVCLAYGSEWSVYAVGSQAHVSFLDPRQPSYNVKSVCSRERGSGIRSVSFYEHIITVGTGQGSLLFYDIRAQRFLEERLSACYGSKPRLAGENLKLTTGKGWLNHDETWRNYFSDIDFFPNAVYTHCYDSSGTKLFVAGGPLPSGLHGNYAGLWS

SEQ ID NO: 37836 - protein, 78 aa, Artificial Sequence
  Synthetic polypeptide
APTQCHKWKISHGTPLLSDSSSPPNCHIAVRMCVWLMVVNGQFMQWAPKLMSPSWIHGSHHTTSSLSVPGSEAVESGQ

SEQ ID NO: 37837 - protein, 37 aa, Artificial Sequence
  Synthetic polypeptide
LQSPKLFEHQHNATNGKFHMGHLCFLTAPLHQTAILP

SEQ ID NO: 37838 - protein, 23 aa, Artificial Sequence
  Synthetic polypeptide
SELLRRLSLAGITRFTKGKDFLL

SEQ ID NO: 37839 - protein, 433 aa, Artificial Sequence
  Synthetic polypeptide
ATQEAEFGWDHSLHKRKRLPPVKRSLVYYLKNREVRLQNETSYSRVLHGYAAQQLPSLLKEREFHLGTLNKVFASQWLNHRQVVCGTKCNTLFVVDVQTSQITKIPILKDREPGGVTQQGCGIHAIELNPSRTLLATGGDNPNSLAIYRLPTLDPVCVGDDGHKDWIFSIAWISDTMAVSGSRDGSMGLWEVTDDVLTKSDARHNVSRVPVYAHITHKALKDIPKEDTNPDNCKVRALAFNNKNKELGAVSLDGYFHLWKAENTLSKLLSTKLPYCRENVCLAYGSEWSVYAVGSQAHVSFLDPRQPSYNVKSVCSRERGSGIRSVSFYEHIITVGTGQGSLLFYDIRAQRFLEERLSACYGSKPRLAGENLKLTTGKGWLNHDETWRNYFSDIDFFPNAVYTHCYDSSGTKLFVAGGPLPSGLHGNYAGLWS

SEQ ID NO: 37840 - protein, 225 aa, Artificial Sequence
  Synthetic polypeptide
ATQEAEFGWDHSLHKRKRLPPVKRSLVYYLKNREVRLQNETSYSRVLHGYAAQQLPSLLKEREFHLGTLNKVFASQWLNHRQVVCGTKCNTLFVVDVQTSQITKIPILKDREPGGVTQQGCGIHAIELNPSRTLLATGGDNPNSLAIYRLPTLDPVCVGDDGHKDWIFSIAWISDTMAVSGSRDGSMGLWEVTDDVLTKSDARHNVSRVPVYAHITHKALKDIPK

SEQ ID NO: 37841 - protein, 190 aa, Artificial Sequence
  Synthetic polypeptide
ATQEAEFGWDHSLHKRKRLPPVKRSLVYYLKNREVRLQNETSYSRVLHGYAAQQLPSLLKEREFHLGTLNKVFASQWLNHRQVVCGTKCNTLFVVDVQTSQITKIPILKDREPGGVTQQGCGIHAIELNPSRTLLATGGDNPNSLAIYRLPTLDPVCVGDDGHKDWIFSIAWISDTMAVSGSRDGSMGLW

SEQ ID NO: 37842 - protein, 7 aa, Artificial Sequence
  Synthetic polypeptide
KRCLHMF

SEQ ID NO: 37843 - protein, 520 aa, Artificial Sequence
  Synthetic polypeptide
SGNTFTLLWECKLVQPLWKTVWRFLKELRVELPFDPAVPLLDIYPEEKKSFEKDACTCSKWLLRSWVQIFMYDFSLEKKTIEWAEEIKKIEEAEREAECKIAEAEAKVNSKSGPEGDSKMSFSKTHSTATMPPPINPILASLQHNSILTPTRVSSSATKQKVLSPPHIKADFNLADFECEEDPFDNLELKTIDEKEELRNILVGTTGPIMAQLLDNNLPRGGSGSVLQDEEVLASLERATLDFKPLHKPNGFITLPQLGNCEKMSLSSKVSLPPIPAVSNIKSLSFPKLDSDDSNQKTAKLASTFHSTSCLRNGTFQNSLKPSTQSSASELNGHHTLGLSALNLDSGTEMPALTSSQMPSLSVLSVCTEESSPPNTGPTVTPPNFSVSQVPNMPSCPQAYSELQMLSPSERQCVETVVNMGYSYECVLRAMKKKGENIEQILDYLFAHGQLCEKGFDPLLVEEALEMHQCSEEKMMEFLQLMSKFKEMGFELKDIKEVLLLHNNDQDNALEDLMARAGAS

SEQ ID NO: 37844 - protein, 32 aa, Artificial Sequence
  Synthetic polypeptide
NYHLIQQSHYWISTQRKRSHLKKMLAHVLNGF

SEQ ID NO: 37845 - protein, 331 aa, Artificial Sequence
  Synthetic polypeptide
YKEPLQIHLRKINLISKWTEINNLIEKWTKDINIKKEIQMVLKHLKRCIPKPQVCLTTFDKFGCSQYECVPRQLACDQVQDPVCDTDHMEHNNLCTLYQRGKSLSYKGPCQPFCRATEPVCGHNGETYSSVCAAYSDRVAVDYYGDCQAVGVLSEHSSVAECASVKCPSLLAAGCKPIIPPGACCPLCAGMLRVLFDKEKLDTIAKVTNKKPITVLEILQKIRMHVSVPQCDVFGYFSIESEIVILIIPVDHYPKALQIEACNKEAEKIESLINSDSPTLASHVPLSALIISQVQVSSSVPSAGVRARPSCHSLLLPLSLGLALHLLWTYN

SEQ ID NO: 37846 - protein, 10 aa, Artificial Sequence
  Synthetic polypeptide
KGAYPNHRSA

SEQ ID NO: 37847 - protein, 16 aa, Artificial Sequence
  Synthetic polypeptide
TFEKVHTQTTGLPDDF

SEQ ID NO: 37848 - protein, 467 aa, Artificial Sequence
  Synthetic polypeptide
SGSKEMVRVMRKKGIEHHPNFRAVKHVPFDQFIQLVAHAGCMIGNSSCGVREVGAFGTPVINLGTRQIGRETGENVLHVRDADTQDKILQALHLQFGKQYPCSKIYGDGNAVPRILKFLKSIDLQEPLQKKFCFPPVKENISQDIDHILETLSALAVDLGGTNLRVAIVSMKGEIVKKYTQFNPKTYEERINLILQMCVEAAAEAVKLNCRILGVGISTGGRVNPREGIVLHSTKLIQEWNSVDLRTPLSDTLHLPVWVDNDGNCAALAERKFGQGKGLENFVTLITGTGIGGGIIHQHELIHGSSFCAAELGHLVVSLDGPDCSCGSHGCIEAYASGMALQREAKKLHDEDLLLVEGMSVPKDEAVGALHLIQAAKLGNAKAQSILRTAGTALGLGVVNILHTMNPSLVILSGVLASHYIHIVKDVIRQQALSSVQDVDVVVSDLVDPALLGAASMVLDYTTRRIY

SEQ ID NO: 37849 - protein, 54 aa, Artificial Sequence
  Synthetic polypeptide
SLSIPNQKIWNLKCSKISNFLSTNMTLKGSVYWSSWILDVQIGDADLGAKRWFE

SEQ ID NO: 37850 - protein, 35 aa, Artificial Sequence
  Synthetic polypeptide
RSKEAFIGAVGFWMFRLGMLIWEQRDGSSDAEEGH

SEQ ID NO: 37851 - protein, 393 aa, Artificial Sequence
  Synthetic polypeptide
SGSKEMVRVMRKKGIEHHPNFRAVKHVPFDQFIQLVAHAGCMIGNSSCGVREVGAFGTPVINLGTRQIGRETGENVLHVRDADTQDKILQALHLQFGKQYPCSKIYGDGNAVPRILKFLKSIDLQEPLQKKFCFPPVKENISQDIDHILETLSALAVDLGGTNLRVAIVSMKGEIVKKYTQFNPKTYEERINLILQMCVEAAAEAVKLNCRILGVGIGGGIIHQHELIHGSSFCAAELGHLVVSLDGPDCSCGSHGCIEAYASGMALQREAKKLHDEDLLLVEGMSVPKDEAVGALHLIQAAKLGNAKAQSILRTAGTALGLGVVNILHTMNPSLVILSGVLASHYIHIVKDVIRQQALSSVQDVDVVVSDLVDPALLGAASMVLDYTTRRIY

SEQ ID NO: 37852 - protein, 20 aa, Artificial Sequence
  Synthetic polypeptide
PVGMLKNALWAFVNTLFCRK

SEQ ID NO: 37853 - protein, 467 aa, Artificial Sequence
  Synthetic polypeptide
TPYFVESEDSPSPKRQRLSHSVFDYTSASPAPSPPMRPWEMTSNRQPPSVRPSQHHFSGERCNTPARNRRSPPVRRQRGRRDRLSRHNSISQDENYHHLPYAQQQAIEEPRAFHPPNVSPRLLHPAAHPPQQNAVMVDIHDQLHQGTVPVSYTVTTVAPHGIPLCTGQHIPACSTQQVPGCSVVFSGQHLPVCSVPPPMLQACSVQHLPVPYAAFPPLISSDPFLIHPPHLSPHHPPHLPPPGQFVPFQTQQSRSPLQRIENEVELLGEHLPVGGFTYPPSAHPPTLPPSAPLQFLTHDPLHQEVSFGVPYPPFMPRRLTGRSRYRSQQPIPPPPYHPSLLPYVLSMLPVPPAVGPTFSFELDVEDGEVENYEALLNLAERLGEAKPRGLTKADIEQLPSYRFNPNNHQSEQTLCVVCMCDFESRQLLRVLPCNHEFHAKCVDKWLKANRTCPICRADASEVHRDSE

SEQ ID NO: 37854 - protein, 33 aa, Artificial Sequence
  Synthetic polypeptide
PVGMLKNALWAFVNTLFCRNISRGQFSISTWPS

SEQ ID NO: 37855 - protein, 517 aa, Artificial Sequence
  Synthetic polypeptide
TPYFVEISPGANSASLPGHPNKVICERVRLQSLFPLLPSDQNTTVQEDAHFKAFFQSEDSPSPKRQRLSHSVFDYTSASPAPSPPMRPWEMTSNRQPPSVRPSQHHFSGERCNTPARNRRSPPVRRQRGRRDRLSRHNSISQDENYHHLPYAQQQAIEEPRAFHPPNVSPRLLHPAAHPPQQNAVMVDIHDQLHQGTVPVSYTVTTVAPHGIPLCTGQHIPACSTQQVPGCSVVFSGQHLPVCSVPPPMLQACSVQHLPVPYAAFPPLISSDPFLIHPPHLSPHHPPHLPPPGQFVPFQTQQSRSPLQRIENEVELLGEHLPVGGFTYPPSAHPPTLPPSAPLQFLTHDPLHQEVSFGVPYPPFMPRRLTGRSRYRSQQPIPPPPYHPSLLPYVLSMLPVPPAVGPTFSFELDVEDGEVENYEALLNLAERLGEAKPRGLTKADIEQLPSYRFNPNNHQSEQTLCVVCMCDFESRQLLRVLPCNHEFHAKCVDKWLKANRTCPICRADASEVHRDSE

SEQ ID NO: 37856 - protein, 24 aa, Artificial Sequence
  Synthetic polypeptide
APRFTSPVPWIRYLTFPTRGFLLQ

SEQ ID NO: 37857 - protein, 612 aa, Artificial Sequence
  Synthetic polypeptide
PFRPAVFFSSDLPRIKTEIEALKNLRHQHICQLYHVLETANKIFMVLEYCPGGELFDYIISQDRLSEEETRVVFRQIVSAVAYVHSQGYAHRDLKPENLLFDEYHKLKLIDFGLCAKPKGNKDYHLQTCCGSLAYAAPELIQGKSYLGSEADVWSMGILLYVLMCGFLPFDDDNVMALYKKIMRGKYDVPKWLSPSSILLLQQMLQVDPKKRISMKNLLNHPWIMQDYNYPVEWQSKNPFIHLDDDCVTELSVHHRNNRQTMEDLISLWQYDHLTATYLLLLAKKARGKPVRLRLSSFSCGQASATPFTDIKSNNWSLEDVTASDKNYVAGLIDYDWCEDDLSTGAATPRTSQFTKYWTESNGVESKSLTPALCRTPANKLKNKENVYTPKSAVKNEEYFMFPEPKTPVNKNQHKREILTTPNRYTTPSKARNQCLKETPIKIPVNSTGTDKLMTGVISPERRCRSVELDLNQAHMEETPKRKGAKVFGSLERGLDKVITVLTRSKRKGSARDGPRRLKLHYNVTTTRLVNPDQLLNEIMSILPKKHVDFVQKGYTLKCQTQSDFGKVTMQFELEVCQLQKPDVVGIRRQRLKGDAWVYKRLVEDILSSCKV

SEQ ID NO: 37858 - protein, 35 aa, Artificial Sequence
  Synthetic polypeptide
PALYQPCSLDKIFDLSDPRFSSPVICPGSKRRLRP

SEQ ID NO: 37859 - protein, 564 aa, Artificial Sequence
  Synthetic polypeptide
PFRPAVFFSSDLPRIKTEIEALKNLRHQHICQLYHVLETANKIFMVLEENLLFDEYHKLKLIDFGLCAKPKGNKDYHLQTCCGSLAYAAPELIQGKSYLGSEADVWSMGILLYVLMCGFLPFDDDNVMALYKKIMRGKYDVPKWLSPSSILLLQQMLQVDPKKRISMKNLLNHPWIMQDYNYPVEWQSKNPFIHLDDDCVTELSVHHRNNRQTMEDLISLWQYDHLTATYLLLLAKKARGKPVRLRLSSFSCGQASATPFTDIKSNNWSLEDVTASDKNYVAGLIDYDWCEDDLSTGAATPRTSQFTKYWTESNGVESKSLTPALCRTPANKLKNKENVYTPKSAVKNEEYFMFPEPKTPVNKNQHKREILTTPNRYTTPSKARNQCLKETPIKIPVNSTGTDKLMTGVISPERRCRSVELDLNQAHMEETPKRKGAKVFGSLERGLDKVITVLTRSKRKGSARDGPRRLKLHYNVTTTRLVNPDQLLNEIMSILPKKHVDFVQKGYTLKCQTQSDFGKVTMQFELEVCQLQKPDVVGIRRQRLKGDAWVYKRLVEDILSSCKV

SEQ ID NO: 37860 - protein, 541 aa, Artificial Sequence
  Synthetic polypeptide
PFRPAVFFSSDLPRIKTEIEALKNLRHQHICQLYHVLETANKIFMVLEGNKDYHLQTCCGSLAYAAPELIQGKSYLGSEADVWSMGILLYVLMCGFLPFDDDNVMALYKKIMRGKYDVPKWLSPSSILLLQQMLQVDPKKRISMKNLLNHPWIMQDYNYPVEWQSKNPFIHLDDDCVTELSVHHRNNRQTMEDLISLWQYDHLTATYLLLLAKKARGKPVRLRLSSFSCGQASATPFTDIKSNNWSLEDVTASDKNYVAGLIDYDWCEDDLSTGAATPRTSQFTKYWTESNGVESKSLTPALCRTPANKLKNKENVYTPKSAVKNEEYFMFPEPKTPVNKNQHKREILTTPNRYTTPSKARNQCLKETPIKIPVNSTGTDKLMTGVISPERRCRSVELDLNQAHMEETPKRKGAKVFGSLERGLDKVITVLTRSKRKGSARDGPRRLKLHYNVTTTRLVNPDQLLNEIMSILPKKHVDFVQKGYTLKCQTQSDFGKVTMQFELEVCQLQKPDVVGIRRQRLKGDAWVYKRLVEDILSSCKV

SEQ ID NO: 37861 - protein, 571 aa, Artificial Sequence
  Synthetic polypeptide
PFRPAVFFSSDLPRIKTEIEALKNLRHQHICQLYHVLETANKIFMVLEYCPGGELFDYIISQDRLSEEETRVVFRQIVSAVAYVHSQGYAHRDLKPENLLFDEYHKLKLIDFGLCAKPKGNKDYHLQTCCGSLAYAAPELIQGKSYLGSEADVWSMGILLYVLMCGFLPFDDDNVMALYKKIMRGKYDVPKWLSPSSILLLQQMLQVDPKKRISMKNLLNHPWIMQDYNYPVEWQSKNPFIHLDDDCVTELSVHHRNNRQTMEDLISLWQYDHLTATYLLLLAKKARGKPVRLRLSSFSCGQASATPFTDIKFTKYWTESNGVESKSLTPALCRTPANKLKNKENVYTPKSAVKNEEYFMFPEPKTPVNKNQHKREILTTPNRYTTPSKARNQCLKETPIKIPVNSTGTDKLMTGVISPERRCRSVELDLNQAHMEETPKRKGAKVFGSLERGLDKVITVLTRSKRKGSARDGPRRLKLHYNVTTTRLVNPDQLLNEIMSILPKKHVDFVQKGYTLKCQTQSDFGKVTMQFELEVCQLQKPDVVGIRRQRLKGDAWVYKRLVEDILSSCKV

SEQ ID NO: 37862 - protein, 46 aa, Artificial Sequence
  Synthetic polypeptide
SFTFISSSSTNLISFTSRLYSEFLYFSAYPLLHPGQRRRWYKLVHQ

SEQ ID NO: 37863 - protein, 376 aa, Artificial Sequence
  Synthetic polypeptide
LLLSYPVLQQILLALPPDYIQNSSTSQHTHYSTLVRGEDGINWSISDKDIEAQIANNRTPGRWTQRYYSANKNIICRNCDKRGHLSKNCPLPRKVRRCFLCSRRGHLLYSCPAPLCEYCPVPKMLDHSCLFRHSWDKQCDRCHMLGHYTDACTEIWRQYHLTTKPGPPKKPKTPSRPSALAYCYHCAQKGHYGHECPEREVYDPSPVSPFICYYDDKYEIQEREKRLKQKIKVLKKNGVIPEPSKLPYIKAANENPHHDIRKGRASWKSNRWPQENKETQKEMKNKNRNWEKHRKADRHREVDEDFPRGPKTYSSPGSFKTQKPSKPFHRSSHYHTSREDKSPKEGKRGKQKKKERCWEDDDNDNLFLIKQRKKKS

SEQ ID NO: 37864 - protein, 27 aa, Artificial Sequence
  Synthetic polypeptide
LYLQIIFRIPLLLSIPTTPPWSEEKMV

SEQ ID NO: 37865 - protein, 22 aa, Artificial Sequence
  Synthetic polypeptide
LMSSCIPHVAYFRRRWYKLVHQ

SEQ ID NO: 37866 - protein, 350 aa, Artificial Sequence
  Synthetic polypeptide
VVAFHMLHISGEDGINWSISDKDIEAQIANNRTPGRWTQRYYSANKNIICRNCDKRGHLSKNCPLPRKVRRCFLCSRRGHLLYSCPAPLCEYCPVPKMLDHSCLFRHSWDKQCDRCHMLGHYTDACTEIWRQYHLTTKPGPPKKPKTPSRPSALAYCYHCAQKGHYGHECPEREVYDPSPVSPFICYYDDKYEIQEREKRLKQKIKVLKKNGVIPEPSKLPYIKAANENPHHDIRKGRASWKSNRWPQENKETQKEMKNKNRNWEKHRKADRHREVDEDFPRGPKTYSSPGSFKTQKPSKPFHRSSHYHTSREDKSPKEGKRGKQKKKERCWEDDDNDNLFLIKQRKKKS

SEQ ID NO: 37867 - protein, 13 aa, Artificial Sequence
  Synthetic polypeptide
LHSTCCIFQEKMV

SEQ ID NO: 37868 - protein, 54 aa, Artificial Sequence
  Synthetic polypeptide
SQLLRRLMWEDCLSLGGGGCSEPKWYHCTPVLATEQDPVSKKNKKRRWYKLVHQ

SEQ ID NO: 37869 - protein, 371 aa, Artificial Sequence
  Synthetic polypeptide
AWEAEVAVSQNGTTVLQSWQQSKTLSPKKTRREDGINWSISDKDIEAQIANNRTPGRWTQRYYSANKNIICRNCDKRGHLSKNCPLPRKVRRCFLCSRRGHLLYSCPAPLCEYCPVPKMLDHSCLFRHSWDKQCDRCHMLGHYTDACTEIWRQYHLTTKPGPPKKPKTPSRPSALAYCYHCAQKGHYGHECPEREVYDPSPVSPFICYYDDKYEIQEREKRLKQKIKVLKKNGVIPEPSKLPYIKAANENPHHDIRKGRASWKSNRWPQENKETQKEMKNKNRNWEKHRKADRHREVDEDFPRGPKTYSSPGSFKTQKPSKPFHRSSHYHTSREDKSPKEGKRGKQKKKERCWEDDDNDNLFLIKQRKKKS

SEQ ID NO: 37870 - protein, 27 aa, Artificial Sequence
  Synthetic polypeptide
AKMVPLYSSLGNRARPCLQKKQEEKMV

SEQ ID NO: 37871 - protein, 55 aa, Artificial Sequence
  Synthetic polypeptide
MNSGPRSQAPLHCDTRCGARGPISKSSAPCLWASTTWLWMKSRSVGSELATPQMS

SEQ ID NO: 37872 - protein, 38 aa, Artificial Sequence
  Synthetic polypeptide
TQGQGARLHSTVTPGVGLGGQSQSHQHHVCGHRPLGFG

SEQ ID NO: 37873 - protein, 263 aa, Artificial Sequence
  Synthetic polypeptide
HQVWGSGANLKVISTMSVGIDHLALDEIKKRGIRVGYTPDVLTDTTAELAVSLLLTTCRRLPEAIEEVKNGGWTSWKPLWLCGYGLTQSTVGIIGLGRIGQAIARRLKPFGVQRFLYTGRQPRPEEAAEFQAEFVSTPELAAQSDFIVVACSLTPATEGLCNKDFFQKMKETAVFINISRGDVVNQDDLYQALASGKIAAAGLDVTSPEPLPTNHPLLTLKNCVILPHIGSATHRTRNTMSLLAANNLLAGLRGEPMPSELKL

SEQ ID NO: 37874 - protein, 293 aa, Artificial Sequence
  Synthetic polypeptide
HQVWGSGANLKVISTMSVGIDHLALDEIKKRGIRVGYTPDVLTDTTAELAVSLLLTTCRRLPEAIEEVKNGGWTSWKPLWLCGYGLTQSTVGIIGLGRIGQAIARRLKPFGVQRFLYTGRQPRPEEAAEFQAEFVSTPELAAQSDFIVVACSLTPATEGLCNKDFFQKMKETAVFINISRGDVVNQDDLYQALASGKIAAAGLDVTSPEPLPTNHPLLTLKNCGPGIQLTAWGLLQKAGLGLRRGQSGHEAAAATAASTKSKHWAAAMSYCQQEGKDAIICDVKRPCSSKQHS

SEQ ID NO: 37875 - protein, 27 aa, Artificial Sequence
  Synthetic polypeptide
IRICILTRSPAVRWSSGTRMSPSLPRS

SEQ ID NO: 37876 - protein, 5 aa, Artificial Sequence
  Synthetic polypeptide
QDPQL

SEQ ID NO: 37877 - protein, 344 aa, Artificial Sequence
  Synthetic polypeptide
QSALCGPAAAPPAAASPGNSKEMQVLWPLPNALNQNLHFNKIPSCEVEQWDSDEPIPAKELERGVAGAHGLLCLLSDHVDKRILDAAGANLKVISTMSVGIDHLALDEIKKRGIRVGYTPDVLTDTTAELAVSLLLTTCRRLPEAIEEVKNGGWTSWKPLWLCGYGLTQSTVGIIGLGRIGQAIARRLKPFGVQRFLYTGRQPRPEEAAEFQAEFVSTPELAAQSDFIVVACSLTPATEGLCNKDFFQKMKETAVFINISRGDVVNQDDLYQALASGKIAAAGLDVTSPEPLPTNHPLLTLKNCVILPHIGSATHRTRNTMSLLAANNLLAGLRGEPMPSELKL

SEQ ID NO: 37878 - protein, 374 aa, Artificial Sequence
  Synthetic polypeptide
QSALCGPAAAPPAAASPGNSKEMQVLWPLPNALNQNLHFNKIPSCEVEQWDSDEPIPAKELERGVAGAHGLLCLLSDHVDKRILDAAGANLKVISTMSVGIDHLALDEIKKRGIRVGYTPDVLTDTTAELAVSLLLTTCRRLPEAIEEVKNGGWTSWKPLWLCGYGLTQSTVGIIGLGRIGQAIARRLKPFGVQRFLYTGRQPRPEEAAEFQAEFVSTPELAAQSDFIVVACSLTPATEGLCNKDFFQKMKETAVFINISRGDVVNQDDLYQALASGKIAAAGLDVTSPEPLPTNHPLLTLKNCGPGIQLTAWGLLQKAGLGLRRGQSGHEAAAATAASTKSKHWAAAMSYCQQEGKDAIICDVKRPCSSKQHS

SEQ ID NO: 37879 - protein, 63 aa, Artificial Sequence
  Synthetic polypeptide
QNMYLYTERKSNILTTEGDISKGPGILCQDRTLANPGIHGQKPEWEKLSFRDTGHQSRDSQLA

SEQ ID NO: 37880 - protein, 69 aa, Artificial Sequence
  Synthetic polypeptide
QLKVTFQKAREYSVKTARLPIQEYMVRNQNGKNYHSEILAINQETHNWPEALKKGVSSGKGYILRNSVE

SEQ ID NO: 37881 - protein, 59 aa, Artificial Sequence
  Synthetic polypeptide
QNMYLYTERKSNILTTEGDISKGPGILCQDRTLANPGIHGQKPEWEKLSFRDTGHQSSV

SEQ ID NO: 37882 - protein, 78 aa, Artificial Sequence
  Synthetic polypeptide
QLKVTFQKAREYSVKTARLPIQEYMVRNQNGKNYHSEILAINQVFDILSTYLETHNWPEALKKGVSSGKGYILRNSVE

SEQ ID NO: 37883 - protein, 35 aa, Artificial Sequence
  Synthetic polypeptide
ACIFQGRLRSLRASRACVLASPRKTLVPHMVQNSV

SEQ ID NO: 37884 - protein, 42 aa, Artificial Sequence
  Synthetic polypeptide
YHIWCRIVFDILSTYLETHNWPEALKKGVSSGKGYILRNSVE

SEQ ID NO: 37885 - protein, 61 aa, Artificial Sequence
  Synthetic polypeptide
FLLEQYVPVKGDHVIGIVTAKSGDIFKVDVGGSEPASLSYLSFEGATKRNRPNVQAISSRL

SEQ ID NO: 37886 - protein, 5 aa, Artificial Sequence
  Synthetic polypeptide
NSMFQ

SEQ ID NO: 37887 - protein, 37 aa, Artificial Sequence
  Synthetic polypeptide
ESQRAGLGSMSGCHRELISPRTVCSSKRRPCDWHSDS

SEQ ID NO: 37888 - protein, 172 aa, Artificial Sequence
  Synthetic polypeptide
FLLEQYVPVKGDHVIGIVTAKSGDIFKVDVGGSEPASLSYLSFEGATKRNRPNVQVGDLIYGQFVVANKDMEPEMVCIDSCGRANGMGVIGQDGLLFKVTLGLIRKLLAPDCEIIQEVGKLYPLEIVFGMNGRIWVKAKTIQQTLILANILEACEHMTSDQRKQIFSRLAES

SEQ ID NO: 37889 - protein, 21 aa, Artificial Sequence
  Synthetic polypeptide
AGRSFEVCSSKRRPCDWHSDS

SEQ ID NO: 37890 - protein, 62 aa, Artificial Sequence
  Synthetic polypeptide
QEDLLRYVPVKGDHVIGIVTAKSGDIFKVDVGGSEPASLSYLSFEGATKRNRPNVQAISSRL

SEQ ID NO: 37891 - protein, 173 aa, Artificial Sequence
  Synthetic polypeptide
QEDLLRYVPVKGDHVIGIVTAKSGDIFKVDVGGSEPASLSYLSFEGATKRNRPNVQVGDLIYGQFVVANKDMEPEMVCIDSCGRANGMGVIGQDGLLFKVTLGLIRKLLAPDCEIIQEVGKLYPLEIVFGMNGRIWVKAKTIQQTLILANILEACEHMTSDQRKQIFSRLAES

SEQ ID NO: 37892 - protein, 282 aa, Artificial Sequence
  Synthetic polypeptide
AKRLLSMYTEDGCPHKKFFHTRFLMRMRLTPDCSKMLISTSSGYLLILHDLDLTKSLEVGSYPILRARRTTSSSDLTTSSSSSGPRVSGSPCHHSDSNSSEKHMSRASQREGVSPRNSLEVVTPEVLGESDHGNCITSLQLHPKGWATLLRCSSNSDDEECTCVYEFQEGAPVRPVSPRCSLRLTHYIEEANVGRGYIKELCFSPDGRMISSPHGYGIRLLGFDKQCSELVDCLPKEASPLRVIRSLYSHNDVVLTTKFSPTHCQIASGCLSGRVSLYQPKF

SEQ ID NO: 37893 - protein, 21 aa, Artificial Sequence
  Synthetic polypeptide
ACIQKMGVHIRNSFTHVFSCE

SEQ ID NO: 37894 - protein, 37 aa, Artificial Sequence
  Synthetic polypeptide
MRDILQKERIKKGILEMNEGMMSKKIVKHVYRRWVST

SEQ ID NO: 37895 - protein, 245 aa, Artificial Sequence
  Synthetic polypeptide
AKRLLSMYTEDGCPHKKFFHTRFLMRMRLTPDCSKMLISTSSGYLLILHDLDLTKSLEVGSYPILRARRTTSSSGVSPRNSLEVVTPEVLGESDHGNCITSLQLHPKGWATLLRCSSNSDDEECTCVYEFQEGAPVRPVSPRCSLRLTHYIEEANVGRGYIKELCFSPDGRMISSPHGYGIRLLGFDKQCSELVDCLPKEASPLRVIRSLYSHNDVVLTTKFSPTHCQIASGCLSGRVSLYQPKF

SEQ ID NO: 37896 - protein, 71 aa, Artificial Sequence
  Synthetic polypeptide
RLAHPFPLLLLSMLAPSCFQNTLGSLLPWPSLLICLPRKLLSGFPPCLLQMVSRSHQQRRRREPAATLQGV

SEQ ID NO: 37897 - protein, 117 aa, Artificial Sequence
  Synthetic polypeptide
FVYQESSSLASLLASCRWYHGAISRGDAENLLRLCKECSYLVRNSQTSKHDYSLSLRSNQGFMHMKLAKTKEKYVLGQNSPPFDSVPEVIHYYTTRKLPIKGAEHLSLLYPVAVRTL

SEQ ID NO: 37898 - protein, 72 aa, Artificial Sequence
  Synthetic polypeptide
LFPEYARQPSALAFAADLSTKKAPLWLPSLPPADGITEPSAEETPRTCCDSARSVATLSGTARPASMTTPSP

SEQ ID NO: 37899 - protein, 40 aa, Artificial Sequence
  Synthetic polypeptide
PDGITEPSAEETPRTCCDSARSVATLSGTARPASMTTPSP

SEQ ID NO: 37900 - protein, 37 aa, Artificial Sequence
  Synthetic polypeptide
EPVSTKKRKKNTKINQMVSRSHQQRRRREPAATLQGV

SEQ ID NO: 37901 - protein, 150 aa, Artificial Sequence
  Synthetic polypeptide
PGVVAHTCNPSTLGGRGGWITCLGVQDQPGQHSESLSLQKKEKKIQKLTRWYHGAISRGDAENLLRLCKECSYLVRNSQTSKHDYSLSLRSNQGFMHMKLAKTKEKYVLGQNSPPFDSVPEVIHYYTTRKLPIKGAEHLSLLYPVAVRTL

SEQ ID NO: 37902 - protein, 135 aa, Artificial Sequence
  Synthetic polypeptide
FHIVQDVPRPIRFIETESRRNFRGRKVSGPSIKVSSYMTPLTNLKAKVLTQTRRAQSAPDCGRASCPRMTTGPPMSTTSLGSGTGSPSQPWQHSLMATRSGSHPPHLRGTGGASFVPLEGALSLSNMGALSSAGS

SEQ ID NO: 37903 - protein, 17 aa, Artificial Sequence
  Synthetic polypeptide
RQKVEGISEAGKCPVPA

SEQ ID NO: 37904 - protein, 231 aa, Artificial Sequence
  Synthetic polypeptide
KEFQRQESVRSQHKGIQLYDTPYEPEGQSVDSDSESTVSPRLRESKLPQDDDRPADEYDQPWEWNRVTIPALAAQFNGNEKRQSSPSPSRDRRRQLRAPGGGFKPIKHGSPEFCGILGERVDPAVPLEKQIWYHGAISRGDAENLLRLCKECSYLVRNSQTSKHDYSLSLRSNQGFMHMKLAKTKEKYVLGQNSPPFDSVPEVIHYYTTRKLPIKGAEHLSLLYPVAVRTL

SEQ ID NO: 37905 - protein, 80 aa, Artificial Sequence
  Synthetic polypeptide
QMAAGAWNGPWEGALRPKLCHRWCWGNLGSCPSPLDPCFPIGKTIIGSGDRSAAFQLLWSSFLPEVFTTSPGRRWACPVK

SEQ ID NO: 37906 - protein, 63 aa, Artificial Sequence
  Synthetic polypeptide
GPSSATDGAGGIWEVALPLWTPAFPLVKQSLDQEIGRQLSSSCGRRSSPKCSQRHRGAGGPVL

SEQ ID NO: 37907 - protein, 138 aa, Artificial Sequence
  Synthetic polypeptide
NNHWIRRSVGSFPAPVVVVPPRSVHNVTGAQVGLSCEVRAVPTPVITWRKVTKSPEGTQALEELPGDHVNIAVQVRGGPSDHEATAWILINPLRKEDEGVYQCHAANMVGEAESHSTVTVLDLSKYRSFHFPAPDDRM

SEQ ID NO: 37908 - protein, 166 aa, Artificial Sequence
  Synthetic polypeptide
QMAAGAWNGPWEGALRPKLCHRWCWGNLGSCPSPLDPCFPIAPVVVVPPRSVHNVTGAQVGLSCEVRAVPTPVITWRKVTKSPEGTQALEELPGDHVNIAVQVRGGPSDHEATAWILINPLRKEDEGVYQCHAANMVGEAESHSTVTVLDLSKYRSFHFPAPDDRM

SEQ ID NO: 37909 - protein, 50 aa, Artificial Sequence
  Synthetic polypeptide
GPSSATDGAGGIWEVALPLWTPAFPLLLWSSFLPEVFTTSPGRRWACPVK

SEQ ID NO: 37910 - protein, 64 aa, Artificial Sequence
  Synthetic polypeptide
ADGSRSLERTLGGSTEAQALPQMVLGEFGKLPFPSGPLLSHCSCGRRSSPKCSQRHRGAGGPVL

SEQ ID NO: 37911 - protein, 56 aa, Artificial Sequence
  Synthetic polypeptide
VKTLWDCRCLSCSTRESHFRAGQTGPVVSGAQVSSWRERQPCSGSRGPSHILGTDA

SEQ ID NO: 37912 - protein, 113 aa, Artificial Sequence
  Synthetic polypeptide
VPFMFCSLRQKSSFWLGTQCLDNHCTLEVVNLFVFQRLRGRRDCLFSDETLGFGHLSKCWNELRPCGTVDVSAALQGSPISEQDKQARWCQEPRSPAGGNVNPAVGAGAHRTS

SEQ ID NO: 37913 - protein, 117 aa, Artificial Sequence
  Synthetic polypeptide
THQQLAPSMWESYSHSTPAPSMRAAAGTDHCKPTGGDLPKAFGAQPSHSCAVDVGQGFQKDDFGAVGLNDWPTGFWTFMYPSRTNRPGGVRSPGLQLEGTSTLQWEQGPIAHPRHRC

SEQ ID NO: 37914 - protein, 49 aa, Artificial Sequence
  Synthetic polypeptide
MTGLLGFGRSCILAGQTGPVVSGAQVSSWRERQPCSGSRGPSHILGTDA

SEQ ID NO: 37915 - protein, 55 aa, Artificial Sequence
  Synthetic polypeptide
LAYWVLDVHVSYVSAALQGSPISEQDKQARWCQEPRSPAGGNVNPAVGAGAHRTS

SEQ ID NO: 37916 - protein, 129 aa, Artificial Sequence
  Synthetic polypeptide
THQQLAPSMWESYSHSTPAPSMRAAAGTDHCKPTGGDLPKAFGAQPSHSCAVDVGQGFQKDDFGAVGLNDWPTGFWTFMYPMSQLLYKGVPFQSRTNRPGGVRSPGLQLEGTSTLQWEQGPIAHPRHRC

SEQ ID NO: 37917 - protein, 61 aa, Artificial Sequence
  Synthetic polypeptide
MTGLLGFGRSCILCLSCSTRESHFRAGQTGPVVSGAQVSSWRERQPCSGSRGPSHILGTDA

SEQ ID NO: 37918 - protein, 44 aa, Artificial Sequence
  Synthetic polypeptide
SWAPWKNLSSSTYCPSEMCWIKRWAVALCVLLCQVEPYECGGGR

SEQ ID NO: 37919 - protein, 861 aa, Artificial Sequence
  Synthetic polypeptide
AGHPGRISAPPLTALLKCAGLNDGQWHSVSFSAKWSHMNVVVDDDTAVQPLVAVLIDSGDTYYFGGCLDNSSGSGCKSPLGGFQGCLRLITIGDKAVDPILVQQGALGSFRDLQIDSCGITDRCLPSYCEHGGECSQSWDTFSCDCLGTGYTGETCHSSLYEQSCEAHKHRGNPSGLYYIDADGSGPLGPFLVYCNMTADAAWTVVQHGGPDAVTLRGAPSGHPRSAVSFAYAAGAGQLRSAVNLAERCEQRLALRCGTARRPDSRDGTPLSWWVGRTNETHTSWGGSLPDAQKCTCGLEGNCIDSQYYCNCDAGRNEWTSDTIVLSQKEHLPVTQIVMTDAGRPHSEAAYTLGPLLCRGDQSFWNSASFNTETSYLHFPAFHGELTADVCFFFKTTVSSGVFMENLGITDFIRIELRAPTEVTFSFDVGNGPCEVTVQSPTPFNDNQWHHVRAERNVKGASLQVDQLPQKMQPAPADGHVRLQLNSQLFIGGTATRQRGFLGCIRSLQLNGVALDLEERATVTPGVEPGCAGHCSTYGHLCRNGGRCREKRRGVTCDCAFSAYDGPFCSNEISAYFATGSSMTYHFQEHYTLSENSSSLVSSLHRDVTLTREMITLSFRTTRTPSLLLYVSSFYEEYLSVILANNGSLQIRYKLDRHQNPDAFTFDFKNMADGQLHQVKINREEAVVMVEVNQSTKKQVILSSGTEFNAVKSLILGKVLEAAGADPDTRRAATSGFTGCLSAVRFGRAAPLKAALRPSGPSRVTVRGHVAPMARCAAGAASGSPARELAPRLAGGAGRSGPADEGEPLVNADRRDSAVIGGVIAVVIFILLCITAIAIRIYQQRKLRKENESKVSKKEEC

SEQ ID NO: 37920 - protein, 4 aa, Artificial Sequence
  Synthetic polypeptide
NVLD

SEQ ID NO: 37921 - protein, 780 aa, Artificial Sequence
  Synthetic polypeptide
AGHPGRISAPPLTALLKCAGLNDGQWHSVSFSAKWSHMNVVVDDDTAVQPLVAVLIDSGDTYYFGGCLDNSSGSGCKSPLGGFQGCLRLITIGDKAVDPILVQQGALGSFRDLQIDSCGITDRCLPSYCEHGGECSQSWDTFSCDCLGTGYTGETCHSSLYEQSCEAHKHRGNPSGLYYIDADGSGPLGPFLVYCNMTDAAWTVVQHGGPDAVTLRGAPSGHPRSAVSFAYAAGAGQLRSAVNLAERCEQRLALRCGTARRPDSRDGTPLSWWVGRTNETHTSWGGSLPDAQKCTCGLEGNCIDSQYYCNCDAGRNEWTSDTIVLSQKEHLPVTQIVMTDAGRPHSEAAYTLGPLLCRGDQSFWNSASFNTETSYLHFPAFHGELTADVCFFFKTTVSSGVFMENLGITDFIRIELRAPTEVTFSFDVGNGPCEVTVQSPTPFNDNQWHHVRAERNVKGASLQVDQLPQKMQPAPADGHVRLQLNSQLFIEISAYFATGSSMTYHFQEHYTLSENSSSLVSSLHRDVTLTREMITLSFRTTRTPSLLLYVSSFYEEYLSVILANNGSLQIRYKLDRHQNPDAFTFDFKNMADGQLHQVKINREEAVVMVEVNQSTKKQVILSSGTEFNAVKSLILGKVLEAAGADPDTRRAATSGFTGCLSAVRFGRAAPLKAALRPSGPSRVTVRGHVAPMARCAAGAASGSPARELAPRLAGGAGRSGPADEGEPLVNADRRDSAVIGGVIAVVIFILLCITAIAIRIYQQRKLRKENESKVSKKEEC

SEQ ID NO: 37922 - protein, 700 aa, Artificial Sequence
  Synthetic polypeptide
AGHPGRISAPPLTALLKCAGLNDGQWHSVSFSAKWSHMNVVVDDDTAVQPLVAVLIDSGDTYYFGGCLDNSSGSGCKSPLGGFQGCLRLITIGDKAVDPILVQQGALGSFRDLQIDSCGITDRCLPSYCEHGGECSQSWDTFSCDCLGTGYTGETCHSSLYEQSCEAHKHRGNPSGLYYIDADGSGPLGPFLVYCNMTADAAWTVVQHGGPDAVTLRGAPSGHPRSAVSFAYAAGAGQLRSAVNLAERCEQRLALRCGTARRPDSRDGTPLSWWVGRTNETHTSWGGSLPDAQKCTCGLEGNCIDSQYYCNCDAGRNEWTSDTIVLSQKEHLPVTQIVMTDAGRPHSEAAYTLGPLLCRGDQSFWNSASFNTETSYLHFPAFHGELTADVCFFFKTTVSSGVFMENLGITDFIRIELRAPTEVTFSFDVGNGPCEVTVQSPTPFNDNQWHHVRAERNVKGASLQVDQLPQKMQPAPADGHVRLQLNSQLFIGGTATRQRGFLGCIRSLQLNGVALDLEERATVTPGVEPGCAGHCSTYGHLCRNGGRCREKRRGVTCDCAFSAYDGPFCSNEISAYFATGSSMTYHFQEHYTLSENSSSLVSSLHRDVTLTREMITLSFRTTRTPSLLLYVSSFYEEYLSVILANNGSLQIRYKLDRHQNPDAFTFDFKNMADGQLHQVKINREEAVVMVEVIPQMQKSN

SEQ ID NO: 37923 - protein, 177 aa, Artificial Sequence
  Synthetic polypeptide
AGHPGRISAPPLTALLKCAGLNDGQWHSVSFSAKWSHMNVVVDDDTAVQPLVAVLIDSGDTYYFGALYEQSCEAHKHRGNPSGLYYIDADGSGPLGPFLVYCNMTDAAWTVVQHGGPDAVTLRGAPSGHPRSAVSFAYAAGAGQLRSAVNLAERCEQRLALRCGTARRPDSRGLVTQ

SEQ ID NO: 37924 - protein, 225 aa, Artificial Sequence
  Synthetic polypeptide
AGHPGRISAPPLTALLKCAGLNDGQWHSVSFSAKWSHMNVVVDDDTAVQPLVAVLIDSGDTYYFGALYEQSCEAHKHRGNPSGLYYIDADGSGPLGPFLVYCNMTDAAWTVVQHGGPDAVTLRGAPSGHPRSAVSFAYAAGAGQLRSAVNLAERCEQRLALRCGTARRPDSRDGTPLSWWVGRTNETHTSWGGSLPDAQKCTCGLEGNCIDSQYYCNCDAGRNEW

SEQ ID NO: 37925 - protein, 318 aa, Artificial Sequence
  Synthetic polypeptide
AGHPGRISAPPLTALLKCAGLNDGQWHSVSFSAKWSHMNVVVDDDTAVQPLVAVLIDSGDTYYFGGCLDNSSGSGCKSPLGGFQGCLRLITIGDKAVDPILVQQGALGSFRDLQIDSCGITDRCLPSYCEHGGECSQSWDTFSCDCLGTGYTGETCHSSLYEQSCEAHKHRGNPSGLYYIDADGSGPLGPFLVYCNMTDAAWTVVQHGGPDAVTLRGAPSGHPRSAVSFAYAAGAGQLRSAVNLAERCEQRLALRCGTARRPDSRDGTPLSWWVGRTNETHTSWGGSLPDAQKCTCGLEGNCIDSQYYCNCDAGRNEW

SEQ ID NO: 37926 - protein, 235 aa, Artificial Sequence
  Synthetic polypeptide
GEGAVTSMFWVDAELGSDIYLDGIITIVDSKYGLKHLTEEKPDGLINEATRQVALADIILINKTDLVPEEDVKKLRTTIRSINGLGQILETQRSSLQKKLQHVPGTQPHLDQSIVTITFEVPGNAKEEHLNMFIQNLLWEKNVRNKDNHCMEVIRLKGLVSIKDKSQQVIVQGVHELYDLEETPVSWKDDTERTNRLVLIGRNLDKDILKQLFIATVTETEKQWTTHFKEDQVCT

SEQ ID NO: 37927 - protein, 254 aa, Artificial Sequence
  Synthetic polypeptide
GEGAVTSMFWVDAELGSDIYLDGIITIVDSKYGLKHLTEEKPDGLINEATRQVALADIILINKTDLVPEEDVKKLRTTIRSINGLGQILETQRSRVDLSNVLDLHAFDSLSGISLQKKLQHVPGTQPHLDQSIVTITFEVPGNAKEEHLNMFIQNLLWEKNVRNKDNHCMEVIRLKGLVSIKDKSQQVIVQGVHELYDLEETPVSWKDDTERTNRLVLIGRNLDKDILKQLFIATVTETEKQWTTHFKEDQVCT

SEQ ID NO: 37928 - protein, 21 aa, Artificial Sequence
  Synthetic polypeptide
GYPKSDRRPMRGRCSDFYVLG

SEQ ID NO: 37929 - protein, 87 aa, Artificial Sequence
  Synthetic polypeptide
ASGPLVVPQGGQKAHEGKVRHLGKSEKNKNKNVAEKQSLGPRGRKCLRISPCAGPRGPWCPSFEPRVCVWPLGVPQVGQTAHEGKVQ

SEQ ID NO: 37930 - protein, 235 aa, Artificial Sequence; identical to SEQ ID NO: 37926
  Synthetic polypeptide

SEQ ID NO: 37931 - protein, 74 aa, Artificial Sequence
  Synthetic polypeptide
GRRDEAPVAEKKKKKKKNAQRRTGAWVSQGRKCLPISHCAWPHGTWPPWFEPRVRLGPLGVPQSVQKAHEGKVQ

SEQ ID NO: 37932 - protein, 21 aa, Artificial Sequence
  Synthetic polypeptide
GYPKVCRRPMRGRCSDFYVLG

SEQ ID NO: 37933 - protein, 254 aa, Artificial Sequence; identical to SEQ ID NO: 37927
  Synthetic polypeptide

SEQ ID NO: 37934 - protein, 235 aa, Artificial Sequence; identical to SEQ ID NO: 37926
  Synthetic polypeptide

SEQ ID NO: 37935 - protein, 254 aa, Artificial Sequence; identical to SEQ ID NO: 37927
  Synthetic polypeptide

SEQ ID NO: 37936 - protein, 142 aa, Artificial Sequence
  Synthetic polypeptide
GRRDEAPVAEKKKKKKKNAQRRTGAWVSQGRKCLPISHCAWPHGTWPPWFEPRVRLGPLGVPQSVQKAHEGKVRHLGQRKKTTKNLAAEKRGLGPPNGRKCLPISPCAGPQGPWLPWFEPTVHLGPLGVPQGRQKAHEGKVQ

SEQ ID NO: 37937 - protein, 21 aa, Artificial Sequence
  Synthetic polypeptide
VYPKADRRPMRGRCSDFYVLG

SEQ ID NO: 37938 - protein, 83 aa, Artificial Sequence
  Synthetic polypeptide
MKGRLRVDGGAARWPRRGDPPRCPQRAPALGCVLRVRSGRGAAAGRGEPGGALRAAAGSALRDSAAPGLTRWNPTELVGWKNQ

SEQ ID NO: 37939 - protein, 664 aa, Artificial Sequence
  Synthetic polypeptide
KADSAWTVVRHGGPDAVTLRGAPSGHPLSAVSFAYAAGAGQLRAAVNLAERCEQRLALRCGTARRPDSRDGTPLSWWVGRTNETHTSWGGSLPDAQKCTCGLEGNCIDSQYYCNCDAGQNEWTSDTIVLSQKEHLPVTQIVMTDTGQPHSEADYTLGPLLCRGDKSFWNSASFNTETSYLHFPAFHGELTADVCFFFKTTVSSGVFMENLGITDFIRIELRAPTEVTFSFDVGNGPCEVTVQSPTPFNDNQWHHVRAERNVKGASLQVDQLPQKMQPAPADGHVRLQLNSQLFIGGTATRQRGFLGCIRSLQLNGVALDLEERATVTPGVEPGCAGHCSTYGHLCRNGGRCREKRRGVTCDCAFSAYDGPFCSNEISAYFATGSSMTYHFQEHYTLSENSSSLVSSLYRDVTLTREMITLSFRTTRSPSLLLYVSSFYEEYLSVILANNGSLQIRYKLDRHQNPDAFTFDFKNMADGQLHQVKINREEAVVMVEVNQSAKKQVILSSGTEFNAVKSLILGKVLEAAGADPDTRRAATSGFTGCLSAVRFGRAAPLKAALRPSGPSRVTVRGHVAPMARCAAGAASGSPARELAPRLAGGAGRSGPVDEGEPLVNADRRDSAVMGGVIAVVIFILLCITAIAIRIYQQRKLRKENESKVSKKEEC

SEQ ID NO: 37940 - protein, 17 aa, Artificial Sequence
  Synthetic polypeptide
ERQTPRGRWCGTVAPTR

SEQ ID NO: 37941 - protein, 76 aa, Artificial Sequence
  Synthetic polypeptide
MKGRLRVDGGAARWPRRGDPPRCPQRAPALGCVLRVRSGRGAAAGRGEPGGALRAAAGSALRDSAAPGLTRTSDTI

SEQ ID NO: 37942 - protein, 74 aa, Artificial Sequence
  Synthetic polypeptide
KADSAWTVVRHGGPDAVTLRGAPSGHPLSAVSFAYAAGAGQLRAAVNLAERCEQRLALRCGTARRPDSRGLVTQ

SEQ ID NO: 37943 - protein, 82 aa, Artificial Sequence
  Synthetic polypeptide
MKGLRVDGGAARWPRRGDPPRCPQRAPALGCVLRVRSGRGAAAGRGEPGGALRAAAGSALRDSAAPGLTRWNPTELVGWKNQ

SEQ ID NO: 37944 - protein, 663 aa, Artificial Sequence
  Synthetic polypeptide
KDSAWTVVRHGGPDAVTLRGAPSGHPLSAVSFAYAAGAGQLRAAVNLAERCEQRLALRCGTARRPDSRDGTPLSWWVGRTNETHTSWGGSLPDAQKCTCGLEGNCIDSQYYCNCDAGQNEWTSDTIVLSQKEHLPVTQIVMTDTGQPHSEADYTLGPLLCRGDKSFWNSASFNTETSYLHFPAFHGELTADVCFFFKTTVSSGVFMENLGITDFIRIELRAPTEVTFSFDVGNGPCEVTVQSPTPFNDNQWHHVRAERNVKGASLQVDQLPQKMQPAPADGHVRLQLNSQLFIGGTATRQRGFLGCIRSLQLNGVALDLEERATVTPGVEPGCAGHCSTYGHLCRNGGRCREKRRGVTCDCAFSAYDGPFCSNEISAYFATGSSMTYHFQEHYTLSENSSSLVSSLYRDVTLTREMITLSFRTTRSPSLLLYVSSFYEEYLSVILANNGSLQIRYKLDRHQNPDAFTFDFKNMADGQLHQVKINREEAVVMVEVNQSAKKQVILSSGTEFNAVKSLILGKVLEAAGADPDTRRAATSGFTGCLSAVRFGRAAPLKAALRPSGPSRVTVRGHVAPMARCAAGAASGSPARELAPRLAGGAGRSGPVDEGEPLVNADRRDSAVMGGVIAVVIFILLCITAIAIRIYQQRKLRKENESKVSKKEEC

SEQ ID NO: 37945 - protein, 16 aa, Artificial Sequence
  Synthetic polypeptide
ERTPRGRWCGTVAPTR

SEQ ID NO: 37946 - protein, 75 aa, Artificial Sequence
  Synthetic polypeptide
MKGLRVDGGAARWPRRGDPPRCPQRAPALGCVLRVRSGRGAAAGRGEPGGALRAAAGSALRDSAAPGLTRTSDTI

SEQ ID NO: 37947 - protein, 73 aa, Artificial Sequence
  Synthetic polypeptide
KDSAWTVVRHGGPDAVTLRGAPSGHPLSAVSFAYAAGAGQLRAAVNLAERCEQRLALRCGTARRPDSRGLVTQ

SEQ ID NO: 37948 - protein, 176 aa, Artificial Sequence
  Synthetic polypeptide
SELRCASFINQDKRKDTEDEDKSESFMQKYEQKIRHFGMLSRWDDSQRFLSDHPYLVCEETAKYLILWCFHLEAEKKGALMEQIAHQAVVMQFIMEMAKNCNVDPRGCFRLFFQKAKAEEEGYFEAFKNELEAFKSRVRLYSQSQSFQPMTVQNHVPHSGVGSIGLLESLPQAPRF

SEQ ID NO: 37949 - protein, 36 aa, Artificial Sequence
  Synthetic polypeptide
DVLVLLIKIKEKTQKMKINQNHLCKNMSKKSDILVC

SEQ ID NO: 37950 - protein, 205 aa, Artificial Sequence
  Synthetic polypeptide
SELRCASFINQDKRKDTEDEDKSESFMQKYEQKIRHFGMLSRWDDSQRFLSDHPYLVCEETAKYLILWCFHLEAEKKGALMEQIAHQAVVMQFIMEMAKNCNVDPRGCFRLFFQKAKAEEEGYFEAFKNELEAFKSRVRLYSQSQSFQPMTVQNHVPHSGVGSIGLLESLPQNPDYLQYSISTALCSLNSVVHKEDDEPKMMDTV

SEQ ID NO: 37951 - protein, 13 aa, Artificial Sequence
  Synthetic polypeptide
IKVFQGHFHRQKP

SEQ ID NO: 37952 - protein, 18 aa, Artificial Sequence
  Synthetic polypeptide
NYFKLRFSKDTSTGRSPR

SEQ ID NO: 37953 - protein, 10 aa, Artificial Sequence
  Synthetic polypeptide
LVDCEPFEGN

SEQ ID NO: 37954 - protein, 786 aa, Artificial Sequence
  Synthetic polypeptide
TVSLLKEIELSSLREALSFVSLIDGYYRLTADAHHYLCKEVAPPAVLENIQSNCHGPISMDFAISKLKKAGNQTGLYVLRCSPKDFNKYFLTFAVERENVIEYKHCLITKNENEEYNLSGTKKNFSSLKDLLNCYQMETVRSDNIIFQFTKCCPPKPKDKSNLLVFRTNGVSDVPTSPTLQRPTHMNQMVFHKIRNEDLIFNESLGQGTFTKIFKGVRREVGDYGQLHETEVLLKVLDKAHRNYSESFFEAASMMSKLSHKHLVLNYGVCVCGDENILVQEFVKFGSLDTYLKKNKNCINILWKLEVAKQLAWAMHFLEENTLIHGNVCAKNILLIREEDRKTGNPPFIKLSDPGISITVLPKDILQERIPWVPPECIENPKNLNLATDKWSFGTTLWEICSGGDKPLSALDSQRKLQFYEDRHQLPAPKWAELANLINNCMDYEPDFRPSFRAIIRDLNSLFTPDYELLTENDMLPNMRIGALGFSGAFEDRDPTQFEERHLKFLQQLGKGNFGSVEMCRYDPLQDNTGEVVAVKKLQHSTEEHLRDFEREIEILKSLQHDNIVKYKGVCYSAGRRNLKLIMEYLPYGSLRDYLQKHKERIDHIKLLQYTSQICKGMEYLGTKRYIHRDLATRNILVENENRVKIGDFGLTKVLPQDKEYYKVKEPGESPIFWYAPESLTESKFSVASDVWSFGVVLYELFTYIEKSKSPPAEFMRMIGNDKQGQMIVFHLIELLKNNGRLPRPDGCPDEIYMIMTECWNNNVNQRPSFRDLALRVDQIRDNMAG

SEQ ID NO: 37955 - protein, 1092 aa, Artificial Sequence
  Synthetic polypeptide
PLYPAWLQTSVFHALISQAGLRDPSWRNGTTEEKLLNRGSPQMKGTPHFKEEQCAPALNLEMRKILDLQAPIMSLQSVLEDLLVATSDGLLHLIHWEGMTNGRKAINLCTVPFSVDLQSSRVGSFLGFTDVHIRDMEYCATLDGFAVVFNDGKVGFITPVSSRFTAEQLHGVWPQDVVDGTCVAVNNKYRLMAFGCVSGSVQVYTIDNSTGAMLLSHKLELTAKQYPDIWNKTGAVKLMRWSPDNSVVIVTWEYGGLSLWSVFGAQLICTLGGDFAYRSDGTKKDPLKINSMSWGAEGYHLWVISGFGSQNTEIESDLRSVVKQPSILLFQFIKSVLTVNPCMSNQEQVLLQGEDRLYLNCGEASQTQNPRSSSTHSEHKPSREKSPFADGGLESQGLSTLLGHRHWHVVQISSTYLESNWPIRFSAIDKLGQNIAVVGKFGFAHYSLLTKKWKLFGNITQEQNMIVTGGLAWWNDFMVLACYNINDRQEELRVYLRTSNLDNAFAHVTKAQAETLLLSVFQDMVIVFRADCSICLYSIERKSDGPNTTAGIQVLQEVSMSRYIPHPFLVVSVTLTSVSTENGITLKMPQQARGAESIMLNLAGQLIMMQRDRSGPQIREKDSNPNNQRKLLPFCPPVVLAQSVENVWTTCRANKQKRHLLEALWLSCGGAGMKVWLPLFPRDHRKPHSFLSQRIMLPFHINIYPLAVLFEDALVLGAVNDTLLYDSLYTRNNAREQLEVLFPFCVVERTSQIYLHHILRQLLVRNLGEQALLLAQSCATLPYFPHVLELMLHEVLEEEATSREPIPDPLLPTVAKFITEFPLFLQTVVHCARKTEYALWNYLFAAVGNPKDLFEECLMAQDLDTAASYLIILQNMEVPAVSRQHATLLFNTALEQGKWDLCRHMIRFLKAIGSGESETPPSTPTAQEPSSSGGFEFFRNRSISLSQSAENVPASKFSLQKTLSMPSGPSGKRWSKDSDCAENMYIDMMLWRHARRLLEDVRLKDLGCFAAQLGFELISWLCKERTRAARVDNFVIALKRLHKDFLWPLPIIPASSISSPFKNGKYRTGNVDFMSLVQGELYFTPCIYTFCY

SEQ ID NO: 37956 - protein, 21 aa, Artificial Sequence
  Synthetic polypeptide
GILPGEMEPLKKNCSTEEVHK

SEQ ID NO: 37957 - protein, 17 aa, Artificial Sequence
  Synthetic polypeptide
RKTAQQRKSTNEGDTPF

SEQ ID NO: 37958 - protein, 1350 aa, Artificial Sequence
  Synthetic polypeptide
PLYPAWLQTSVFHALISQAGLRDPSWRNGTTEEKLLNRGSPQMKGTPHFKEEQCAPALNLEMRKILDLQAPIMSLQSVLEDLLVATSDGLLHLIHWEGMTNGRKAINLCTVPFSVDLQSSRVGSFLGFTDVHIRDMEYCATLDGFAVVFNDGKVGFITPVSSRFTAEQLHGVWPQDVVDGTCVAVNNKYRLMAFGCVSGSVQVYTIDNSTGAMLLSHKLELTAKQYPDIWNKTGAVKLMRWSPDNSVVIVTWEYGGLSLWSVFGAQLICTLGGDFAYRSDGTKKDPLKINSMSWGAEGYHLWVISGFGSQNTEIESDLRSVVKQPSILLFQFIKSVLTVNPCMSNQEQVLLQGEDRLYLNCGEASQTQNPRSSSTHSEHKPSREKSPFADGGLESQGLSTLLGHRHWHVVQISSTYLESNWPIRFSAIDKLGQNIAVVGKFGFAHYSLLTKKWKLFGNITQEQNMIVTGGLAWWNDFMVLACYNINDRQEELRVYLRTSNLDNAFAHVTKAQAETLLLSVFQDMVIVFRADCSICLYSIERKSDGPNTTAGIQVLQEVSMSRYIPHPFLVVSVTLTSVSTENGITLKMPQQARGAESIMLNLAGQLIMMQRDRSGPQIREKDSNPNNQRKLLPFCPPVVLAQSVENVWTTCRANKQKRHLLEALWLSCGGAGMKVWLPLFPRDHRKPHSFLSQRIMLPFHINIYPLAVLFEDALVLGAVNDTLLYDSLYTRNNAREQLEVLFPFCVVERTSQIYLHHILRQLLVRNLGEQALLLAQSCATLPYFPHVLELMLHEVLEEEATSREPIPDPLLPTVAKFITEFPLFLQTVVHCARKTEYALWNYLFAAVGNPKDLFEECLMAQDLDTAASYLIILQNMEVPAVSRQHATLLFNTALEQGKWDLCRHMIRFLKAIGSGESETPPSTPTAQEPSSSGGFEFFRNRSISLSQSAENVPASKFSLQKTLSMPSGPSGKRWSKDSDCAENMYIDMMLWRHARRLLEDVRLKDLGCFAAQLGFELISWLCKERTRAARVDNFVIALKRLHKDFLWPLPIIPASSISSPFKNGKYRTVGEQLLKSQSADPFLNLEMDAGISNIQRSQSWLSNIGPTHHEIDTASSHGPQMQDAFLSPLSNKGDECSIGSATDLTESSSMVDGDWTMVDENFSTLSLTQSELEHISMELASKGPHKSQVQLRYLLHIFMEAGCLDWCIVIGLILRESSIINQILVITQSSEVDGEMLQNIKTGLHAVDRWASTDCPGYKPFLNIIKPQLQKLSEITEEQVQPDAFQPITMGKTPEQTSPRAEESRGSSSHGSIPQGEVGSSNMVSRKEEDTAQAEEEEPFQDGTYDCSVS

SEQ ID NO: 37959 - protein, 1313 aa, Artificial Sequence
  Synthetic polypeptide
PLYPAWLQTSVFHALISQAGLRDPSWRNGTTEEKLLNRGSPQMKGTPHFKEEQCAPALNLEMRKILDLQAPIMSLQSVLEDLLVATSDGLLHLIHWEGMTNGRKAINLCTVPFSVDLQSSRVGSFLGFTDVHIRDMEYCATLDGFAVVFNDGKVGFITPVSSRFTAEQLHGVWPQDVVDGTCVAVNNKYRLMAFGCVSGSVQVYTIDNSTGAMLLSHKLELTAKQYPDIWNKTGAVKLMRWSPDNSVVIVTWEYGGLSLWSVFGAQLICTLGGDFAYRSDGTKKDPLKINSMSWGAEGYHLWVISGFGSQNTEIESDLRSVVKQPSILLFQFIKSVLTVNPCMSNQEQVLLQGEDRLYLNCGEASQTQNPRSSSTHSEHKPSREKSPFADGGLESQGLSTLLGHRHWHVVQISSTYLESNWPIREQNMIVTGGLAWWNDFMVLACYNINDRQEELRVYLRTSNLDNAFAHVTKAQAETLLLSVFQDMVIVFRADCSICLYSIERKSDGPNTTAGIQVLQEVSMSRYIPHPFLVVSVTLTSVSTENGITLKMPQQARGAESIMLNLAGQLIMMQRDRSGPQIREKDSNPNNQRKLLPFCPPVVLAQSVENVWTTCRANKQKRHLLEALWLSCGGAGMKVWLPLFPRDHRKPHSFLSQRIMLPFHINIYPLAVLFEDALVLGAVNDTLLYDSLYTRNNAREQLEVLFPFCVVERTSQIYLHHILRQLLVRNLGEQALLLAQSCATLPYFPHVLELMLHEVLEEEATSREPIPDPLLPTVAKFITEFPLFLQTVVHCARKTEYALWNYLFAAVGNPKDLFEECLMAQDLDTAASYLIILQNMEVPAVSRQHATLLFNTALEQGKWDLCRHMIRFLKAIGSGESETPPSTPTAQEPSSSGGFEFFRNRSISLSQSAENVPASKFSLQKTLSMPSGPSGKRWSKDSDCAENMYIDMMLWRHARRLLEDVRLKDLGCFAAQLGFELISWLCKERTRAARVDNFVIALKRLHKDFLWPLPIIPASSISSPFKNGKYRTVGEQLLKSQSADPFLNLEMDAGISNIQRSQSWLSNIGPTHHEIDTASSHGPQMQDAFLSPLSNKGDECSIGSATDLTESSSMVDGDWTMVDENFSTLSLTQSELEHISMELASKGPHKSQVQLRYLLHIFMEAGCLDWCIVIGLILRESSIINQILVITQSSEVDGEMLQNIKTGLHAVDRWASTDCPGYKPFLNIIKPQLQKLSEITEEQVQPDAFQPITMGKTPEQTSPRAEESRGSSSHGSIPQGEVGSSNMVSRKEEDTAQAEEEEPFQDGTYDCSVS

SEQ ID NO: 37960 - protein, 30 aa, Artificial Sequence
  Synthetic polypeptide
YSQENGQKYERAVLNSEHKHKWFCAGLYNR

SEQ ID NO: 37961 - protein, 901 aa, Artificial Sequence
  Synthetic polypeptide
IQNTNISGSVQVYTIDNSTGAMLLSHKLELTAKQYPDIWNKTGAVKLMRWSPDNSVVIVTWEYGGLSLWSVFGAQLICTLGGDFAYRSDGTKKDPLKINSMSWGAEGYHLWVISGFGSQNTEIESDLRSVVKQPSILLFQFIKSVLTVNPCMSNQEQVLLQGEDRLYLNCGEASQTQNPRSSSTHSEHKPSREKSPFADGGLESQGLSTLLGHRHWHVVQISSTYLESNWPIRFSAIDKLGQNIAVVGKFGFAHYSLLTKKWKLFGNITQEQNMIVTGGLAWWNDFMVLACYNINDRQEELRVYLRTSNLDNAFAHVTKAQAETLLLSVFQDMVIVFRADCSICLYSIERKSDGPNTTAGIQVLQEVSMSRYIPHPFLVVSVTLTSVSTENGITLKMPQQARGAESIMLNLAGQLIMMQRDRSGPQIREKDSNPNNQRKLLPFCPPVVLAQSVENVWTTCRANKQKRHLLEALWLSCGGAGMKVWLPLFPRDHRKPHSFLSQRIMLPFHINIYPLAVLFEDALVLGAVNDTLLYDSLYTRNNAREQLEVLFPFCVVERTSQIYLHHILRQLLVRNLGEQALLLAQSCATLPYFPHVLELMLHEVLEEEATSREPIPDPLLPTVAKFITEFPLFLQTVVHCARKTEYALWNYLFAAVGNPKDLFEECLMAQDLDTAASYLIILQNMEVPAVSRQHATLLFNTALEQGKWDLCRHMIRFLKAIGSGESETPPSTPTAQEPSSSGGFEFFRNRSISLSQSAENVPASKFSLQKTLSMPSGPSGKRWSKDSDCAENMYIDMMLWRHARRLLEDVRLKDLGCFAAQLGFELISWLCKERTRAARVDNFVIALKRLHKDFLWPLPIIPASSISSPFKNGKYRTGNVDFMSLVQGELYFTPCIYTFCY

SEQ ID NO: 37962 - protein, 1159 aa, Artificial Sequence
  Synthetic polypeptide
IQNTNISGSVQVYTIDNSTGAMLLSHKLELTAKQYPDIWNKTGAVKLMRWSPDNSVVIVTWEYGGLSLWSVFGAQLICTLGGDFAYRSDGTKKDPLKINSMSWGAEGYHLWVISGFGSQNTEIESDLRSVVKQPSILLFQFIKSVLTVNPCMSNQEQVLLQGEDRLYLNCGEASQTQNPRSSSTHSEHKPSREKSPFADGGLESQGLSTLLGHRHWHVVQISSTYLESNWPIRFSAIDKLGQNIAVVGKFGFAHYSLLTKKWKLFGNITQEQNMIVTGGLAWWNDFMVLACYNINDRQEELRVYLRTSNLDNAFAHVTKAQAETLLLSVFQDMVIVFRADCSICLYSIERKSDGPNTTAGIQVLQEVSMSRYIPHPFLVVSVTLTSVSTENGITLKMPQQARGAESIMLNLAGQLIMMQRDRSGPQIREKDSNPNNQRKLLPFCPPVVLAQSVENVWTTCRANKQKRHLLEALWLSCGGAGMKVWLPLFPRDHRKPHSFLSQRIMLPFHINIYPLAVLFEDALVLGAVNDTLLYDSLYTRNNAREQLEVLFPFCVVERTSQIYLHHILRQLLVRNLGEQALLLAQSCATLPYFPHVLELMLHEVLEEEATSREPIPDPLLPTVAKFITEFPLFLQTVVHCARKTEYALWNYLFAAVGNPKDLFEECLMAQDLDTAASYLIILQNMEVPAVSRQHATLLFNTALEQGKWDLCRHMIRFLKAIGSGESETPPSTPTAQEPSSSGGFEFFRNRSISLSQSAENVPASKFSLQKTLSMPSGPSGKRWSKDSDCAENMYIDMMLWRHARRLLEDVRLKDLGCFAAQLGFELISWLCKERTRAARVDNFVIALKRLHKDFLWPLPIIPASSISSPFKNGKYRTVGEQLLKSQSADPFLNLEMDAGISNIQRSQSWLSNIGPTHHEIDTASSHGPQMQDAFLSPLSNKGDECSIGSATDLTESSSMVDGDWTMVDENFSTLSLTQSELEHISMELASKGPHKSQVQLRYLLHIFMEAGCLDWCIVIGLILRESSIINQILVITQSSEVDGEMLQNIKTGLHAVDRWASTDCPGYKPFLNIIKPQLQKLSEITEEQVQPDAFQPITMGKTPEQTSPRAEESRGSSSHGSIPQGEVGSSNMVSRKEEDTAQAEEEEPFQDGTYDCSVS

SEQ ID NO: 37963 - protein, 1122 aa, Artificial Sequence
  Synthetic polypeptide
IQNTNISGSVQVYTIDNSTGAMLLSHKLELTAKQYPDIWNKTGAVKLMRWSPDNSVVIVTWEYGGLSLWSVFGAQLICTLGGDFAYRSDGTKKDPLKINSMSWGAEGYHLWVISGFGSQNTEIESDLRSVVKQPSILLFQFIKSVLTVNPCMSNQEQVLLQGEDRLYLNCGEASQTQNPRSSSTHSEHKPSREKSPFADGGLESQGLSTLLGHRHWHVVQISSTYLESNWPIREQNMIVTGGLAWWNDFMVLACYNINDRQEELRVYLRTSNLDNAFAHVTKAQAETLLLSVFQDMVIVFRADCSICLYSIERKSDGPNTTAGIQVLQEVSMSRYIPHPFLVVSVTLTSVSTENGITLKMPQQARGAESIMLNLAGQLIMMQRDRSGPQIREKDSNPNNQRKLLPFCPPVVLAQSVENVWTTCRANKQKRHLLEALWLSCGGAGMKVWLPLFPRDHRKPHSFLSQRIMLPFHINIYPLAVLFEDALVLGAVNDTLLYDSLYTRNNAREQLEVLFPFCVVERTSQIYLHHILRQLLVRNLGEQALLLAQSCATLPYFPHVLELMLHEVLEEEATSREPIPDPLLPTVAKFITEFPLFLQTVVHCARKTEYALWNYLFAAVGNPKDLFEECLMAQDLDTAASYLIILQNMEVPAVSRQHATLLFNTALEQGKWDLCRHMIRFLKAIGSGESETPPSTPTAQEPSSSGGFEFFRNRSISLSQSAENVPASKFSLQKTLSMPSGPSGKRWSKDSDCAENMYIDMMLWRHARRLLEDVRLKDLGCFAAQLGFELISWLCKERTRAARVDNFVIALKRLHKDFLWPLPIIPASSISSPFKNGKYRTVGEQLLKSQSADPFLNLEMDAGISNIQRSQSWLSNIGPTHHEIDTASSHGPQMQDAFLSPLSNKGDECSIGSATDLTESSSMVDGDWTMVDENFSTLSLTQSELEHISMELASKGPHKSQVQLRYLLHIFMEAGCLDWCIVIGLILRESSIINQILVITQSSEVDGEMLQNIKTGLHAVDRWASTDCPGYKPFLNIIKPQLQKLSEITEEQVQPDAFQPITMGKTPEQTSPRAEESRGSSSHGSIPQGEVGSSNMVSRKEEDTAQAEEEEPFQDGTYDCSVS

SEQ ID NO: 37964 - protein, 28 aa, Artificial Sequence
  Synthetic polypeptide
EHMDTGRGTTHTGACKASGAGKKRSRRS

SEQ ID NO: 37965 - protein, 1868 aa, Artificial Sequence
  Synthetic polypeptide
TPHVLTHKWELNSENTWTQGGEQHTPEPVRLREQERKEAEEASQKEIEEWERKLLAQAAPTCMETMWEIPAIGHFLCLAQQILNLPEIVFYELERCLLMPQCNAFLSKIMTSLLSPPHRRPTLHRRPTLPYRTWEAALRQKVQQWYTAVGQTENPDNCAEKLGLCPQFFKVLGEVNPLEEKPFHELPFYQKVWLLKGLCDFVYETQKEVQDAVLGQPIHECREVILGYDYLENAYVHFPQFCGADVRIYKQRPFQAPEFPIPPIKIQRVPRIKLEKLKCDYVSTSNGEHRCSRDSLPSSFKKEQENNFDPACCPAKMILDNHDISVEMGVKSNYEIRIRRPCEIKKTDCCKENLEKPRSPGEVTGFGEPLSPGEIRFIENQEKYGEASRIKIEPSPLKENTLKSCQIHVNGSHSDHPEINCHKVVRDILLEQSLQSHKKLKLTKMRAKKKKKKKKKLKDVLNENLQRKREGLHSLAFKSYKPEIQNKLLIIKKKAKHKKHKSGKKSVSKKAITKKRKTVIKSPTVPEFQLICTNLDELRELITKIENELKDLENSRKKSGKWYHRRQAVKELHSTLIRLLNELLPWEPKLMKAFQRNRSRLKKDYDDFRRQPDHDTFNRELWTTDEGEGDLGKDSPKGEISKSIDSTEPLDILEKDHFDSDDMKLSEIDFPMARSKLLKKELPSKDLPKTLLKTLKRQSKQTDYVDDSTKELSPRKKAKLSTNETTVENLESDVQIDCFSESKHTEPSFPESFASLDSVPVSTLQKGTKPIQALLAKNIGNKVTLTNQLPPSTGRNALAVEKPVLSPPEASPIKPALTCHTNTKGPLQMVYKMPCGQWLPIDLQNSSVKIQVQPMVDPKTGEKIMQQVLILPKNFVIQHKEGKAVAKEVPPLQQKGTEQHCSSFPQTTNINSSLASVFVNSPGTVSTQLPNTAFNKTITPLSNISSARPQPLSPVTSVSNLLTPSVKTSQSEAGKAKNAVSAATFSLPSASPTISSTGQPLSSTTTLNGSTNPGSSFNCFAQQTADSSEAKQELKTVCIRDSQSILVRTRGGNTGVVKVQTNPDQNSPNTVSSSSVFTFAPQLQAFLVPKSTTSSSAFSPVAGTTTTSSLSPFSQTPTSVSIPASFAPSMGKNLKLTLGHTTGSGDLGHVIDKTSHMPSSPLKSSICSSTLLPSTTSSSVSVISISAANFGQNNANIIHTPTKQQQVDYITKSYPVTRSEATAATNGDVISGTPVQKLMLVSAPSILSSGNGTAINMTPALTSTGVSAQKLVFINAPVPSGTSTPTLVAESLKQTLPPPLHKAYVKTPEQPQIVLIPSTVGTPIKINSSPAVSQIKDVKIGLNIGQAIVNTSGTVPAIPSINILQNVTPKGEDKSSKGYILPLSTSGNSVPVSSNFVSQNITPVNESVVSSARAVNVLSVTGANLSLGSFPVTSASASAGAQPPVLVSGNDTSSRIMPILSNRLCSSSLGNTVAISTVKTGHLASSVLISTTQPVVSPKCLTSALQIPVTVALPTPATTSPKIINTVPHSAAVPGATRSVSISKRQSRTSLQFHSPGISTTVPTNVNTNKPQTELSSLSTSPGKITNTSNFASLPNQQALVKTPSYSSAPGGTTIHTASAPSNVTSLVGSQFSEPCIQQKIVINTSTPLAPGTQIMINGTRFIVPPQGLGAGSHVLLISTNPKYGAPLVLNSGQGIQSTPIDNSAQKITLASNNSLSGQPLQHPLRSPTKFINSFGNASSIPTVHTSPQLINTTAKVPVPPPVPTVSLTSVIKSPATLLAKTSLVSAICPSNPPLPSSTSVFHLDPPVKKLLVSPEGAILNTINTPASKVSSLSPSLSQIVVSASRSPASVFPAFQSSGLEKPDRAAS

SEQ ID NO: 37966 - protein, 1838 aa, Artificial Sequence
  Synthetic polypeptide
TPHVLTHKWELNSENTWTQGGEQHTPEPVRLREQERKEAEEASQKEIEEWERKLLAQAAPTCMETMWEIPAIGHFLCLAQQILNLPEIVFYELERCLLMPQCNAFLSKIMTSLLSPPHRRPTLHRRPTLPYRTWEAALRQKVQQWYTAVGQTENPDNCAEKLGLCPQFFKVLGEVNPLEEKPFHELPFYQKVWLLKGLCDFVYETQKEVQDAVLGQPIHECREVILGYDYLENAYVHFPQFCGADVRIYKQRPFQAPEFPIPPIKIQRVPRIKLEKLKCDYVSTSNGEHRCSRDSLPSSFKKEQENNFDPACCPAKMILDNHDISVEMGVKSNYEIRIRRPCEIKKTDCCKENLEKPRSPGEVTGFGEPLSPGEIRFIENQEKYGEASRIKIEPSPLKENTLKSCQIHVNGSHSDHPEINCHKVVRDILLEQSLQSHKKLKLTKMRAKKKKKKKKKLKDVLNENLQRKREGLHSLAFKSYKPEIQNKLLIIKKKAKHKKHKSGKKSVSKKAITKKRKTVIKSPTVPEFQGKWYHRRQAVKELHSTLIRLLNELLPWEPKLMKAFQRNRSRLKKDYDDFRRQPDHDTFNRELWTTDEGEGDLGKDSPKGEISKSIDSTEPLDILEKDHFDSDDMKLSEIDFPMARSKLLKKELPSKDLPKTLLKTLKRQSKQTDYVDDSTKELSPRKKAKLSTNETTVENLESDVQIDCFSESKHTEPSFPESFASLDSVPVSTLQKGTKPIQALLAKNIGNKVTLTNQLPPSTGRNALAVEKPVLSPPEASPIKPALTCHTNTKGPLQMVYKMPCGQWLPIDLQNSSVKIQVQPMVDPKTGEKIMQQVLILPKNFVIQHKEGKAVAKEVPPLQQKGTEQHCSSFPQTTNINSSLASVFVNSPGTVSTQLPNTAFNKTITPLSNISSARPQPLSPVTSVSNLLTPSVKTSQSEAGKAKNAVSAATFSLPSASPTISSTGQPLSSTTTLNGSTNPGSSFNCFAQQTADSSEAKQELKTVCIRDSQSILVRTRGGNTGVVKVQTNPDQNSPNTVSSSSVFTFAPQLQAFLVPKSTTSSSAFSPVAGTTTTSSLSPFSQTPTSVSIPASFAPSMGKNLKLTLGHTTGSGDLGHVIDKTSHMPSSPLKSSICSSTLLPSTTSSSVSVISISAANFGQNNANIIHTPTKQQQVDYITKSYPVTRSEATAATNGDVISGTPVQKLMLVSAPSILSSGNGTAINMTPALTSTGVSAQKLVFINAPVPSGTSTPTLVAESLKQTLPPPLHKAYVKTPEQPQIVLIPSTVGTPIKINSSPAVSQIKDVKIGLNIGQAIVNTSGTVPAIPSINILQNVTPKGEDKSSKGYILPLSTSGNSVPVSSNFVSQNITPVNESVVSSARAVNVLSVTGANLSLGSFPVTSASASAGAQPPVLVSGNDTSSRIMPILSNRLCSSSLGNTVAISTVKTGHLASSVLISTTQPVVSPKCLTSALQIPVTVALPTPATTSPKIINTVPHSAAVPGATRSVSISKRQSRTSLQFHSPGISTTVPTNVNTNKPQTELSSLSTSPGKITNTSNFASLPNQQALVKTPSYSSAPGGTTIHTASAPSNVTSLVGSQFSEPCIQQKIVINTSTPLAPGTQIMINGTRFIVPPQGLGAGSHVLLISTNPKYGAPLVLNSGQGIQSTPIDNSAQKITLASNNSLSGQPLQHPLRSPTKFINSFGNASSIPTVHTSPQLINTTAKVPVPPPVPTVSLTSVIKSPATLLAKTSLVSAICPSNPPLPSSTSVFHLDPPVKKLLVSPEGAILNTINTPASKVSSLSPSLSQIVVSASRSPASVFPAFQSSGLEKPDRAAS

SEQ ID NO: 37967 - protein, 449 aa, Artificial Sequence
  Synthetic polypeptide
TPHVLTHKWELNSENTWTQGGEQHTPEPVRLREQERKEAEEASQKEIEEWERKLLAQAAPTCMETMWEIPAIGHFLCLAQQILNLPEIVFYELERCLLMPQCNAFLSKIMTSLLSPPHRRPTLHRRPTLPYRTWEAALRQKVQQWYTAVGQTENPDNCAEKLGLCPQFFKVLGEVNPLEEKPFHELPFYQKVWLLKGLCDFVYETQKEVQDAVLGQPIHECREVILGYDYLENAYVHFPQFCGADVRIYKQRPFQAPEFPIPPIKIQRVPRIKLEKLKCDYVSTSNGEHRCSRDSLPSSFKKEQENNFDPACCPAKMILDNHDISVEMGVKSNYEIRIRRPCEIKKTDCCKENLEKPRSPGEVTGFGEPLSPGEIRFIENQEKYGEASRIKIEPSPLKENTLKSCQIHVNGSHSDHPEINCHKVVRDILLEQSLQSHKKLKLTKMRAKK

SEQ ID NO: 37968 - protein, 25 aa, Artificial Sequence
  Synthetic polypeptide
YSWICLPLEVNFTYYRVSCFSKHIQ

SEQ ID NO: 37969 - protein, 28 aa, Artificial Sequence
  Synthetic polypeptide
SSPDASIIFLDLPASRSEFHLLQSILLL

SEQ ID NO: 37970 - protein, 27 aa, Artificial Sequence
  Synthetic polypeptide
AEITPLHSSLADRIPRKRYSRNECQGS

SEQ ID NO: 37971 - protein, 323 aa, Artificial Sequence
  Synthetic polypeptide
SQLLRRLRQENHLNPGGGSGSELRSHHCTPAWLTEYPESGTLEMNVKDLRPRARTILKWNELNVGDVVMVNYNVESPGQRGFWFDAEITTLKTISRTKKELRVKIFLGGSEGTLNDCKIISVDEIFKIERPGAHPLSFADGKFLRRNDPECDLCGGDPEKKCHSCSCRVCGGKHEPNMQLLCDECNVAYHIYCLNPPLDKVPEEEYWYCPSCKTDSSEVVKAGERLKMSKKKAKMPSASTESRRDWGRGMACVGRTRECTIVPSNHYGPIPGIPVGSTWRFRVQVSEAGVHRPHVGGIHGRSNDGAYSLVLAGGFADEVLTEL

SEQ ID NO: 37972 - protein, 8 aa, Artificial Sequence
  Synthetic polypeptide
QNTQKAVL

SEQ ID NO: 37973 - protein, 622 aa, Artificial Sequence
  Synthetic polypeptide
SQLLRRLRQENHLNPGGGSGSELRSHHCTPAWLTEYPESGTLEMNVKDLRPRARTILKWNELNVGDVVMVNYNVESPGQRGFWFDAEITTLKTISRTKKELRVKIFLGGSEGTLNDCKIISVDEIFKIERPGAHPLSFADGKFLRRNDPECDLCGGDPEKKCHSCSCRVCGGKHEPNMQLLCDECNVAYHIYCLNPPLDKVPEEEYWYCPSCKTDSSEVVKAGERLKMSKKKAKMPSASTESRRDWGRGMACVGRTRECTIVPSNHYGPIPGIPVGSTWRFRVQVSEAGVHRPHVGGIHGRSNDGAYSLVLAGGFADEVDRGDEFTYTGSGGKNLAGNKRIGAPSADQTLTNMNRALALNCDAPLDDKIGAESRNWRAGKPVRVIRSFKGRKISKYAPEEGNRYDGIYKVVKYWPEISSSHGFLVWRYLLRRDDVEPAPWTSEGIERSRRLCLRLQYPAGYPSDKEGKKPKGQSKKQPSGTTKRPISDDDCPSASKVYKASDSAEAIEAFQLTPQQQHLIREDCQNQKLWDEVLSHLVEGPNFLKKLEQSFMCVCCQELVYQPVTTECFHNVCKDCLQRSFKAQVFSCPACRHDLGQNYIMIPNEILQTLLDLFFPGYSKGR

SEQ ID NO: 37974 - protein, 44 aa, Artificial Sequence
  Synthetic polypeptide
VYSVHKVYGSIQECPRPSRSLTTHSLTHPEQLQPCKLHSWLCGS

SEQ ID NO: 37975 - protein, 177 aa, Artificial Sequence
  Synthetic polypeptide
LIQSNFSPASSIHGYVGHEFILDTRPFKKSANIEAVDVAKRLQDYGFHAPTMSWPVAGTLMVEPTESEDKAELDRFCDAMISIRQEIADIEEGRIDPRVNPLKMSPHSLTCVTSSHWDRPYSREVAAFPLPFVKPENKFWPTIARIDDIYGDQHLVCTCPPMEVYESPFSEQKRASS

SEQ ID NO: 37976 - protein, 90 aa, Artificial Sequence
  Synthetic polypeptide
TFPFTHHSLTDSSRATSALQAPFMVMWVMNLFWTRDPSKSLQILRLWMWPRDSRIMDFTPLPCPGLWQGPSWWSPLSRRTRQSWTDSVMP

SEQ ID NO: 37977 - protein, 75 aa, Artificial Sequence
  Synthetic polypeptide
ALVKNTNSGPRSRRTDHNLQGRSPGRICWTGHYPSLLKPERRGAQNGLPHSEISTWDQPSKCPHGRHEDSACGGG

SEQ ID NO: 37978 - protein, 438 aa, Artificial Sequence
  Synthetic polypeptide
SDFQKQQPPAKSPEHLLKIQTPGPAPDALIITSRGGAQGEYAGLATIRAYLNQKGEGHRTVCLIPKSAHGTNPASAHMAGMKIQPVEVDKYGNIDAVHLKAMVDKHKENLAAIMITYPSTNGVFEENISDVCDLIHQHGGQVYLDGANMNAQVGICRPGDFGSDVSHLNLHKTFCIPHGGGGPGMGPIGVKKHLAPFLPNHPVISLKRNEDACPVGTVSAAPWGSSSILPISWAYIKMMGGKGLKQATETAILNANYMAKRLETHYRILFRGARGYVGHEFILDTRPFKKSANIEAVDVAKRLQDYGFHAPTMSWPVAGTLMVEPTESEDKAELDRFCDAMISIRQEIADIEEGRIDPRVNPLKMSPHSLTCVTSSHWDRPYSREVAAFPLPFVKPENKFWPTIARIDDIYGDQHLVCTCPPMEVYESPFSEQKRASS

SEQ ID NO: 37979 - protein, 19 aa, Artificial Sequence
  Synthetic polypeptide
PPGAEPRENMLDWPLSEPT

SEQ ID NO: 37980 - protein, 52 aa, Artificial Sequence
  Synthetic polypeptide
TSLMRSDGFEKGSFPAQALFSCLLPGETCLSPSAMIVRPLQPCGTVLGRQHF

SEQ ID NO: 37981 - protein, 23 aa, Artificial Sequence
  Synthetic polypeptide
GLSSHVELCWEDNTSELYFDRAT

SEQ ID NO: 37982 - protein, 362 aa, Artificial Sequence
  Synthetic polypeptide
DMPFTFCHDCEASPAMWNCAGKTTLLNYILTEQHSKRVAVILNESGEGSALEKSLAVSQGGELYEEWLELRNGCLCCSVKDNGLRAIENLMQKKGKFDDILLETTGLADPGAVASMFWVDAELGSDIYLDGIITIVDSKYGLKHLTEEKPDGLINEATRQVALADIILINKTDLVPEEDVKKLRTTLRSINGLGQILETQRSRVDLSNVLDLHAFDSLSGISLQKKLQHVPGTQPHLDQSIVTITFDVPGNAKEEHLNMFIQNLLWEKNVRNKDNHCMEVIRLKGLVSIKDKSQQVIVQGVHELCDLEETPVSWKDDTERTNRLVLIGRNLDKDILKQLFIATVTETEKQWTTHFKEDQVCT

SEQ ID NO: 37983 - protein, 342 aa, Artificial Sequence
  Synthetic polypeptide
DMPFTFCHDCEASPAMWNCAGKTTLLNYILTEQHSKRVAVILNESGEGSALEKSLAVSQGGELYEEWLELRNGCLCCSVKDNGLRAIENLMQKKGKFDDILLETTGLADPGIITIVDSKYGLKHLTEEKPDGLINEATRQVALADIILINKTDLVPEEDVKKLRTTLRSINGLGQILETQRSRVDLSNVLDLHAFDSLSGISLQKKLQHVPGTQPHLDQSIVTITFDVPGNAKEEHLNMFIQNLLWEKNVRNKDNHCMEVIRLKGLVSIKDKSQQVIVQGVHELCDLEETPVSWKDDTERTNRLVLIGRNLDKDILKQLFIATVTETEKQWTTHFKEDQVCT

SEQ ID NO: 37984 - protein, 80 aa, Artificial Sequence
  Synthetic polypeptide
DMPFTFCHDCEASPAMWNCAGKTTLLNYILTEQHSKRVAVILNESGEGSALEKSLAVSQGGELYEEWLELRNGCLCCSVK

SEQ ID NO: 37985 - protein, 49 aa, Artificial Sequence
  Synthetic polypeptide
DMPFTFCHDCEASPAMWNCAGKTTLLNYILTEQHSKRVAVILNESGEGK

SEQ ID NO: 37986 - protein, 23 aa, Artificial Sequence
  Synthetic polypeptide
GLSSHVELCWEDNTSELYFDRAT

SEQ ID NO: 37987 - protein, 80 aa, Artificial Sequence; identical to SEQ ID NO: 37984
  Synthetic polypeptide

SEQ ID NO: 37988 - protein, 342 aa, Artificial Sequence
  Synthetic polypeptide
DMPFTFCHDCEASPAMWNCAGKTTLLNYILTEQHSKRVAVILNESGEGSALEKSLAVSQGGELYEEWLELRNGCLCCSVKDNGLRAIENLMQKKGKFDDILLETTGLADPGIITIVDSKYGLKHLTEEKPDGLINEATRQVALADIILINKTDLVPEEDVKKLRTTIRSINGLGQILETQRSRVDLSNVLDLHAFDSLSGISLQKKLQHVPGTQPHLDQSIVTITFEVPGNAKEEHLNMFIQNLLWEKNVRNKDNHCMEVIRLKGLVSIKDKSQQVIVQGVHELYDLEETPVSWKDDTERTNRLVLIGRNLDKDILKQLFIATVTETEKQWTTHFKEDQVCT

SEQ ID NO: 37989 - protein, 127 aa, Artificial Sequence
  Synthetic polypeptide
DMPFTFCHDCEASPAMWNCAGKTTLLNYILTEQHSKRVAVILNESGEGSALEKSLAVSQGGELYEEWLELRNGCLCCSVKDNGLRAIENLMQKKGKFDDILLETTGLADPGIITIVDSKYGLKVKYH

SEQ ID NO: 37990 - protein, 52 aa, Artificial Sequence
  Synthetic polypeptide
ISLMRSDGFEKGSFPAQALFSCLLPGETCLSPSAMIVRPLQPCGTVLGRQHF

SEQ ID NO: 37991 - protein, 362 aa, Artificial Sequence
  Synthetic polypeptide
DMPFTFCHDCEASPAMWNCAGKTTLLNYILTEQHSKRVAVILNESGEGSALEKSLAVSQGGELYEEWLELRNGCLCCSVKDNGLRAIENLMQKKGKFDDILLETTGLADPGAVTSMFWVDAELGSDIYLDGIITIVDSKYGLKHLTEEKPDGLINEATRQVALADIILINKTDLVPEEDVKKLRTTIRSINGLGQILETQRSRVDLSNVLDLHAFDSLSGISLQKKLQHVPGTQPHLDQSIVTITFEVPGNAKEEHLNMFIQNLLWEKNVRNKDNHCMEVIRLKGLVSIKDKSQQVIVQGVHELYDLEETPVSWKDDTERTNRLVLIGRNLDKDILKQLFIATVTETEKQWTTHFKEDQVCT

SEQ ID NO: 37992 - protein, 314 aa, Artificial Sequence
  Synthetic polypeptide
DMPFTFCHDCEASPAMWNCAGKTTLLNYILTEQHSKRVAVILNESGEGSALEKSLAVSQGGELYEEWLELRNGCLCCSVKDNGLRAIENLMQKKGKFDDILLETTGLADPGAVTSMFWVDAELGSDIYLDGIITIVDSKYGLKHLTEEKPDGLINEATRSINGLGQILETQRSSLQKKLQHVPGTQPHLDQSIVTITFEVPGNAKEEHLNMFIQNLLWEKNVRNKDNHCMEVIRLKGLVSIKDKSQQVIVQGVHELYDLEETPVSWKDDTERTNRLVLIGRNLDKDILKQLFIATVTETEKQWTTHFKEDQVCT

SEQ ID NO: 37993 - protein, 343 aa, Artificial Sequence
  Synthetic polypeptide
DMPFTFCHDCEASPAMWNCAGKTTLLNYILTEQHSKRVAVILNESGEGSALEKSLAVSQGGELYEEWLELRNGCLCCSVKDNGLRAIENLMQKKGKFDDILLETTGLADPGAVTSMFWVDAELGSDIYLDGIITIVDSKYGLKHLTEEKPDGLINEATRQVALADIILINKTDLVPEEDVKKLRTTIRSINGLGQILETQRSSLQKKLQHVPGTQPHLDQSIVTITFEVPGNAKEEHLNMFIQNLLWEKNVRNKDNHCMEVIRLKGLVSIKDKSQQVIVQGVHELYDLEETPVSWKDDTERTNRLVLIGRNLDKDILKQLFIATVTETEKQWTTHFKEDQVCT

SEQ ID NO: 37994 - protein, 149 aa, Artificial Sequence
  Synthetic polypeptide
DMPFTFCHDCEASPAMWNCAGKTTLLNYILTEQHSKRVAVILNESGEGSALEKSLAVSQGGELYEEWLELRNGCLCCSVKDNGLRAIENLMQKKGKFDDILLETTGLADPGAVTSMFWVDAELGSDIYLDGIITIVDSKYGLKAKNWTT

SEQ ID NO: 37995 - protein, 147 aa, Artificial Sequence
  Synthetic polypeptide
DMPFTFCHDCEASPAMWNCAGKTTLLNYILTEQHSKRVAVILNESGEGSALEKSLAVSQGGELYEEWLELRNGCLCCSVKDNGLRAIENLMQKKGKFDDILLETTGLADPGAVTSMFWVDAELGSDIYLDGIITIVDSKYGLKVKYH

SEQ ID NO: 37996 - protein, 18 aa, Artificial Sequence
  Synthetic polypeptide
GWARWLTPVIPALWEAKS

SEQ ID NO: 37997 - protein, 167 aa, Artificial Sequence
  Synthetic polypeptide
SQHFGRPRVDLSNVLDLHAFDSLSGISLQKKLQHVPGTQPHLDQSIVTITFEVPGNAKEEHLNMFIQNLLWEKNVRNKDNHCMEVIRLKGLVSIKDKSQQVIVQGVHELYDLEETPVSWKDDTERTNRLVLIGRNLDKDILKQLFIATVTETEKQWTTHFKEDQVCT

SEQ ID NO: 37998 - protein, 23 aa, Artificial Sequence
  Synthetic polypeptide
MGTVAHACNPSTLGGQELISLMY

SEQ ID NO: 37999 - protein, 5 aa, Artificial Sequence
  Synthetic polypeptide
AGHAL

SEQ ID NO: 38000 - protein, 6 aa, Artificial Sequence
  Synthetic polypeptide
PGTLSR

SEQ ID NO: 38001 - protein, 125 aa, Artificial Sequence
  Synthetic polypeptide
RARSLDETTYERLAEETLDSLAEFFEDLADKPYTFEDYDVSFGSGVLTVKLGGDLGTYVINKQTPNKQIWLSSPSSGPKRYDWTGKNWVYSHDGVSLHELLAAELTKALKTKLDLSSLAYSGKDA

SEQ ID NO: 38002 - protein, 86 aa, Artificial Sequence
  Synthetic polypeptide
RARSLDETTYERLAEETLDSLAEFFEDLADKPYTFEDYDVSFGSGVLTVKLGGDLGTYVINKQTPNKQIWLSSPSRLTWLLWLFHP

SEQ ID NO: 38003 - protein, 111 aa, Artificial Sequence
  Synthetic polypeptide
RARSLDETTYERLAEETLDSLAEFFEDLADKPYTFEDYDVSFGSGVLTVKLGGDLGTYVINKQTPNKQIWLSSPSRYVVDLSVMTGLGKTGCTPTTACPSMSCWPQSSLKP

SEQ ID NO: 38004 - protein, 38 aa, Artificial Sequence
  Synthetic polypeptide
PRAVAHRYRLEGVLKHGFLGPTPRVSASGSLGPQAWKS

SEQ ID NO: 38005 - protein, 54 aa, Artificial Sequence
  Synthetic polypeptide
NTDSWAPPPGFLLQAVWGPRHGRADMGTVHCDPTKGFQKRIWNCSVRRQRQPPL

SEQ ID NO: 38006 - protein, 1201 aa, Artificial Sequence
  Synthetic polypeptide
QSSGTSVSPGGRVKTRIPGPHPQGFCFRQSGAPGMEELIWEQYTVTLQKDSKRGFGIAVSGGRDNPHFENGETSIVISDVLPGGPADGLLQENDRVVMVNGTPMEDVLHSFAVQQLRKSGKVAAIVVKRPRKVQVAALQASPPLDQDDRAFEVMDEFDGRSFRSGYSERSRLNSHGGRSRSWEDSPERGRPHERARSRERDLSRDRSRGRSLERGLDQDHARTRDRSRGRSLERGLDHDFGPSRDRDRDRSRGRSIDQDYERAYHRAYDPDYERAYSPEYRRGARHDARSRGPRSRSREHPHSRSPSPEPRGRPGPIGVLLMKSRANEEYGLRLGSQIFVKEMTRTGLATKDGNLHEGDIILKINGTVTENMSLTDARKLIEKSRGKLQLVVLRDSQQTLINIPSLNDSDSEIEDISEIESNRSFSPEERRHQYSDYDYHSSSEKLKERPSSREDTPSRLSRMGATPTPFKSTGDIAGTVVPETNKEPRYQEDPPAPQPKAAPRTFLRPSPEDEAIYGPNTKMVRFKKGDSVGLRLAGGNDVGIFVAGIQEGTSAEQEGLQEGDQILKVNTQDFRGLVREDAVLYLLEIPKGEMVTILAQSRADVYRDILACGRGDSFFIRSHFECEKETPQSLAFTRGEVFRVVDTLYDGKLGNWLAVRIGNELEKGLIPNKSRAEQMASVQNAQRDNAGDRADFWRMRGQRSGVKKNLRKSREDLTAVVSVSTKFPAYERVLLREAGFKRPVVLFGPIADIAMEKLANELPDWFQTAKTEPKDAGSEKSTGVVRLNTVRQIIEQDKHALLDVTPKAVDLLNYTQWFPIVIFFNPDSRQGVKTMRQRLNPTSNKSSRKLFDQANKLKKTCAHLFTATINLNSANDSWFGSLKDTIQHQQGEAVWVSEGKMEGMDDDPEDRMSYLTAMGADYLSCDSRLISDFEDTDGEGGAYTDNELDEPAEEPLVSSITRSSEPVQHEESIRKPSPEPRAQMRRAASSDQLRDNSPPPAFKPEPPKAKTQNKEESYDFSKSYEYKSNPSAVAGNETPGASTKGYPPPVAAKPTFGRSILKPSTPIPPQEGEEVGESSEEQDNAPKSVLGKVKIFEKMDHKARLQRMQELQEAQNARIEIAQKHPDIYAVPIKTHKPDPGTPQHTSSRPPEPQKAPSRPYQDTRGSYGSDAEEEEYRQQLSEHSKRGYYGQSARYRDTEL

SEQ ID NO: 38007 - protein, 1054 aa, Artificial Sequence
  Synthetic polypeptide
QSSGTSVSPGGRVKTRIPGPHPQGFCFRQSGAPGMEELIWEQYTVTLQKDSKRGFGIAVSGGRDNPHFENGETSIVISDVLPGGPADGLLQENDRVVMVNGTPMEDVLHSFAVQQLRKSGKVAAIVVKRPRKVQVAALQASPPLDQDDRAFEVMDEFDGRSFRSGYSERSRLNSHGGRSRSWEDSPERGRPHERARSRERDLSRDRSRGRSLERGLDQDHARTRDRSRGRSLERGLDHDFGPSRDRDRDRSRGRSIDQDYERAYHRAYDPDYERAYSPEYRRGARHDARSRGPRSRSREHPHSRSPSPEPRGRPGPIGVLLMKSRANEEYGLRLGSQIFVKEMTRTGLATKDGNLHEGDIILKINGTVTENMSLTDARKLIEKSRGKLQLVVLRDSQQTLINIPSLNDSDSEIEDISEIESNRSFSPEERRHQYSDYDYHSSSEKLKERPSSREDTPSRLSRMGATPTPFKSTGDIAGTVVPETNKEPRYQEDPPAPQPKAAPRTFLRPSPEDEAIYGPNTKMVRFKKGDSVGLRLAGGNDVGIFVAGIQEGTSAEQEGLQEGDQILKVNTQDFRGLVREDAVLYLLEIPKGEMVTILAQSRADVYRDILACGRGDSFFIRSHFECEKETPQSLAFTRGEVFRVVDTLYDGKLGNWLAVRIGNELEKGLIPNKSRAEQMASVQNAQRDNAGDRADFWRMRGQRSGVKKNLRKSREDLTAVVSVSTKFPAYERVLLREAGFKRPVVLFGPIADIAMEKLANELPDWFQTAKTEPKDAGSEKSTGVVRLNTVRQIIEQDKHALLDVTPKAVDLLNYTQWFPIVIFFNPDSRQGVKTMRQRLNPTSNKSSRKLFDQANKLKKTCAHLFTATINLNSANDSWFGSLKDTIQHQQGEAVWVSEGKMEGMDDDPEDRMSYLTAMGADYLSCDSRLISDFEDTDGEGGAYTDNELDEPAEEPLVSSITRSSEPVQHEEIEIAQKHPDIYAVPIKTHKPDPGTPQHTSSRPPEPQKAPSRPYQDTRGSYGSDAEEEEYRQQLSEHSKRGYYGQSARYRDTEL

SEQ ID NO: 38008 - protein, 1004 aa, Artificial Sequence
  Synthetic polypeptide
QSSGTSVSPGGRVKTRIPGPHPQGFCFRQSGAPGMEELIWEQYTVTLQKDSKRGFGIAVSGGRDNPHFENGETSIVISDVLPGGPADGLLQENDRVVMVNGTPMEDVLHSFAVQQLRKSGKVAAIVVKRPRKVQVAALQASPPLDQDDRAFEVMDEFDGRSFRSGYSERSRLNSHGGRSRSWEDSPERGRPHERARSRERDLSRDRSRGRSLERGLDQDHARTRDRSRGRSLERGLDHDFGPSRDRDRDRSRGRSIDQDYERAYHRAYDPDYERAYSPEYRRGARHDARSRGPRSRSREHPHSRSPSPEPRGRPGPIGVLLMKSRANEEYGLRLGSQIFVKEMTRTGLATKDGNLHEGDIILKINGTVTENMSLTDARKLIEKSRGKLQLVVLRDSQQTLINIPSLNDSDSEIEDISEIESNRSFSPEERRHQYSDYDYHSSSEKLKERPSSREDTPSRLSRMGATPTPFKSTGDIAGTVVPETNKEPRYQEDPPAPQPKAAPRTFLRPSPEDEAIYGPNTKMVRFKKGDSVGLRLAGGNDVGIFVAGIQEGTSAEQEGLQEGDQILKVNTQDFRGLVREDAVLYLLEIPKGEMVTILAQSRADVYRDILACGRGDSFFIRSHFECEKETPQSLAFTRGEVFRVVDTLYDGKLGNWLAVRIGNELEKGLIPNKSRAEQMASVQNAQRDNAGDRADFWRMRGQRSGVKKNLRKSREDLTAVVSVSTKFPAYERVLLREAGFKRPVVLFGPIADIAMEKLANELPDWFQTAKTEPKDAGSEKSTGVVRLNTVRQIIEQDKHALLDVTPKAVDLLNYTQWFPIVIFFNPDSRQGVKTMRQRLNPTSNKSSRKLFDQANKLKKTCAHLFTATINLNSANDSWFGSLKDTIQHQQGEAVWVSEGKMEGMDDDPEDRMSYLTAMGADYLSCDSRLISDFEDTDGEGGAYTDNELDEPAEEPLVSSITRSSEPVQHEEVRRGRPRAGTGEPGVFLALSWTAVCSGCCGRHS

SEQ ID NO: 38009 - protein, 1164 aa, Artificial Sequence
  Synthetic polypeptide
QSSGTSVSPGGRVKTRIPGPHPQGFCFRQSGAPGMEELIWEQYTVTLQKDSKRGFGIAVSGGRDNPHFENGETSIVISDVLPGGPADGLLQENDRVVMVNGTPMEDVLHSFAVQQLRKSGKVAAIVVKRPRKVQVAALQASPPLDQDDRAFEVMDEFDGRSFRSGYSERSRLNSHGGRSRSWEDSPERGRPHERARSRERDLSRDRSRGRSLERGLDQDHARTRDRSRGRSLERGLDHDFGPSRDRDRDRSRGRSIDQDYERAYHRAYDPDYERAYSPEYRRGARHDARSRGPRSRSREHPHSRSPSPEPRGRPGPIGVLLMKSRANEEYGLRLGSQIFVKEMTRTGLATKDGNLHEGDIILKINGTVTENMSLTDARKLIEKSRGKLQLVVLRDSQQTLINIPSLNDSDSEIEDISEIESNRSFSPEERRHQYSDYDYHSSSEKLKERPSSREDTPSRLSRMGATPTPFKSTGDIAGTVVPETNKEPRYQEDPPAPQPKAAPRTFLRPSPEDEAIYGPNTKMVRFKKGDSVGLRLAGGNDVGIFVAGIQEGTSAEQEGLQEGDQILKVNTQDFRGLVREDAVLYLLEIPKGEMVTILAQSRADVYRDILACGRGDSFFIRSHFECEKETPQSLAFTRGEVFRVVDTLYDGKLGNWLAVRIGNELEKGLIPNKSRAEQMASVQNAQRDNAGDRADFWRMRGQRSGVKKNLRKSREDLTAVVSVSTKFPAYERVLLREAGFKRPVVLFGPIADIAMEKLANELPDWFQTAKTEPKDAGSEKSTGVVRLNTVRQIIEQDKHALLDVTPKAVDLLNYTQWFPIVIFFNPDSRQGVKTMRQRLNPTSNKSSRKLFDQANKLKKTCAHLFTATINLNSANDSWFGSLKDTIQHQQGEAVWVSEGKMEGMDDDPEDRMSYLTAMGADYLSCDSRLISDFEDTDGEGGAYTDNELDEPAEEPLVSSITRSSEPVQHEEAKTQNKEESYDFSKSYEYKSNPSAVAGNETPGASTKGYPPPVAAKPTFGRSILKPSTPIPPQEGEEVGESSEEQDNAPKSVLGKVKIFEKMDHKARLQRMQELQEAQNARIEIAQKHPDIYAVPIKTHKPDPGTPQHTSSRPPEPQKAPSRPYQDTRGSYGSDAEEEEYRQQLSEHSKRGYYGQSARYRDTEL

SEQ ID NO: 38010 - protein, 8 aa, Artificial Sequence
  Synthetic polypeptide
VMPQAWKS

SEQ ID NO: 38011 - protein, 38 aa, Artificial Sequence
  Synthetic polypeptide
LCPRHGRADMGTVHCDPTKGFQKRIWNCSVRRQRQPPL

SEQ ID NO: 38012 - protein, 1171 aa, Artificial Sequence
  Synthetic polypeptide
YAPGMEELIWEQYTVTLQKDSKRGFGIAVSGGRDNPHFENGETSIVISDVLPGGPADGLLQENDRVVMVNGTPMEDVLHSFAVQQLRKSGKVAAIVVKRPRKVQVAALQASPPLDQDDRAFEVMDEFDGRSFRSGYSERSRLNSHGGRSRSWEDSPERGRPHERARSRERDLSRDRSRGRSLERGLDQDHARTRDRSRGRSLERGLDHDFGPSRDRDRDRSRGRSIDQDYERAYHRAYDPDYERAYSPEYRRGARHDARSRGPRSRSREHPHSRSPSPEPRGRPGPIGVLLMKSRANEEYGLRLGSQIFVKEMTRTGLATKDGNLHEGDIILKINGTVTENMSLTDARKLIEKSRGKLQLVVLRDSQQTLINIPSLNDSDSEIEDISEIESNRSFSPEERRHQYSDYDYHSSSEKLKERPSSREDTPSRLSRMGATPTPFKSTGDIAGTVVPETNKEPRYQEDPPAPQPKAAPRTFLRPSPEDEAIYGPNTKMVRFKKGDSVGLRLAGGNDVGIFVAGIQEGTSAEQEGLQEGDQILKVNTQDFRGLVREDAVLYLLEIPKGEMVTILAQSRADVYRDILACGRGDSFFIRSHFECEKETPQSLAFTRGEVFRVVDTLYDGKLGNWLAVRIGNELEKGLIPNKSRAEQMASVQNAQRDNAGDRADFWRMRGQRSGVKKNLRKSREDLTAVVSVSTKFPAYERVLLREAGFKRPVVLFGPIADIAMEKLANELPDWFQTAKTEPKDAGSEKSTGVVRLNTVRQIIEQDKHALLDVTPKAVDLLNYTQWFPIVIFFNPDSRQGVKTMRQRLNPTSNKSSRKLFDQANKLKKTCAHLFTATINLNSANDSWFGSLKDTIQHQQGEAVWVSEGKMEGMDDDPEDRMSYLTAMGADYLSCDSRLISDFEDTDGEGGAYTDNELDEPAEEPLVSSITRSSEPVQHEESIRKPSPEPRAQMRRAASSDQLRDNSPPPAFKPEPPKAKTQNKEESYDFSKSYEYKSNPSAVAGNETPGASTKGYPPPVAAKPTFGRSILKPSTPIPPQEGEEVGESSEEQDNAPKSVLGKVKIFEKMDHKARLQRMQELQEAQNARIEIAQKHPDIYAVPIKTHKPDPGTPQHTSSRPPEPQKAPSRPYQDTRGSYGSDAEEEEYRQQLSEHSKRGYYGQSARYRDTEL

SEQ ID NO: 38013 - protein, 1024 aa, Artificial Sequence
  Synthetic polypeptide
YAPGMEELIWEQYTVTLQKDSKRGFGIAVSGGRDNPHFENGETSIVISDVLPGGPADGLLQENDRVVMVNGTPMEDVLHSFAVQQLRKSGKVAAIVVKRPRKVQVAALQASPPLDQDDRAFEVMDEFDGRSFRSGYSERSRLNSHGGRSRSWEDSPERGRPHERARSRERDLSRDRSRGRSLERGLDQDHARTRDRSRGRSLERGLDHDFGPSRDRDRDRSRGRSIDQDYERAYHRAYDPDYERAYSPEYRRGARHDARSRGPRSRSREHPHSRSPSPEPRGRPGPIGVLLMKSRANEEYGLRLGSQIFVKEMTRTGLATKDGNLHEGDIILKINGTVTENMSLTDARKLIEKSRGKLQLVVLRDSQQTLINIPSLNDSDSEIEDISEIESNRSFSPEERRHQYSDYDYHSSSEKLKERPSSREDTPSRLSRMGATPTPFKSTGDIAGTVVPETNKEPRYQEDPPAPQPKAAPRTFLRPSPEDEAIYGPNTKMVRFKKGDSVGLRLAGGNDVGIFVAGIQEGTSAEQEGLQEGDQILKVNTQDFRGLVREDAVLYLLEIPKGEMVTILAQSRADVYRDILACGRGDSFFIRSHFECEKETPQSLAFTRGEVFRVVDTLYDGKLGNWLAVRIGNELEKGLIPNKSRAEQMASVQNAQRDNAGDRADFWRMRGQRSGVKKNLRKSREDLTAVVSVSTKFPAYERVLLREAGFKRPVVLFGPIADIAMEKLANELPDWFQTAKTEPKDAGSEKSTGVVRLNTVRQIIEQDKHALLDVTPKAVDLLNYTQWFPIVIFFNPDSRQGVKTMRQRLNPTSNKSSRKLFDQANKLKKTCAHLFTATINLNSANDSWFGSLKDTIQHQQGEAVWVSEGKMEGMDDDPEDRMSYLTAMGADYLSCDSRLISDFEDTDGEGGAYTDNELDEPAEEPLVSSITRSSEPVQHEEIEIAQKHPDIYAVPIKTHKPDPGTPQHTSSRPPEPQKAPSRPYQDTRGSYGSDAEEEEYRQQLSEHSKRGYYGQSARYRDTEL

SEQ ID NO: 38014 - protein, 974 aa, Artificial Sequence
  Synthetic polypeptide
YAPGMEELIWEQYTVTLQKDSKRGFGIAVSGGRDNPHFENGETSIVISDVLPGGPADGLLQENDRVVMVNGTPMEDVLHSFAVQQLRKSGKVAAIVVKRPRKVQVAALQASPPLDQDDRAFEVMDEFDGRSFRSGYSERSRLNSHGGRSRSWEDSPERGRPHERARSRERDLSRDRSRGRSLERGLDQDHARTRDRSRGRSLERGLDHDFGPSRDRDRDRSRGRSIDQDYERAYHRAYDPDYERAYSPEYRRGARHDARSRGPRSRSREHPHSRSPSPEPRGRPGPIGVLLMKSRANEEYGLRLGSQIFVKEMTRTGLATKDGNLHEGDIILKINGTVTENMSLTDARKLIEKSRGKLQLVVLRDSQQTLINIPSLNDSDSEIEDISEIESNRSFSPEERRHQYSDYDYHSSSEKLKERPSSREDTPSRLSRMGATPTPFKSTGDIAGTVVPETNKEPRYQEDPPAPQPKAAPRTFLRPSPEDEAIYGPNTKMVRFKKGDSVGLRLAGGNDVGIFVAGIQEGTSAEQEGLQEGDQILKVNTQDFRGLVREDAVLYLLEIPKGEMVTILAQSRADVYRDILACGRGDSFFIRSHFECEKETPQSLAFTRGEVFRVVDTLYDGKLGNWLAVRIGNELEKGLIPNKSRAEQMASVQNAQRDNAGDRADFWRMRGQRSGVKKNLRKSREDLTAVVSVSTKFPAYERVLLREAGFKRPVVLFGPIADIAMEKLANELPDWFQTAKTEPKDAGSEKSTGVVRLNTVRQIIEQDKHALLDVTPKAVDLLNYTQWFPIVIFFNPDSRQGVKTMRQRLNPTSNKSSRKLFDQANKLKKTCAHLFTATINLNSANDSWFGSLKDTIQHQQGEAVWVSEGKMEGMDDDPEDRMSYLTAMGADYLSCDSRLISDFEDTDGEGGAYTDNELDEPAEEPLVSSITRSSEPVQHEEVRRGRPRAGTGEPGVFLALSWTAVCSGCCGRHS

SEQ ID NO: 38015 - protein, 1134 aa, Artificial Sequence
  Synthetic polypeptide
YAPGMEELIWEQYTVTLQKDSKRGFGIAVSGGRDNPHFENGETSIVISDVLPGGPADGLLQENDRVVMVNGTPMEDVLHSFAVQQLRKSGKVAAIVVKRPRKVQVAALQASPPLDQDDRAFEVMDEFDGRSFRSGYSERSRLNSHGGRSRSWEDSPERGRPHERARSRERDLSRDRSRGRSLERGLDQDHARTRDRSRGRSLERGLDHDFGPSRDRDRDRSRGRSIDQDYERAYHRAYDPDYERAYSPEYRRGARHDARSRGPRSRSREHPHSRSPSPEPRGRPGPIGVLLMKSRANEEYGLRLGSQIFVKEMTRTGLATKDGNLHEGDIILKINGTVTENMSLTDARKLIEKSRGKLQLVVLRDSQQTLINIPSLNDSDSEIEDISEIESNRSFSPEERRHQYSDYDYHSSSEKLKERPSSREDTPSRLSRMGATPTPFKSTGDIAGTVVPETNKEPRYQEDPPAPQPKAAPRTFLRPSPEDEAIYGPNTKMVRFKKGDSVGLRLAGGNDVGIFVAGIQEGTSAEQEGLQEGDQILKVNTQDFRGLVREDAVLYLLEIPKGEMVTILAQSRADVYRDILACGRGDSFFIRSHFECEKETPQSLAFTRGEVFRVVDTLYDGKLGNWLAVRIGNELEKGLIPNKSRAEQMASVQNAQRDNAGDRADFWRMRGQRSGVKKNLRKSREDLTAVVSVSTKFPAYERVLLREAGFKRPVVLFGPIADIAMEKLANELPDWFQTAKTEPKDAGSEKSTGVVRLNTVRQIIEQDKHALLDVTPKAVDLLNYTQWFPIVIFFNPDSRQGVKTMRQRLNPTSNKSSRKLFDQANKLKKTCAHLFTATINLNSANDSWFGSLKDTIQHQQGEAVWVSEGKMEGMDDDPEDRMSYLTAMGADYLSCDSRLISDFEDTDGEGGAYTDNELDEPAEEPLVSSITRSSEPVQHEEAKTQNKEESYDFSKSYEYKSNPSAVAGNETPGASTKGYPPPVAAKPTFGRSILKPSTPIPPQEGEEVGESSEEQDNAPKSVLGKVKIFEKMDHKARLQRMQELQEAQNARIEIAQKHPDIYAVPIKTHKPDPGTPQHTSSRPPEPQKAPSRPYQDTRGSYGSDAEEEEYRQQLSEHSKRGYYGQSARYRDTEL

SEQ ID NO: 38016 - protein, 14 aa, Artificial Sequence
  Synthetic polypeptide
SWTYQPPKLLLHVH

SEQ ID NO: 38017 - protein, 167 aa, Artificial Sequence
  Synthetic polypeptide
RHSVPPLRKMQPLLDKQTCWHLDLGLTSLQNCYYMYIEASHMVYGQKARLLSRPLRGVSGKHCLTFFYHMYGGGTGLLSVYLKKEEDSEESLLWRRRGEQSISWLRALIEYSCERQHQIIFEAIRGVSIRSDIAIDDVKFQAGPCGEMEDTTQQSSGYSEDLNEIEY

SEQ ID NO: 38018 - protein, 49 aa, Artificial Sequence
  Synthetic polypeptide
TSKLVGTLILDLPASKTATTCTLRPPIWCMDKKHASCPGLCEESLENTA

SEQ ID NO: 38019 - protein, 24 aa, Artificial Sequence
  Synthetic polypeptide
VLVSSVRQQILRRHLKNANRSKML

SEQ ID NO: 38020 - protein, 8 aa, Artificial Sequence
  Synthetic polypeptide
SPQSGNRY

SEQ ID NO: 38021 - protein, 790 aa, Artificial Sequence
  Synthetic polypeptide
PSANRLVSLSFSLLSQATDIKEASQKCKQKQDVIERKDKHIEELQQALIVKQNEELDRQRRIGNTRKMIEDLQNELKTTENCENLQPQIDAITNDLRRIQDEKALCEGEIIDKRRERETLEKEKKSVDDHIVRFDNLMNQKEDKLRQRFRDTYDAVLWLRNNRDKFKQRVCEPIMLTINMKDNKNAKYIENHIPSNDLRAFVFESQEDMEVFLKEVRDNKKLRVNAVIAPKSSYADKAPSRSLNELKQYGFFSYLRELFDAPDPVMSYLCCQYHIHEVPVGTEKTRERIERVIQETRLKQIYTAEEKYVVKTSFYSNKVISSNTSLKVAQFLTVTVDLEQRRHLEEQLKEIHRKLQAVDSGLIALRETSKHLEHKDNELRQKKKELLERKTKKRQLEQKISSKLGSLKLMEQDTCNLEEEERKASTKIKEINVQKAKLVTELTNLIKICTSLHIQKVDLILQNTTVISEKNKLESDYMAASSQLRLTEQHFIELDENRQRLLQKCKELMKRARQVCNLGAEQTLPQEYQTQVPTIPNGHNSSLPMVFQDLPNTLDEIDALLTEERSRASCFTGLNPTIVQEYTKREEEIEQLTEELKGKKVELDQYRENISQVKERWLNPLKELVEKINEKFSNFFSSMQCAGEVDLHTENEEDYDKYGIRIRVKFRSSTQLHELTPHHQSGGERSVSTMLYLMALQELNRCPFRVVDEINQGMDPINERRVFEMVVNTACKENTSQYFFITPKLLQNLPYSEKMTVLFVYNGPHMLEPNTWNLKAFQRRRRRITFTQPS

SEQ ID NO: 38022 - protein, 19 aa, Artificial Sequence
  Synthetic polypeptide
GWAPWLTPVIQHFGRPRSI

SEQ ID NO: 38023 - protein, 12 aa, Artificial Sequence
  Synthetic polypeptide
SSILGGRDQYER

SEQ ID NO: 38024 - protein, 629 aa, Artificial Sequence
  Synthetic polypeptide
MGTMAHACNPAFWEAEINMKDNKNAKYIENHIPSNDLRAFVFESQEDMEVFLKEVRDNKKLRVNAVIAPKSSYADKAPSRSLNELKQYGFFSYLRELFDAPDPVMSYLCCQYHIHEVPVGTEKTRERIERVIQETRLKQIYTAEEKYVVKTSFYSNKVISSNTSLKVAQFLTVTVDLEQRRHLEEQLKEIHRKLQAVDSGLIALRETSKHLEHKDNELRQKKKELLERKTKKRQLEQKISSKLGSLKLMEQDTCNLEEEERKASTKIKEINVQKAKLVTELTNLIKICTSLHIQKVDLILQNTTVISEKNKLESDYMAASSQLRLTEQHFIELDENRQRLLQKCKELMKRARQVCNLGAEQTLPQEYQTQVPTIPNGHNSSLPMVFQDLPNTLDEIDALLTEERSRASCFTGLNPTIVQEYTKREEEIEQLTEELKGKKVELDQYRENISQVKERWLNPLKELVEKINEKFSNFFSSMQCAGEVDLHTENEEDYDKYGIRIRVKFRSSTQLHELTPHHQSGGERSVSTMLYLMALQELNRCPFRVVDEINQGMDPINERRVFEMVVNTACKENTSQYFFITPKLLQNLPYSEKMTVLFVYNGPHMLEPNTWNLKAFQRRRRRITFTQPS

SEQ ID NO: 38025 - protein, 159 aa, Artificial Sequence
  Synthetic polypeptide
IQEFETSPGNRVGQRLCLKKKEDYDKYGIRIRVKFRSSTQLHELTPHHQSGGERSVSTMLYLMALQELNRCPFRVVDEINQGMDPINERRVFEMVVNTACKENTSQYFFITPKLLQNLPYSEKMTVLFVYNGPHMLEPNTWNLKAFQRRRRRITFTQPS

SEQ ID NO: 38026 - protein, 64 aa, Artificial Sequence
  Synthetic polypeptide
ARCCGLCLIPLWEAKAGGSLEFRSLRPARATEWDRDSVSKKKKIMINMEFELESNFEVVLNCMN

SEQ ID NO: 38027 - protein, 19 aa, Artificial Sequence
  Synthetic polypeptide
DQPGQQSGTETLSQKKRRL

SEQ ID NO: 38028 - protein, 57 aa, Artificial Sequence
  Synthetic polypeptide
CSSGSQGSKTDSDVRAREVATESEGMAAGVLECHGPHRHPSVFCRNDPSSPRPALQE

SEQ ID NO: 38029 - protein, 797 aa, Artificial Sequence
  Synthetic polypeptide
APQAPRVLRQILMSEPGKLLQKVKVWLQEYWNVTDLIAILLFSVGMILRLQDQPFRSDGRVIYCVNIIYWYIRLLDIFGVNKYLGPYVMMIGKMMIDMMYFVIIMLVVLMSFGVARQAILFPNEEPSWKLAKNIFYMPYWMIYGEVFADQIDPPCGQNETREDGKIIQLPPCKTGAWIVPAIMACYLLVANILLVNLLIAVFNNTFFEVKSISNQVWKFQRYQLIMTFHERPVLPPPLIIFSHMTMIFQHLCCRWRKHESDPDERDYGLKLFITDDELKKVHDFEEQCIEEYFREKDDRFNSSNDERIRVTSERVENMSMRLEEVNEREHSMKASLQTVDIRLAQLEDLIGRMATALERLTGLERAESNKIRSRTSSDCTDAAYIVRQSSFNSQEGNTFKLQESIDPAGEETMSPTSPTLMPRMRSHSFYSVNMKDKGGIEKLESIFKERSLSLHRATSSHSVAKEPKAPAAPANTLAIVPDSRRPSSCIDIYVSAMDELHCDIDPLDNSVNILGLGEPSFSTPVPSTAPSSSAYATLAPTDRPPSRSIDFEDITSMDTRSFSSDYTHLPECQNPWDSEPPMYHTIERSKSSRYLATTPFLLEEAPIVKSHSFMFSPSRSYYANFGVPVKTAEYTSITDCIDTRCVNAPQAIADRAAFPGGLGDKVEDLTCCHPEREAELSHPSSDSEENEAKGRRATIAISSQEGDNSERTLSNNITVPKIERANSYSAEEPSAPYAHTRKSFSISDKLDRQRNTASLRNPFQRSKSSKPEGRGDSLSMRRLSRTSAFQSFESKHN

SEQ ID NO: 38030 - protein, 3 aa, Artificial Sequence
  Synthetic polypeptide
DRF

SEQ ID NO: 38031 - protein, 415 aa, Artificial Sequence
  Synthetic polypeptide
APQAPRVLRQILMSEPGKLLQKVKVWLQEYWNVTDLIAILLFSVGMILRLQDQPFRSDGRVIYCVNIIYWYIRLLDIFGVNKYLGPYVMMIGKMMIDMMYFVIIMLVVLMSFGVARQAILFPNEEPSWKLAKNIFYMPYWMIYGEVFADQIDPPCGQNETREDGKIIQLPPCKTGAWIVPAIMACYLLVANILLVNLLIAVFNNTFFEVKSISNQVWKFQRYQLIMTFHERPVLPPPLIIFSHMTMIFQHLCCRWRKHESDPDERDYGLKLFITDDELKKVHDFEEQCIEEYFREKDDRFNSSNDERIRVTSERVENMSMRLEEVNEREHSMKASLQTVDIRLAQLEDLIGRMATALERLTGLERAESNKIRSRTSSDCTDAAYIVRQSSFNSQEGNTFKLQESIDPAEHPLYSV

SEQ ID NO: 38032 - protein, 809 aa, Artificial Sequence
  Synthetic polypeptide
APQAPRVLRQILMSEPGKLLQKVKVWLQEYWNVTDLIAILLFSVGMILRLQDQPFRSDGRVIYCVNIIYWYIRLLDIFGVNKYLGPYVMMIGKMMIDMMYFVIIMLVVLMSFGVARQAILFPNEEPSWKLAKNIFYMPYWMIYGEVFADQIDRKQVYDSHTPKSAPCGQNETREDGKIIQLPPCKTGAWIVPAIMACYLLVANILLVNLLIAVFNNTFFEVKSISNQVWKFQRYQLIMTFHERPVLPPPLIIFSHMTMIFQHLCCRWRKHESDPDERDYGLKLFITDDELKKVHDFEEQCIEEYFREKDDRFNSSNDERIRVTSERVENMSMRLEEVNEREHSMKASLQTVDIRLAQLEDLIGRMATALERLTGLERAESNKIRSRTSSDCTDAAYIVRQSSFNSQEGNTFKLQESIDPAGEETMSPTSPTLMPRMRSHSFYSVNMKDKGGIEKLESIFKERSLSLHRATSSHSVAKEPKAPAAPANTLAIVPDSRRPSSCIDIYVSAMDELHCDIDPLDNSVNILGLGEPSFSTPVPSTAPSSSAYATLAPTDRPPSRSIDFEDITSMDTRSFSSDYTHLPECQNPWDSEPPMYHTIERSKSSRYLATTPFLLEEAPIVKSHSFMFSPSRSYYANFGVPVKTAEYTSITDCIDTRCVNAPQAIADRAAFPGGLGDKVEDLTCCHPEREAELSHPSSDSEENEAKGRRATIAISSQEGDNSERTLSNNITVPKIERANSYSAEEPSAPYAHTRKSFSISDKLDRQRNTASLRNPFQRSKSSKPEGRGDSLSMRRLSRTSAFQSFESKHN

SEQ ID NO: 38033 - protein, 7 aa, Artificial Sequence
  Synthetic polypeptide
PGQYSMN

SEQ ID NO: 38034 - protein, 12 aa, Artificial Sequence
  Synthetic polypeptide
AQEFETSLDNIV

SEQ ID NO: 38035 - protein, 84 aa, Artificial Sequence
  Synthetic polypeptide
FYRYLEQKNPDTRWSLPLLPRLECSGRILAHHNLRLPCSSDSPASASRVAGTTGAHHHAQLIFVFLVEMGFHYVGQAGLELLTS

SEQ ID NO: 38036 - protein, 48 aa, Artificial Sequence
  Synthetic polypeptide
FTDTLSKRIQTQDGVSLCCPGWSAVAGSWLTTTSASLVQVILLPQPLE

SEQ ID NO: 38037 - protein, 34 aa, Artificial Sequence
  Synthetic polypeptide
AKESRHKMESPSVAQAGVQWQDLGSPQPPPPLFK

SEQ ID NO: 38038 - protein, 37 aa, Artificial Sequence
  Synthetic polypeptide
HYGVSLCCPGWSAVAGSWLTTTSASLVQVILLPQPLE

SEQ ID NO: 38039 - protein, 38 aa, Artificial Sequence
  Synthetic polypeptide
GAGDSISALNIMESPSVAQAGVQWQDLGSPQPPPPLFK

SEQ ID NO: 38040 - protein, 82 aa, Artificial Sequence
  Synthetic polypeptide
ELVILYLHLTLWSLPLLPRLECSGRILAHHNLRLPCSSDSPASASRVAGTTGAHHHAQLIFVFLVEMGFHYVGQAGLELLTS

SEQ ID NO: 38041 - protein, 447 aa, Artificial Sequence
  Synthetic polypeptide
LWLDAGAMLLEFLASKTIVFLEEASQQEKLAKEWCFKPCEIRELSHHEFFMPGLVDTHIHASQYSFAGSSIDLPLLEWLTKYTFPAEHRFQNIDFAEEVYTRVVRRTLKNGTTTACYFATIHTDSSLLLADITDKFGQRAFVGKVCMDLNDTFPEYKETTEESIKETERFVSEMLQKNYSRVKPIVTPRFSLSCSETLMGELGNIAKTRDLHIQSHISENRDEVEAVKNLYPSYKNYTSVYDKNNLLTNKTVMAHGCYLSAEELNVFHERGASIAHCPNSNLSLSSGFLNVLEVLKHEVKIGLGTDVAGGYSYSMLDAIRRAVMVSNILLINKVNEKSLTLKEVFRLATLGGSQALGLDGEIGNFEVGKEFDAILINPKASDSPIDLFYGDFFGDISEAVIQKFLYLGDDRNIEEVYVGGKQVVPFSSSVKETIHLPASSPHPPPFP

SEQ ID NO: 38042 - protein, 4 aa, Artificial Sequence
  Synthetic polypeptide
PPKR

SEQ ID NO: 38043 - protein, 87 aa, Artificial Sequence
  Synthetic polypeptide
GQSSHKWINLVTIVVVILTVSCYKMTLASSASLFHMLLPALPPFCCMMTLARCWCHALGIPSLQNDSVFRRSISTGKTGQRMVLQAV

SEQ ID NO: 38044 - protein, 411 aa, Artificial Sequence
  Synthetic polypeptide
LWLDAGAMLLEFLASKTIVFLEEASQQEKLAKEWCFKPCEIRELSHHEFFMPGLVDTHIHASQYSFAGSSIDLPLLEWLTKYTFPAEHRFQNIDFAEEVYTRVVRRTLKNGTTTACYFATIHTDSSLLLADITDKFGQRAFVGKVCMDLNDTFPEYKETTEESIKETERFVSEMLQKNSHISENRDEVEAVKNLYPSYKNYTSVYDKNNLLTNKTVMAHGCYLSAEELNVFHERGASIAHCPNSNLSLSSGFLNVLEVLKHEVKIGLGTDVAGGYSYSMLDAIRRAVMVSNILLINKVNEKSLTLKEVFRLATLGGSQALGLDGEIGNFEVGKEFDAILINPKASDSPIDLFYGDFFGDISEAVIQKFLYLGDDRNIEEVYVGGKQVVPFSSSVKETIHLPASSPHPPPFP

SEQ ID NO: 38045 - protein, 430 aa, Artificial Sequence
  Synthetic polypeptide
LWLDAGAMLLEFLASKTIVFLEEASQQEKLAKEWCFKPCEIRELSHHEFFMPGLVDTHIHASQYSFAGSSIDLPLLEWLTKYTFPAEHRFQNIDFAEEVYTRVVRRTLKNGTTTACYFATIHTDSSLLLADITDKFGQRAFVGKVCMDLNDTFPEYKETTEESIKETERFVSEMLQKNYSRVKPIVTPRFSLSCSETLMGELGNIAKTRDLHIQSHISENRDEVEAVKNLYPSYKNYTSVYDKNNLLTNKTVMAHGCYLSAEELNVFHERGASIAHCPNSNLSLSSGFLNVLEVLKHEVKIGLGTDVAGGYSYSMLDAIRRAVMVSNILLINKVNEKSLTLKEVFRLATLGGSQALGLDGEIGNFEVGKEFDAILINPKASDSPIDLFYGDFFGDISEAVIQKFLYLGDDRNIEEVYVGGKQVVPFSSSV

SEQ ID NO: 38046 - protein, 34 aa, Artificial Sequence
  Synthetic polypeptide
VDITCKFITNANSGFTRDLLIQNQYLNKGRVRFP

SEQ ID NO: 38047 - protein, 25 aa, Artificial Sequence
  Synthetic polypeptide
IRGEYGFHEYTEVKTVTVKISQKNS

SEQ ID NO: 38048 - protein, 48 aa, Artificial Sequence
  Synthetic polypeptide
GWVRWLMPVIPALWEAEGELLWRGKCPVPLWWIQDVWKWKRTGRVRFP

SEQ ID NO: 38049 - protein, 56 aa, Artificial Sequence
  Synthetic polypeptide
SQHFGRLRVNCYGVVSAQCPFGGFKMSGNGRELGEYGFHEYTEVKTVTVKISQKNS

SEQ ID NO: 38050 - protein, 456 aa, Artificial Sequence
  Synthetic polypeptide
AWQPTTLKWNQQEDVDKAVKAARQAFQIGSPWRTMDASERGRLLYKLADLIERDRLLLATMESMNGGKLYSNAYLNDLAGCIKTLRYCAGWADKIQGRTIPIDGNFFTYTRHEPIGVCGQIIPWNFPLVMLIWKIGPALSCGNTVVVKPAEQTPLTALHVASLIKEAGFPPGVVNIVPGYGPTAGAAISSHMDIDKVAFTGSTEVGKLIKEAAGKSNLKRVTLELGGKSPCIVLADADLDNAVEFAHHGVFYHQGQCCIAASRIFVEESIYDEFVRRSVERAKKYILGNPLTPGVTQGPQIDKEQYDKILDLIESGKKEGAKLECGGGPWGNKGYFVQPTVFSNVTDEMRIAKEEIFGPVQQIMKFKSLDDVIKRANNTFYGLSAGVFTKDIDKAITISSALQAGTVWVNCYGVVSAQCPFGGFKMSGNGRELGEYGFHEYTEVKTVTVKISQKNS

SEQ ID NO: 38051 - protein, 11 aa, Artificial Sequence
  Synthetic polypeptide
NGISRRMLTRQ

SEQ ID NO: 38052 - protein, 25 aa, Artificial Sequence
  Synthetic polypeptide
LPPGALSCLIGLATHNPEMESAGGC

SEQ ID NO: 38053 - protein, 185 aa, Artificial Sequence
  Synthetic polypeptide
AWQPTTLKWNQQEDVDKAVKAARQAFQIGSPWRTMDASERGRLLYKLADLIERDRLLLATMESMNGGKLYSNAYLNDLAGCIKTLRYCAGWADKIQGRTIPIDGNFFTYTRHEPIGVCGQIIPWNFPLVMLIWKIGPALSCGNTVVVKPAEQTPLTALHVASLIKEAGFPPGVVNIVPGYGASVV

SEQ ID NO: 38054 - protein, 193 aa, Artificial Sequence
  Synthetic polypeptide
AWQPTTLKWNQQEDVDKAVKAARQAFQIGSPWRTMDASERGRLLYKLADLIERDRLLLATMESMNGGKLYSNAYLNDLAGCIKTLRYCAGWADKIQGRTIPIDGNFFTYTRHEPIGVCGQIIPWNFPLVMLIWKIGPALSCGNTVVVKPAEQTPLTALHVASLIKEAGFPPGVVNIVPGYGPTAGAAISSHMD

SEQ ID NO: 38055 - protein, 158 aa, Artificial Sequence
  Synthetic polypeptide
AWQPTTLKWNQQEDVDKAVKAARQAFQIGSPWRTMDASERGRLLYKLADLIERDRLLLATMESMNGGKLYSNAYLNDLAGCIKTLRYCAGWADKIQGRTIPIDGNFFTYTRHEPIGVCGQIIPWNFPLVMLIWKIGPALSCGNTVVVKPAEQTPLTAL

SEQ ID NO: 38056 - protein, 206 aa, Artificial Sequence
  Synthetic polypeptide
VQNQPSQHDTFSKMAMVSEFLKQAWFIENEEQEYVQTVKSSKGGPGSAVSPYPTFNPSSDVAALHKAIMVKGVDEATIIDILTKRNNAQRQQIKAAYLQETGKPLDETLKKALTGHLEEVVLALLKTPAQFDADELRAAMKGLGTDEDTLIEILASRTNKEIRDINRVYREELKRDLAKDITSDTSGDFRNALLSLAKGDRSEDFG

SEQ ID NO: 38057 - protein, 62 aa, Artificial Sequence
  Synthetic polypeptide
MGVVAHTCNSSTLGGRGGQITWGHEFKISLANMTLFQKWQWYQNSSSRPGLLKMKSRNMFKL

SEQ ID NO: 38058 - protein, 1774 aa, Artificial Sequence
  Synthetic polypeptide
APEGSTKHGKEQQVEWIQQQVVKKRTKRDYDFSRAQSTYFNDPKWPSMWYMHCSDNTHPCQSDMNIEGAWKRGYTGKNIVVTILDDGIERTHPDLMQNYDALASCDVNGNDLDPMPRYDASNENKHGTRCAGEVAAAANNSHCTVGIAFNAKIGGVRMLDGDVTDMVEAKSVSFNPQHVHIYSASWGPDDDGKTVDGPAPLTRQAFENGVRMGRRGLGSVFVWASGNGGRSKDHCSCDGYTNSIYTISISSTAESGKKPWYLEECSSTLATTYSSGESYDKKIITTDLRQRCTDNHTGTSASAPMAAGIIALALEANPFLTWRDVQHVIVRTSRAGHLNANDWKTNAAGFKVSHLYGFGLMDAEAMVMEAEKWTTVPRQHVCVESTDRQIKTIRPNSAVRSIYKASGCSDNPNRHVNYLEHVVVRITITHPRRGDLAIYLTSPSGTRSQLLANRLFDHSMEGFKNWEFMTIHCWGERAAGDWVLEVYDTPSQLRNFKTPGKLKEWSLVLYGTSVQPYSPTNEFPKVERFRYSRVEDPTDDYGTEDYAGPCDPECSEVGCDGPGPDHCNDCLHYYYKLKNNTRICVSSCPPGHYHADKKRCRKCAPNCESCFGSHGDQCMSCKYGYFLNEETNSCVTHCPDGSYQDTKKNLCRKCSENCKTCTEFHNCTECRDGLSLQGSRCSVSCEDGRYFNGQDCQPCHRFCATCAGAGADGCINCTEGYFMEDGRCVQSCSISYYFDHSSENGYKSCKKCDISCLTCNGPGFKNCTSCPSGYLLDLGMCQMGAICKDGEYVDEHGHCQTCEASCAKCQGPTQEDCTTCPMTRIFDDGRCVSNCPSWKFEFENQCHPCHHTCQRCQGSGPTHCTSCGADNYGREHFLYQGECGDSCPEGHYATEGNTCLPCPDNCELCHSVHVCTRCMKGYFIAPTNHTCQKLECGQGEVQDPDYEECVPCEEGCLGCSLDDPGTCTSCAMGYYRFDHHCYKTCPEKTYSEEVECKACDSNCGSCDQNGCYWCEEGFFLLGGSCVRKCGPGFYGDQEMGECESCHRACETCTGPGHDECSSCQEGLQLLRGMCVHATKTQEEGKFWNDILRKLQPCHSSCKTCNGSATLCTSCPKGAYLLAQACVSSCPQGTWPSVRSGSCENCTEACAICSGADLCKKCQMQPGHPLFLHEGRCYSKCPEGSYAEDGICERCSSPCRTCEGNATNCHSCEGGHVLHHGVCQENCPERHVAVKGVCKHCPEMCQDCIHEKTCKECTPEFFLHDDMCHQSCPRGFYADSRHCVPCHKDCLECSGPKADDCELCLESSWVLYDGLCLEECPAGTYYEKETKECRDCHKSCLTCSSSGTCTTCQKGLIMNPRGSCMANEKCSPSEYWDEDAPGCKPCHVKCFHCMGPAEDQCQTCPMNSLLLNTTCVKDCPEGYYADEDSNRCAHCHSSCRTCEGRHSRQCHSCRPGWFQLGKECLLQCREGYYADNSTGRCERCNRSCKGCQGPRPTDCLSCDRFFFLLRSKGECHRSCPDHYYVEQSTQTCERCHPTCDQCKGKGALNCLSCVWSYHLMGGICTSDCLVGEYRVGEGEKFNCEKCHESCMECKGPGAKNCTLCPANLVLHMDDSHCLHCCNTSDPPSAQECCDCQDTTDECILRTSKVRPATEHFKTALFITSSMMLVLLLGAAVVVWKKSRGRVQPAAKAGYEKLADPNKSYSSYKSSYRESTSFEEDQVIEYRDRDYDEDDDDDIVYMGQDGTVYRKFKYGLLDDDDIDELEYDDESYSYYQ

SEQ ID NO: 38059 - protein, 94 aa, Artificial Sequence
  Synthetic polypeptide
NENTIRLTADLSAETLQARREWGPIFNILKEKNFQPRISYPAKLSFISEGEIKYFTDKQMLGDFVTTRPALNELLKEALNMERNNRWNGSNSKW

SEQ ID NO: 38060 - protein, 23 aa, Artificial Sequence
  Synthetic polypeptide
TWKGTTGGMDPTASGKKADKEGL

SEQ ID NO: 38061 - protein, 604 aa, Artificial Sequence
  Synthetic polypeptide
APEGSTKHGKEQQVEWIQQQVVKKRTKRDYDFSRAQSTYFNDPKWPSMWYMHCSDNTHPCQSDMNIEGAWKRGYTGKNIVVTILDDGIERTHPDLMQNYDALASCDVNGNDLDPMPRYDASNENKHGTRCAGEVAAAANNSHCTVGIAFNAKIGGVRMLDGDVTDMVEAKSVSFNPQHVHIYSASWGPDDDGKTVDGPAPLTRQAFENGVRMGRRGLGSVFVWASGNGGRSKDHCSCDGYTNSIYTISISSTAESGKKPWYLEECSSTLATTYSSGESYDKKIITTDLRQRCTDNHTGTSASAPMAAGIIALALEANPFLTWRDVQHVIVRTSRAGHLNANDWKTNAAGFKVSHLYGFGLMDAEAMVMEAEKWTTVPRQHVCVESTDRQIKTIRPNSAVRSIYKASGCSDNPNRHVNYLEHVVVRITITHPRRGDLAIYLTSPSGTRSQLLANRLFDHSMEGFKNWEFMTIHCWGERAAGDWVLEVYDTPSQLRNFKTPGKLKEWSLVLYGTSVQPYSPTNEFPKVERFRYSRVEDPTDDYGTEDYAGELASSGTQAKKRQLMHHPTTWENRMEWNGMKWNGMKWNGMEWNGMEWNRIESNRIE

SEQ ID NO: 38062 - protein, 827 aa, Artificial Sequence
  Synthetic polypeptide
APEGSTKHGKEQQVEWIQQQVVKKRTKRDYDFSRAQSTYFNDPKWPSMWYMHCSDNTHPCQSDMNIEGAWKRGYTGKNIVVTILDDGIERTHPDLMQNYDALASCDVNGNDLDPMPRYDASNENKHGTRCAGEVAAAANNSHCTVGIAFNAKIGGVRMLDGDVTDMVEAKSVSFNPQHVHIYSASWGPDDDGKTVDGPAPLTRQAFENGVRMGRRGLGSVFVWASGNGGRSKDHCSCDGYTNSIYTISISSTAESGKKPWYLEECSSTLATTYSSGESYDKKIITTDLRQRCTDNHTGTSASAPMAAGIIALALEANPFLTWRDVQHVIVRTSRAGHLNANDWKTNAAGFKVSHLYGFGLMDAEAMVMEAEKWTTVPRQHVCVESTDRQIKTIRPNSAVRSIYKASGCSDNPNRHVNYLEHVVVRITITHPRRGDLAIYLTSPSGTRSQLLANRLFDHSMEGFKNWEFMTIHCWGERAAGDWVLEVYDTPSQLRNFKTPGKLKEWSLVLYGTSVQPYSPTNEFPKVERFRYSRVEDPTDDYGTEDYAGPCDPECSEVGCDGPGPDHCNDCLHYYYKLKNNTRICVSSCPPGHYHADKKRCRKCAPNCESCFGSHGDQCMSCKYGYFLNEETNSCVTHCPDGSYQDTKKNLCRKCSENCKTCTEFHNCTECRDGLSLQGSRCSVSCEDGRYFNGQDCQPCHRFCATCAGAGADGCINCTEGYFMEDGRCVQSCSISYYFDHSSENGYKSCKKCDISCLTCNGPGFKNCTSCPSGYLLDLGMCQMGAICKDATEESWAEGGFCMLVKKNNLCQRKVLQQLCCKTCTFQG

SEQ ID NO: 38063 - protein, 34 aa, Artificial Sequence
  Synthetic polypeptide
GRAWWLTPVIPALWEAEAGGSSELRSSRSAWPTC

SEQ ID NO: 38064 - protein, 152 aa, Artificial Sequence
  Synthetic polypeptide
SQHFGRPRRADHLSSGVRDQPGQHANFPEQVVDNLPADISTGIYYGWASVGSGDVHKMVVSIGWNPYYKNTKKSMETHIMHTFKEDFYGEILNVAIVGYLRPEKNFDSLESLISAIQGDIEEAKKRLELPEHLKIKEDNFFQVSKSKIMNGH

SEQ ID NO: 38065 - protein, 18 aa, Artificial Sequence
  Synthetic polypeptide
AQEFEISLANMLIFLSKW

SEQ ID NO: 38066 - protein, 130 aa, Artificial Sequence
  Synthetic polypeptide
SQHFGRPRRADHLSSGVRDQPGQHANFPEQVVDNLPADISTGIYYGWASVGSGDVHKMVVSIGWNPYYKNTKKSMETHIMHTFKEDFYGEILNVAIVGYLRPEKNFDSLAGWLLLSSGMKLMKSFKMCEV

SEQ ID NO: 38067 - protein, 39 aa, Artificial Sequence
  Synthetic polypeptide
GERKRTRVVELECQVQLLLSCVNLESKQTLGEGPCGYWA

SEQ ID NO: 38068 - protein, 3078 aa, Artificial Sequence
  Synthetic polypeptide
TWNRSKRLEKVHVVIGPKSCDLDSLISTFTYAYFLDKVSPPGVLCLPVLNIPRTEFNYFTETRFILEELNISESFHIFRDEINLHQLNDEGKLSITLVGSSVLASEDKTLESAVVKVINPVEQSDANVEFRESSSSLVLKEILQEAPELITEQLAHRLRGSILFKWMTMESEKISEKQEEILSILEEKFPNLPPREDIINVLQETQFSAQGLSIEQTMLKDLKELSDGEIKVAISTVSMNLENCLFHSNITSDLKAFTDKFGFDVLILFSSYLSEEQQPRRQIAVYSENMELCSQICCELEECQNPCLELEPFDCGCDEILVYQQEDPSVTCDQVVLVVKEVINRRCPEMVSNSRTSSTEAVAGSAPLSQGSSGIMELYGSDIEPQPSSVNFIENPPDLNDSNQAQVDANVDLVSPDSGLATIRSSRSSKESSVFLSDDSPVGEGAGPHHTLLPGLDSYSPIPEGAVAEEHAWSGEHGEHFDLFNFDPAPMASGQSQQSSHSADYSPADDFFPNSDLSEGQLPAGPEGLDGMGTNMSNYSSSSLLSGAGKDSLVEHDEEFVQRQDSPRDNSERNLSLTDFVGDESPSPERLKNTGKRIPPTPMNSLVESSPSTEEPASLYTEDMTQKATDTGHMGPPQTHARCSSWWGGLEIDSKNIADAWSSSEQESVFQSPESWKEHKPSSIDRRASDSVFQPKSLEFTKSGPWESEFGQPELGSNDIQDKNEESLPFQNLPMEKSPLPNTSPQGTNHLIEDFASLWHSGRSPTAMPEPWGNPTDDGEPAAVAPFPAWSAFGKEDHDEALKNTWNLHPTSSKTPSVRDPNEWAMAKSGFAFSSSELLDNSPSEINNEAAPEIWGKKNNDSRDHIFAPGNPSSDLDHTWTNSKPPKEDQNGLVDPKTRGKVYEKVDSWNLFEENMKKGGSDVLVPWEDSFLSYKCSDYSASNLGEDSVPSPLDTNYSTSDSYTSPTFAGDEKETEHKPFAKEEGFESKDGNSTAEETDIPPQSLQQSSRNRISSGPGNLDMWASPHTDNSSEINTTHNLDENELKTEHTDGKNISMEDDVGESSQSSYDDPSMMQLYNETNRQLTLLHSSTNSRQTAPDSLDLWNRVILEDTQSTATISDMDNDLDWDDCSGGAAIPSDGQTEGYMAEGSEPETRFTVRQLEPWGLEYQEANQVDWELPASDEHTKDSAPSEHHTLNEKSGQLIANSIWDSVMRDKDMSSFMLPGSSHITDSEQRELPPEIPSHSANVKDTHSPDAPAASGTSESEALISHLDKQDTERETLQSDAASLATRLENPGYFPHPDPWKGHGDGQSESEKEAQGATDRGHLDEEEVIASGVENASGISEKGQSDQELSSLVASEHQEICIKSGKISSLAVTFSPQTEEPEEVLEYEEGSYNLDSRDVQTGMSADNLQPKDTHEKHLMSQRNSGETTETSDGMNFTKYVSVPEKDLEKTEECNFLEPENVGGGPPHRVPRSLDFGDVPIDSDVHVSSTCSEITKNLDVKGSENSLPGAGSSGNFDRDTISSEYTHSSASSPELNDSSVALSSWGQQPSSGYQEENQGNWSEQNHQESELITTDGQVEIVTKVKDLEKNRINEFEKSFDRKTPTFLEIWNDSVDGDSFSSLSSPETGKYSEHSGTHQESNLIASYQEKNEHDISATVQPEDARVISTSSGSDDDSVGGEESIEEEIQVANCHVAEDESRAWDSLNESNKFLVTADPKSENIYDYLDSSEPAENENKSNPFCDNQQSSPDPWTFSPLTETEMQITAVEKEKRSSPETGTTGDVAWQISPKASFPKNEDNSQLEMLGFSADSTEWWKASPQEGRLIESPFERELSDSSGVLEINSSVHQNASPWGVPVQGDIEPVETHYTNPFSDNHQSPFLEGNGKNSHEQLWNIQPRQPDPDADKFSQLVKLDQIKEKDSREQTFVSAAGDELTPETPTQEQCQDTMLPVCDHPDTAFTHAEENSCVTSNVSTNEGQETNQWEQEKSYLGEMTNSSIATENFPAVSSPTQLIMKPGSEWDGSTPSEDSRGTFVPDILHGNFQEGGQLASAAPDLWIDAKKPFSLKADGENPDILTHCEHDSNSQASDSPDICHDSEAKQETEKHLSACMGPEVESSELCLTEPEIDEEPIYEPGREFVPSNAELDSENATVLPPIGYQADIKGSSQPASHKGSPEPSEINGDNSTGLQVSEKGASPDMAPILEPVDRRIPRIENVATSIFVTHQEPTPEGDGSWISDSFSPESQPGARALFDGDPHLSTENPALVPDALLASDTCLDISEAAFDHSFSDASGLNTSTGTIDDMSKLTLSEGHPETPVDGDLGKQDICSSEASWGDFEYDVMGQNIDEDLLREPEHFLYGGDPPLEEDSLKQSLAPYTPPFDLSYLTEPAQSAETIEEAGSPEDESLGCRAAEIVLSALPDRRSEGNQAETKNRLPGSQLAVLHIREDPESVYLPVGAGSNILSPSNVDWEVETDNSDLPAGGDIGPPNGASKEISELEEEKTIPTKEPEQIKSEYKEERCTEKNEDRHALHMDYILVNREENSHSKPETCEERESIAELELYVGSKETGLQGTQLASFPDTCQPASLNERKGLSAEKMSSKSDTRSSFESPAQDQSWMFLGHSEVGDPSLDARDSGPGWSGKTVEPFSELGLGEGPQLQILEEMKPLESLALEEASGPVSQSQKSKSRGRAGPDAVTLQAVTHDNEWEMLSPQPVQKNMIPDTEMEEETEFLELGTRISRPNGLLSEDVGMDIPFEEGVLSPSAADMRPEPPNSLDLNDTHPRRIKLTAPNINLSLDQSEGSILSDDNLDSPDEIDINVDELDTPDEADSFEYTGHDPTANKDSGQESESIPEYTAEEEREDNRLWRTVVIGEQEQRIDMKVIEPYRRVISHGGYYGDGLNAIIVFAACFLPDSSRADYHYVMENLFLYVISTLELMVAEDYMIVYLNGATPRRRMPGLGWMKKCYQMIDRRLRKNLKSFIIVHPSWFIRTILAVTRPFISSKFSSKIKYVNSLSELSGLIPMDCIHIPESIIKLDEELREASEAAKTSCLYNDPEMSSMEKDIDLKLKEKP

SEQ ID NO: 38069 - protein, 55 aa, Artificial Sequence
  Synthetic polypeptide
KEKNKGRGIRMSSSVTSQLCELGIEANAWRRSMWLLGLNRVTWILSFLPSHMLTF

SEQ ID NO: 38070 - protein, 288 aa, Artificial Sequence
  Synthetic polypeptide
TWNRSKRLEKVHVVIGPKSCDLDSLISTFTYAYFLDKVSPPGVLCLPVLNIPRTEFNYFTETRFILEELNISESFHIFRDEINLHQLNDEGKLSITLVGSSVLASEDKTLESAVVKVINPVEQSDANVEFRESSSSLVLKEILQEAPELITEQLAHRLRGSILFKWMTMESEKISEKQEEILSILEEKFPNLPPREDIINVLQETQFSAQGLSIEQTMLKDLKELSDGEIKVAISTVSMNLEMSRIELFPKGTWLVNRDAFQSRNSGSKCMPGTTVLQCTLRSLQRGK

SEQ ID NO: 38071 - protein, 40 aa, Artificial Sequence
  Synthetic polypeptide
EKLQSTAPSVSDTEDGSFLHFQLSGSSQSYKKQENLLRAS

SEQ ID NO: 38072 - protein, 31 aa, Artificial Sequence
  Synthetic polypeptide
CERHRRWVISAFPAEWILTKLQEAREPSPSL

SEQ ID NO: 38073 - protein, 264 aa, Artificial Sequence
  Synthetic polypeptide
SVNSLSRRKTLQAHAQLVREVDVEKVSAFENPYVDAIKSLWNDPGIQECYDRRREYQLSDSTKYYLNDLDRVADPAYLPTQQDVLRVRVPTTGIIEYPFDLQSVIFRMVDVGGQRSERRKWIHCFENVTSIMFLVALSEYDQVLVESDNENRMEESKALFRTIITYPWFQNSSVILFLNKKDLLEEKIMYSHLVDYFPEYDGPQRDAQAAREFILKMFVDLNPDSDKIIYSHFTCATDTENIRFVFAAVKDTILQLNLKEYNLV

SEQ ID NO: 38074 - protein, 36 aa, Artificial Sequence
  Synthetic polypeptide
LIFIPGFLMHVQKNEAIAINLLILLAEEKLCRLMHN

SEQ ID NO: 38075 - protein, 15 aa, Artificial Sequence
  Synthetic polypeptide
QKKNFAGSCTISSRS

SEQ ID NO: 38076 - protein, 104 aa, Artificial Sequence
  Synthetic polypeptide
SVNSLSRRKTLQAHAQLVREVDVEKVSAFENPYVDAIKSLWNDPGIQECYDRRREYQLSDSTKYYLNDLDRVADPAYLPTQQDVLRVRVPTTGIIEYPFDLQSV

SEQ ID NO: 38077 - protein, 309 aa, Artificial Sequence
  Synthetic polypeptide
LRIQEVLLEIQKELLDYKGVGISVLEMSHRSSDFAKIINNTENLVRELLAVPDNYKVIFLQGGGCGQFSAVPLNLIGLKAGRCADYVVTGAWSAKAAEEAKKFGTINIVHPKLGSYTKIPDPSTWNLNPDASYVYYCANETVHGVEFDFIPDVKGAVLVCDMSSNFLSKPVDVSKFGVIFAGAQKNVGSAGVTVVIVRDDLLGFALRECPSVLEYKVQAGNSSLYNTPPCFSIYVMGLVLEWIKNNGGAAAMEKLSSIKSQTIYEIIDNSQGFYVSVGGIRASLYNAVTIEDVQKLAAFMKKFLEMHQL

SEQ ID NO: 38078 - protein, 9 aa, Artificial Sequence
  Synthetic polypeptide
YDSAYKRCC

SEQ ID NO: 38079 - protein, 23 aa, Artificial Sequence
  Synthetic polypeptide
MTPHTRGVVRDTKGIIRLQRSWH

SEQ ID NO: 38080 - protein, 355 aa, Artificial Sequence
  Synthetic polypeptide
LRIQEVLLEIQKELLDYKGVGISVLEMSHRSSDFAKIINNTENLVRELLAVPDNYKVIFLQGGGCGQFSAVPLNLIGLKAGRCADYVVTGAWSAKAAEEAKKFGTINIVHPKLGSYTKIPDPSTWNLNPDASYVYYCANETVHGVEFDFIPDVKGAVLVCDMSSNFLSKPVDVSKFGVIFAGAQKNVGSAGVTVVIVRDDLLGFALRECPSVLEYKVQAGNSSLYNTPPCFSIYVMGLVLEWIKNNGGAAAMEKLSSIKSQTIYEIIDNSQGFYVCPVEPQNRSKMNIPFRIGNAKGDDALEKRFLDKALELNMLSLKGHRSVGGIRASLYNAVTIEDVQKLAAFMKKFLEMHQL

SEQ ID NO: 38081 - protein, 669 aa, Artificial Sequence
  Synthetic polypeptide
GESCWEVLGSCGRFPPYCSRDSERVLRRSDGLRRSSSSFTPHSSLSCHHVKKILASPSAMFVSFLRPPSHVELEEQVSTLYQNINLVEPRLIQPYEHVIKNFIREIRLQSTEMENLAIAVKRAQDKAAMQLSELEEEMDQRIQAAEHKTRKDEKRKAEEALSDLRRQYETEVGDLQVTIKKLRKLEEQSKRVSQKEDVAALKKQIYDLSMENQKVKKDLLEAQTNIAFLQSELDALKSDYADQSLNTERDLEIIRAYTEDRNSLERQIEILQTANRKLHDSNDGLRSALENSYSKFNRSLHINNISPGNTISRSSPKFIGHSPQPLGYDRSSRSSYVDEDCDSLALCDPLQRTNCEVDSLPESCFDSGLSTLRDPNEYDSEVEYKHQRGFQRSHGVQESFGGDASDTDVPDIRDEETFGLEDVASVLDWKPQGSVSEGSIVSSSRKPISALSPQTDLVDDNAKSFSSQKAYKIVLAGDAAVGKSSFLMRLCKNEFRENISATLGVDFQMKTLIVDGERTVLQLWDTAGQERFRSIAKSYFRKADGVLLLYDVTCEKSFLNIREWVDMIEDAAHETVPIMLVGNKADIRDTAATEGQKCVPGHFGEKLAMTYGALFCETSAKDGSNIVEAVLHLAREVKKRTDKDDSRSITNLTGTNSKKSPQMKNCCNG

SEQ ID NO: 38082 - protein, 47 aa, Artificial Sequence
  Synthetic polypeptide
WFKEELFLLHSSLFSLLSPCEEDPCFPFCHVCKFPEASQSCGTRRAS

SEQ ID NO: 38083 - protein, 65 aa, Artificial Sequence
  Synthetic polypeptide
GESCWEVLGSCGRFPPYCSRDSERVLRRSDGLRRSSSSFTPHSSLSCHHVKKILASPSAMFRRAS

SEQ ID NO: 38084 - protein, 607 aa, Artificial Sequence
  Synthetic polypeptide
RRSLLPLLPCLEEQVSTLYQNINLVEPRLIQPYEHVIKNFIREIRLQSTEMENLAIAVKRAQDKAAMQLSELEEEMDQRIQAAEHKTRKDEKRKAEEALSDLRRQYETEVGDLQVTIKKLRKLEEQSKRVSQKEDVAALKKQIYDLSMENQKVKKDLLEAQTNIAFLQSELDALKSDYADQSLNTERDLEIIRAYTEDRNSLERQIEILQTANRKLHDSNDGLRSALENSYSKFNRSLHINNISPGNTISRSSPKFIGHSPQPLGYDRSSRSSYVDEDCDSLALCDPLQRTNCEVDSLPESCFDSGLSTLRDPNEYDSEVEYKHQRGFQRSHGVQESFGGDASDTDVPDIRDEETFGLEDVASVLDWKPQGSVSEGSIVSSSRKPISALSPQTDLVDDNAKSFSSQKAYKIVLAGDAAVGKSSFLMRLCKNEFRENISATLGVDFQMKTLIVDGERTVLQLWDTAGQERFRSIAKSYFRKADGVLLLYDVTCEKSFLNIREWVDMIEDAAHETVPIMLVGNKADIRDTAATEGQKCVPGHFGEKLAMTYGALFCETSAKDGSNIVEAVLHLAREVKKRTDKDDSRSITNLTGTNSKKSPQMKNCCNG

SEQ ID NO: 38085 - protein, 603 aa, Artificial Sequence
  Synthetic polypeptide
FLHFHLREEQVSTLYQNINLVEPRLIQPYEHVIKNFIREIRLQSTEMENLAIAVKRAQDKAAMQLSELEEEMDQRIQAAEHKTRKDEKRKAEEALSDLRRQYETEVGDLQVTIKKLRKLEEQSKRVSQKEDVAALKKQIYDLSMENQKVKKDLLEAQTNIAFLQSELDALKSDYADQSLNTERDLEIIRAYTEDRNSLERQIEILQTANRKLHDSNDGLRSALENSYSKFNRSLHINNISPGNTISRSSPKFIGHSPQPLGYDRSSRSSYVDEDCDSLALCDPLQRTNCEVDSLPESCFDSGLSTLRDPNEYDSEVEYKHQRGFQRSHGVQESFGGDASDTDVPDIRDEETFGLEDVASVLDWKPQGSVSEGSIVSSSRKPISALSPQTDLVDDNAKSFSSQKAYKIVLAGDAAVGKSSFLMRLCKNEFRENISATLGVDFQMKTLIVDGERTVLQLWDTAGQERFRSIAKSYFRKADGVLLLYDVTCEKSFLNIREWVDMIEDAAHETVPIMLVGNKADIRDTAATEGQKCVPGHFGEKLAMTYGALFCETSAKDGSNIVEAVLHLAREVKKRTDKDDSRSITNLTGTNSKKSPQMKNCCNG

SEQ ID NO: 38086 - protein, 36 aa, Artificial Sequence
  Synthetic polypeptide
GRSQDGRIGTAPVYSSQRERRRRRVISAFPSERRAS

SEQ ID NO: 38087 - protein, 428 aa, Artificial Sequence
  Synthetic polypeptide
YLLCLVCSTPVEILTPAGYSELSPEVTSSAELGDYDPDEHPENYISEFEIFPKQSQKLERKIVEIHKNELRGQSPPVAEFNLLLKAHTLETYGVDPHPCKDSTGTTTFLGFTAAGFVVFQGNKRIHLIKWPDVCKLKFEGKTFYVIGTQKEKKAMLAFHTSTPAACKHLWKCGVENQAFYKYAKSSQIKTVSSSKIFFKGSRFRYSGKVAKEVVEASSKIQREPPEVHRANITQSRSSHSLNKQLIINMEPLQPLLPSPSEQEEELPLGEGVPLPKEENISAPLISSSPVKAAREYEDPPSEEEDKIKEEPLTISELVYNPSASLLPTPVDDDEIDMLFDCPSRLELEREDTDSFEDLEADENAFLIAEEEELKEARRALSWSYDILTGHIRVNPLVKSFSRLLVVGLGLLLFVFPLLLLLLESVSMQ

SEQ ID NO: 38088 - protein, 47 aa, Artificial Sequence
  Synthetic polypeptide
LLLDIQNSVPKSLPLLSLVITILMSILRITSVSLRFSPSSHRSWKEK

SEQ ID NO: 38089 - protein, 29 aa, Artificial Sequence
  Synthetic polypeptide
SPLPGMFNPCRNLDSCWIFRTQSRSHFLC

SEQ ID NO: 38090 - protein, 469 aa, Artificial Sequence
  Synthetic polypeptide
YLLCLVCSTPVEILTPAGYSELSPEVTSSAELGDYDPDEHPENYISEFEIFPKQSQKLERKIVEIHKNELRGQSPPVAEFNLLLKAHTLETYGVDPHPCKDSTGTTTFLGFTAAGFVVFQGNKRIHLIKWPDVCKLKFEGKTFYVIGTQKEKKAMLAFHTSTPAACKHLWKCGVENQAFYKYAKSSQIKTVSSSKIFFKGSRFRYSGKVAKEVVEASSKIQREPPEVHRANITQSRSSHSLNKQLIINMEPLQPLLPSPSEQEEELPLGEGVPLPKEENISAPLISSSPVKAAREYEDPPSEEEDKIKEEPLTISELVYNPSASLLPTPVDDDEIDMLFDCPSRLELEREDTDSFEDLEADENAFLIAEEEELKEARRALSWSYDILTGHIRVNPLVKSFSRLLVVGLGLLLFVFPLLLLLLESGIDLSFLCEIRQTPEFEQFHYEYYCPLKEWVAGKVHLILYMLGCS

SEQ ID NO: 38091 - protein, 526 aa, Artificial Sequence
  Synthetic polypeptide
QGSPAPGPQTSRNRAAQQERETKGQFLIDHICNYYSLLEKDYFGIRYVDPEKQRHWLEPNKSIFKQMKTHPPYTMCFRVKFYPHEPLKIKEELTRYLLYLQIKRDIFHGRLLCSFSDAAYLGACIVQAELGDYDPDEHPENYISEFEIFPKQSQKLERKIVEIHKNELRGQSPPVAEFNLLLKAHTLETYGVDPHPCKDSTGTTTFLGFTAAGFVVFQGNKRIHLIKWPDVCKLKFEGKTFYVIGTQKEKKAMLAFHTSTPAACKHLWKCGVENQAFYKYAKSSQIKTVSSSKIFFKGSRFRYSGKVAKEVVEASSKIQREPPEVHRANITQSRSSHSLNKQLIINMEPLQPLLPSPSEQEEELPLGEGVPLPKEENISAPLISSSPVKAAREYEDPPSEEEDKIKEEPLTISELVYNPSASLLPTPVDDDEIDMLFDCPSRLELEREDTDSFEDLEADENAFLIAEEEELKEARRALSWSYDILTGHIRVNPLVKSFSRLLVVGLGLLLFVFPLLLLLLESVSMQ

SEQ ID NO: 38092 - protein, 66 aa, Artificial Sequence
  Synthetic polypeptide
RGPQPLGHRPVGTGLHSRRGKPKGSFSLTTSATTTACWRRTTLAFAMWTQRSKGTGLNLTSPSSSK

SEQ ID NO: 38093 - protein, 16 aa, Artificial Sequence
  Synthetic polypeptide
EPGCTAGEGNQRAVSH

SEQ ID NO: 38094 - protein, 567 aa, Artificial Sequence
  Synthetic polypeptide
QGSPAPGPQTSRNRAAQQERETKGQFLIDHICNYYSLLEKDYFGIRYVDPEKQRHWLEPNKSIFKQMKTHPPYTMCFRVKFYPHEPLKIKEELTRYLLYLQIKRDIFHGRLLCSFSDAAYLGACIVQAELGDYDPDEHPENYISEFEIFPKQSQKLERKIVEIHKNELRGQSPPVAEFNLLLKAHTLETYGVDPHPCKDSTGTTTFLGFTAAGFVVFQGNKRIHLIKWPDVCKLKFEGKTFYVIGTQKEKKAMLAFHTSTPAACKHLWKCGVENQAFYKYAKSSQIKTVSSSKIFFKGSRFRYSGKVAKEVVEASSKIQREPPEVHRANITQSRSSHSLNKQLIINMEPLQPLLPSPSEQEEELPLGEGVPLPKEENISAPLISSSPVKAAREYEDPPSEEEDKIKEEPLTISELVYNPSASLLPTPVDDDEIDMLFDCPSRLELEREDTDSFEDLEADENAFLIAEEEELKEARRALSWSYDILTGHIRVNPLVKSFSRLLVVGLGLLLFVFPLLLLLLESGIDLSFLCEIRQTPEFEQFHYEYYCPLKEWVAGKVHLILYMLGCS

SEQ ID NO: 38095 - protein, 44 aa, Artificial Sequence
  Synthetic polypeptide
RKGPSPASIQHLLNEERLGPEQPAAIPRMKKTFLRTRTHQETTQ

SEQ ID NO: 38096 - protein, 15 aa, Artificial Sequence
  Synthetic polypeptide
MKSAWDLNNQQRYPE

SEQ ID NO: 38097 - protein, 678 aa, Artificial Sequence
  Synthetic polypeptide
TTSSDTQNEENFLENENTSGNNSIRSRAVQSREHTNTKQDEEQVTVEQDSPRNREHMEDDDEEMQQKGCLERRYDTVCGFCRKHKTTLRHIIWGILLAGYLVMVISACVLNFHRALPLFVITVAAIFFVVWDHLMAKYEHRIDEMLSPGRRLLNSHWFWLKWVIWSSLVLAVIFWLAFDTAKLGQQQLVSFGGLIMYIVLLFLFSKYPTRVYWRPVLWGIGLQFLLGLLILRTDPGFIAFDWLGRQVQTFLEYTDAGASFVFGEKYKDHFFAFKVLPIVVFFSTVMSMLYYLGLMQWIIRKVGWIMLVTTGSSPIESVVASGNIFVGQTESPLLVRPYLPYITKSELHAIMTAGFSTIAGSVLGAYISFGVPSSHLLTASVMSAPASLAAAKLFWPETEKPKITLKNAMKMESGDSGNLLEAATQGASSSISLVANIAVNLIAFLALLSFMNSALSWFGNMFDYPQLSFELICSYIFMPFSFMMGVEWQDSFMVARLIGYKTFFNEFVAYEHLSKWIHLRKEGGPKFVNGVQQYISIRSEIIATYALCGFANIGSLGIVIGGLTSMAPSRKRDIASGAVRALIAGTVACFMTACIAGILSSTPVDINCHHVLENAFNSTFPGNTTKVIACCQSLLSSTVAKGPGEVIPGGNHSLYSLKGCCTLLNPSTFNCNGISNTF

SEQ ID NO: 38098 - protein, 7 aa, Artificial Sequence
  Synthetic polypeptide
KHNLWMT

SEQ ID NO: 38099 - protein, 9 aa, Artificial Sequence
  Synthetic polypeptide
HDAENTICG

SEQ ID NO: 38100 - protein, 901 aa, Artificial Sequence
  Synthetic polypeptide
FSQTFKKLSYTLFSRARKKKKKKKESLEASMMLKTQSVDDVVDESDDNDDIDVEAENETENEDDLDQNFKNDDIETDINKLKPQQEPGRTIEDLKMYEHLFPELVDDFQDYDLISKEPKPFVFEGKVRGPIVVPTAGEETSGNSGNLRKVVMKENISSKGDEGEKKSTFMDLAKEDIKDNDRTLQQQPGDQNRTISSVHGLNNDIVKALDRITLQNIPSQTAPGFTAEMKKDCSLPLTVLTCAKACPHMATCGNVLFEGRTVQLGKLCCTGVETEDDEDTESNSSVEQASVEVPDGPTLHDPDLYIEIVKNTKSVPEYSEVAYPDYFGHIPPPFKEPILERPYGVQRTKIAQDIERLIHQSDIIDRVVYDLDNPNYTIPEEGDILKFNSKFESGNLRKVIQIRKNEYDLILNSDINSNHYHQWFYFEVSGMRPGVAYRFNIINCEKSNSQFNYGMQPLMYSVQEALNARPWWIRMGTDICYYKNHFSRSSVAAGGQKGKSYYTITFTVNFPHKDDVCYFAYHYPYTYSTLQMHLQKLESAHNPQQIYFRKDVLCETLSGNSCPLVTITAMPESNYYEHICHFRNRPYVFLSARVHPGETNASWVMKGTLEYLMSNNPTAQSLRESYIFKIVPMLNPDGVINGNHRCSLSGEDLNRQWQSPSPDLHPTIYHAKGLLQYLAAVKRLPLVYCDYHGHSRKKNVFMYGCSIKETVWHTNDNATSCDVVEDTGYRTLPKILSHIAPAFCMSSCSFVVEKSKESTARVVVWREIGVQRSYTMESTLCGCDQGKYKGLQIGTRELEEMGAKFCVGLLRLKRLTSPLEYNLPSSLLDFENDLIESSCKVTSPTTYVLDEDEPRFLEEVDYSAESNDELDIELAENVGDYEPSAQEEVLSDSELSRTYLP

SEQ ID NO: 38101 - protein, 480 aa, Artificial Sequence
  Synthetic polypeptide
FSQTFKKLSYTLFSRARKKKKKKKESLEASMMLKTQSVDDVVDESDDNDDIDVEAENETENEDDLDQNFKNDDIETDINKLKPQQEPGRTIEDLKMYEHLFPELVDDFQDYDLISKEPKPFVFEGKVRGPIVVPTAGEETSGNSGNLRKVVMKENISSKGDEGEKKSTFMDLAKEDIKDNDRTLQQQPGDQNRTISSVHGLNNDIVKALDRITLQNIPSQTAPGFTAEMKKDCSLPLTVLTCAKACPHMATCGNVLFEGRTVQLGKLCCTGVETEDDEDTESNSSVEQASVEVPDGPTLHDPDLYIEIVKNTKSVPEYSEVAYPDYFGHIPPPFKEPILERPYGVQRTKIAQDIERLIHQSDIIDRVVYDLDNPNYTIPEEGDILKFNSKFESGNLRKVIQIRKNEYDLILNSDINSNHYHQWFYFEVSGMRPGVAYRFNIINCEKSNSQFNYALPLMSWMKMNLDSLKKLITVQKVMMS

SEQ ID NO: 38102 - protein, 22 aa, Artificial Sequence
  Synthetic polypeptide
FKNENVQCWKECRRFSVNDLWI

SEQ ID NO: 38103 - protein, 565 aa, Artificial Sequence
  Synthetic polypeptide
LKMKMFNVGRNAEDFQSMTYGFKMANSVTDLRVTGMLKDVEDDMQRRVKSTRSRQGEERDPEVELEHQQCLAVFSRVKFTRVLLTVLIAFTKKETSAVAEAQKLMVQAADLLSAIHNSLHHGIQAQNDTTKGDHPIMMGFEPLVNQRLLPPTFPRYAKIIKREEMVNYFARLIDRIKTVCEVVNLTNLHCILDFFCEFSEQSPCVLSRSLLQTTFLVDNKKVFGTHLMQDMVKDALRSFVSPPVLSPKCYLYNNHQAKDCIDSFVTHCVRPFCSLIQIHGHNRARQRDKLGHILEEFATLQDEAEKVDAALHTMLLKQEPQRQHLACLGTWVLYHNLRIMIQYLLSGFELELYSMHEYYYIYWYLSEFLYAWLMSTLSRADGSQMAEERIMEEQQKGRSSKKTKKKKKVRPLSREITMSQAYQNMCAGMFKTMVAFDMDGKVRKPKFELDSEQVRYEHRFAPFNSVMTPPPVHYLQFKEMSDLNKYSPPPQSPELYVAASKHFQQAKMILENIPNPDHEVNRILKVAKPNFVVMKLLAGGHKKESKVPPEFDFSAHKYFPVVKLV

SEQ ID NO: 38104 - protein, 14 aa, Artificial Sequence
  Synthetic polypeptide
KCSMLEGMQKIFSQ

SEQ ID NO: 38105 - protein, 134 aa, Artificial Sequence
  Synthetic polypeptide
LKMKMFNVGRNAEDFQSMTYGFKMANSVTDLRVTGMLKDVEDDMQRRVKSTRSRQGEERDPEVELEHQQCLAVFSRVKFTRVLLTVLIAFTKKETSAVAEAQKLMVQAADLLSAIHNSLHHGIQAQNDTTKGGL

SEQ ID NO: 38106 - protein, 166 aa, Artificial Sequence
  Synthetic polypeptide
QWFPKQGLGTLGFSEAHSGDLQATSRISDAHLADTMIGKAVEHMFETEDGSKDEWRGMVLARAPVMNTWFYITYEKDPVLYMYQLLDDYKEGDLRIMPDSNDSPPAEREPGEVVDSLVGKQVEYAKEDGSKRTGMVIHQVEAKPSVYFIKFDDDFHIYVYDLVKTS

SEQ ID NO: 38107 - protein, 35 aa, Artificial Sequence
  Synthetic polypeptide
SGSQSKAWGPLGSLKPIQEICKRHLESAMHTWQTQ

SEQ ID NO: 38108 - protein, 30 aa, Artificial Sequence
  Synthetic polypeptide
SPFRRFASDISNQRCTLGRHNDWQSSGTYV

SEQ ID NO: 38109 - protein, 80 aa, Artificial Sequence
  Synthetic polypeptide
CSRRPSPDVAPLPLTSQPPKWHVMLPRELSKQVPKTHLMSEEEWRRLGVQQSLGWVHYMIHEPEPHILLFRRPLPKDQQK

SEQ ID NO: 38110 - protein, 23 aa, Artificial Sequence
  Synthetic polypeptide
LPSLQNGMLCYPENFPNKYLKLI

SEQ ID NO: 38111 - protein, 31 aa, Artificial Sequence
  Synthetic polypeptide
KAFTRCCPSTFDFPASKMACYVTQRTFQTST

SEQ ID NO: 38112 - protein, 13 aa, Artificial Sequence
  Synthetic polypeptide
DHLRWRTLFGDVV

SEQ ID NO: 38113 - protein, 30 aa, Artificial Sequence
  Synthetic polypeptide
SLEMENFIRGRRIIFWEVNPSSPEILPTVL

SEQ ID NO: 38114 - protein, 207 aa, Artificial Sequence
  Synthetic polypeptide
TSDLELSGADLKERAKMSSSEVGPFVSKIRAVINDIANLPVPTIAAIDGLALGGGLELALACDIRVAASSAKMGLVETKLAIIPGGGGTQRLPRAIGMSLAKELIFSARVLDGKEAKAVGLISHVLEQNQEGDAAYRKALDLAREFLPQGPVAMRVAKLAINQGMEVDLVTGLAIEEACYAQTIPTKDRLEGLLAFKEKRPPRYKGE

SEQ ID NO: 38115 - protein, 12 aa, Artificial Sequence
  Synthetic polypeptide
NCQVLTLRKEPK

SEQ ID NO: 38116 - protein, 6 aa, Artificial Sequence
  Synthetic polypeptide
PRIVRC

SEQ ID NO: 38117 - protein, 123 aa, Artificial Sequence
  Synthetic polypeptide
TSDLELSGADLKERAKMSSSEVGPFVSKIRAVINDIANLPVPTIAAIDGLALGGGLELALACDIRVAASSAKMGLVETKLAIIPGGVTSSTEVLNPSKSSMKIGIIIFQTPVNIDILASSHES

SEQ ID NO: 38118 - protein, 51 aa, Artificial Sequence
  Synthetic polypeptide
EGSQDSRIGTAPVYSSQRERRRRRVISAFPSEPSKPQNCGEWKRMYKLRLI

SEQ ID NO: 38119 - protein, 393 aa, Artificial Sequence
  Synthetic polypeptide
FLHFHLSPPSHKTVVNGKECINFASFNFLGLLDNPRVKAAALASLKKYGVGTCGPRGFYGTFDVHLDLEDRLAKFMKTEEAIIYSYGFATIASAIPAYSKRGDIVFVDRAACFAIQKGLQASRSDIKLFKHNDMADLERLLKEQEIEDQKNPRKARVTRRFIVVEGLYMNTGTICPLPELVKLKYKYKARIFLEESLSFGVLGEHGRGVTEHYGINIDDIDLISANMENALASIGGFCCGRSFVIDHQRLSGQGYCFSASLPPLLAAAAIEALNIMEENPGIFAVLKEKCGQIHKALQGISGLKVVGESLSPAFHLQLEESTGSREQDVRLLQEIVDQCMNRSIALTQARYLEKEEKCLPPPSIRVVVTVEQTEEELERAASTIKEVAQAVLL

SEQ ID NO: 38120 - protein, 63 aa, Artificial Sequence
  Synthetic polypeptide
FLHFHLSPPSHKTVVNGKECINFASFNFLGLLDNPRVKAAALASLKKYGVGTCGPRGFYGTFE

SEQ ID NO: 38121 - protein, 25 aa, Artificial Sequence
  Synthetic polypeptide
KRRNANGQLRNNWCILMKYKTKLTY

SEQ ID NO: 38122 - protein, 142 aa, Artificial Sequence
  Synthetic polypeptide
KKKCKWPTKEQLVHLNEIQNQTDLLSLSGKTLCVTAGSAPSLINSSSTLLCQYINLQLLNAKPQECLMGTVGTLLLENPLGQNGLTHQGLLYEAAKVFGLRSRKLKLFLNETQTQEITEDIPVKTLNMKTVYVSVLPTTADF

SEQ ID NO: 38123 - protein, 24 aa, Artificial Sequence
  Synthetic polypeptide
EVRSPSAWPAAPSGRIGSLSDQQF

SEQ ID NO: 38124 - protein, 118 aa, Artificial Sequence
  Synthetic polypeptide
GAPPPGQPPRPGGSAPSLINSSSTLLCQYINLQLLNAKPQECLMGTVGTLLLENPLGQNGLTHQGLLYEAAKVFGLRSRKLKLFLNETQTQEITEDIPVKTLNMKTVYVSVLPTTADF

SEQ ID NO: 38125 - protein, 33 aa, Artificial Sequence
  Synthetic polypeptide
EVRSPSARQPPRLRSEEPLRLASRPVREDRLPL

SEQ ID NO: 38126 - protein, 198 aa, Artificial Sequence
  Synthetic polypeptide
RMFLPQKGNNERGNPETSGRKKEKWKIKMEGGVLLLENPKGDNRLDLLKLKSVVTSIFGVKNTELAVFHDETEIQNQTDLLSLSGKTLCVTAGSAPSLINSSSTLLCQYINLQLLNAKPQECLMGTVGTLLLENPLGQNGLTHQGLLYEAAKVFGLRSRKLKLFLNETQTQEITEDIPVKTLNMKTVYVSVLPTTADF

SEQ ID NO: 38127 - protein, 65 aa, Artificial Sequence
  Synthetic polypeptide
KKTKRIRSQQTSPKRVAKGCSYHRKEIMKEGIQKHQEGKKKNGKSKWRVEYCSWKIQKVTIGWTF

SEQ ID NO: 38128 - protein, 30 aa, Artificial Sequence
  Synthetic polypeptide
KRESRNIRKEKRKMENQNGGWSIAPGKSKR

SEQ ID NO: 38129 - protein, 41 aa, Artificial Sequence
  Synthetic polypeptide
RMFLPQKGNNERGNPETSGRKKEKWKIKMEGGVLLLENPKG

SEQ ID NO: 38130 - protein, 59 aa, Artificial Sequence
  Synthetic polypeptide
KKTKRIRSQQTSPKRVAKGCSYHRKEIMKEGIQKHQEGKKKNGKSKWRVEYCSWKIQKV

SEQ ID NO: 38131 - protein, 47 aa, Artificial Sequence
  Synthetic polypeptide
WRVTGILERVLNIGQKTWILFQIQLRSRREKRSVHVFPKPAFFCGVV

SEQ ID NO: 38132 - protein, 145 aa, Artificial Sequence
  Synthetic polypeptide
VRRPGFYSRFNYVAEERKDLFMFFRSLHFFVEWFEYRKRTFKHLKEKYPDAVYLSEGPSSCSMGIRSASRPGFELVIVWRIQIDEDGKVFPKLDLLTKVPQRALELDKNRAIETAPLSFRTLVGLLGIEAALESLIKSLCAEENN

SEQ ID NO: 38133 - protein, 51 aa, Artificial Sequence
  Synthetic polypeptide
PHLDLLGAVPRKPHYMGTLVLDLYNRGCLKKFLSSLRLILISSQEMTHIPF

SEQ ID NO: 38134 - protein, 65 aa, Artificial Sequence
  Synthetic polypeptide
VPSIVAGKFQLHKGIVSPAPPAPAINSQDSPFLAHSSPIWTCLELSPESLIIWGHWFWTFTTEDV

SEQ ID NO: 38135 - protein, 800 aa, Artificial Sequence
  Synthetic polypeptide
TPKTVLSLLTLAPSGPAWSCPQKASLYGDIGFGPLQQRMSEEVSFQSEININLFTRDDPYSILEELWKDDEHTRKCGENQNKPLSRVVFINKKTLANDSIFEYKDIGEIVHVNTHLVSSRKRPHNCNSCGKNLEPIITLYNRNNATENSDKTIGDGDIFTHLNSHTEVTACECNQCGKPLHHKQALIQQQKIHTRESLYLFSDYVNVFSPKSHAFAHESICAEEKQHECHECEAVFTQKSQLDGSQRVYAGICTEYEKDFSLKSNRQKTPYEGNYYKCSDYGRAFIQKSDLFRCQRIHSGEKPYEYSECEKNLPQNSNLNIHKKIHTGGKHFECTECGKAFTRKSTLSMHQKIHTGEKPYVCTECGKAFIRKSHFITHERIHTGEKPYECSDCGKSFIKKSQLHVHQRIHTGENPFICSECGKVFTHKTNLIIHQKIHTGERPYICTVCGKAFTDRSNLIKHQKIHTGEKPYKCSDCGKSFTWKSRLRIHQKCHTGERHYECSECGKAFIQKSTLSMHQRIHRGEKPYVCTECGKAFFHKSHFITHERIHTGEKPYECSICGKSFTKKSQLHVHQQIHTGEKPYRCAECGKAFTDRSNLFTHQKIHTGEKPYKCSDCGKAFTRKSGLHIHQQSHTGERHYECSECGKAFARKSTLIMHQRIHTGEKPYICNECGKSFIQKSHLNRHRRIHTGEKPYECSDCGKSFIKKSQLHEHHRIHTGEKPYICAECGKAFTIRSNLIKHQKIHTKQKPYKCSDLGKALNWKPQLSMPQKSDNGEVECSMPQLWCGDSEGDQGQLSSI

SEQ ID NO: 38136 - protein, 199 aa, Artificial Sequence
  Synthetic polypeptide
CLGLDLDLSLHIWLQSWADQTYCDRLVQDTPFLTGHGRLSEQQVDRIILQLNRYYPQILTNKEAEKFRNPKASLRVRLCDLLSHLQRSGERDCQEFYRALYIHAQPLHSRLPSRHALQNSDCTELDSGSQSGELSNRGPMSFLAGLGLAVGLALLLYCYPPDPKGLPGTRRVLGFSPVIIDRHVSRYLLAFLADDLGGL

SEQ ID NO: 38137 - protein, 32 aa, Artificial Sequence
  Synthetic polypeptide
AWAWILICHFISGCSLGQIRPIVTAWCRTRLS

SEQ ID NO: 38138 - protein, 16 aa, Artificial Sequence
  Synthetic polypeptide
SVTSYLVAVLGRSDLL

SEQ ID NO: 38139 - protein, 244 aa, Artificial Sequence
  Synthetic polypeptide
CLGLDLDLSLHIWLQSWADQTYCDRLVQDTPFLTGHGRLSEQQVDRIILQLNRYYPQILTNKEAEKFRNPKASLRVRLCDLLSHLQRSGERDCQEFYRALYIHAQPLHSRLPSRHALRKFHITNHACLVLARGGHPSLPLMAWMSSMTTQVCCSPGLASPLASAPPQRPPSGPEGRVWQAQAVQMLVSVSHFLPLPPSLSHGSFHTAWGILYVHSCPSFSNLIPRGSLHVCVDSNLVPTAAWRS

SEQ ID NO: 38140 - protein, 45 aa, Artificial Sequence
  Synthetic polypeptide
GRAWWLTPVIPARWEAEAGRSRGQEMETILANMMESCSVAQAGVQ

SEQ ID NO: 38141 - protein, 45 aa, Artificial Sequence
  Synthetic polypeptide
PGVVAHACNPSTLGGRGGQITRSRDGDHPSQHDGVLLCCPGWSTM

SEQ ID NO: 38142 - protein, 184 aa, Artificial Sequence
  Synthetic polypeptide
PGVQPIPSQGGKLEIAGTVVGHWAGSRRGRGGRGPFPLQVVSVGGPARGRPRGVISTPVIRTFGRGGRYYGRGYKNQAAIQGRPPYAASAEEVAKELKSKSGESKSSAMSSDGSLAENGVMAEEKPAPQMNGSTGDARAPSHSESALNNDSKTCNTNPHLNALSTDSACRREAALEAAVLNKEE

SEQ ID NO: 38143 - protein, 49 aa, Artificial Sequence
  Synthetic polypeptide
SQHFGRPRRENCLRQEFKTSLGNIVRPLPLQKILKISQESNLYLLREAN

SEQ ID NO: 38144 - protein, 49 aa, Artificial Sequence
  Synthetic polypeptide
KLARSPTYTFSGRQTRNSWHCGWPLGWEQAGPWGPGAFPPAGGFCRRTS

SEQ ID NO: 38145 - protein, 18 aa, Artificial Sequence
  Synthetic polypeptide
GWARWLTPVIPALWKAEC

SEQ ID NO: 38146 - protein, 1004 aa, Artificial Sequence
  Synthetic polypeptide
SQHFGRPSAEDVVARVPGSQLTLGYMEEHGFTEPILVPKKDGLGLAVPAPTFYVSDVENYVGPERSVDVTDVTKQKDCKMKLKEFVDYYYSTNRKRVLNVTNLEFSDTRMSSFVEPPDIVKKLSWVENYWPDDALLAKPKVTKYCLICVKDSYTDFHIDSGGASAWYHVLKGEKTFYLIRPASANISLYERWRSASNHSEMFFADQVDKCYKCIVKQGQTLFIPSGWIYATLTPVDCLAFAGHFLHSLSVEMQMRAYEVERRLKLGSLTQFPNFETACWYMGKHLLEAFKGSHKSGKQLPPHLVQGAKILNGAFRSWTKKQALAEHEDELPEHFKPSQLIKDLAKEIRLSENASKAVRPEVNTVASSDEVCDGDREKEEPPSPIEATPPQSLLEKVSKKKTPKTVKMPKPSKIPKPPKPPKPPRPPKTLKLKDGGKKKGKKSRESASPTIPNLDLLEAHTKEALTKMEPPKKGKATKSVLSVPNKDVVHMQNDVERLEIREQTKSKSEAKWKYKNSKPDSLLKMEEEQKLEKSPLAGNKDNKFSFSFSNKKLLGSKALRPPTSPGVFGALQNFKEDKPKPVRDEYEYVSDDGELKIDEFPIRRKKNAPKRDLSFLLDKKAVLPTPVTKPKLDSAAYKSDDSSDEGSLHIDTDTKPGRNARVKKESGSSAAGILDLLQASEEVGALEYNPSSQPPASPSTQEAIQGMLSMANLQASDSCLQTTWGAGQAKGSSLAAHGARKNGGGSGKSAGKRLLKRAAKNSVDLDDYEEEQDHLDACFKDSDYVYPSLESDEDNPIFKSRSKKRKGSDDAPYSPTARVGPSVPRQDRPVREGTRVASIETGLAAAAAKLSQQEEQKSKKKKSAKRKLTPNTTSPSTSTSISAGTTSTSTTPASTTPASTTPASTSTASSQASQEGSSPEPPPESHSSSLADHEYTAAGTFTGAQAGRTSQPMAPGVFLTQRRPSASSPNNNTAAKGKRTKKGMATAKQRLGKILKIHRNGKLLL

SEQ ID NO: 38147 - protein, 77 aa, Artificial Sequence
  Synthetic polypeptide
MGAVAHACNPSTLEGRVLKTWWPVCQEVSSRWATWRSTASPSPSSSLRKTGWVWLSRPPRSMSVTSRTTWGRNGVWM

SEQ ID NO: 38148 - protein, 16 aa, Artificial Sequence
  Synthetic polypeptide
HGPALFFECPTHWCPV

SEQ ID NO: 38149 - protein, 38 aa, Artificial Sequence
  Synthetic polypeptide
MHAVAHACNPSTLGGQGRRITRSGDRDHPGLTWACSLF

SEQ ID NO: 38150 - protein, 441 aa, Artificial Sequence
  Synthetic polypeptide
SQHFGRPRQADHEIRRSRPSWLNMGLLSFLSAPLIGALSDVWGRKPFLLGTVFFTCFPIPLMRISPWWYFAMISVSGVFSVTFSVIFAYVADVTQEHERSTAYGWVSATFAASLVSSPAIGAYLSASYGDSLVVLVATVVALLDICFILVAVPESLPEKMRPVSWGAQISWKQADPFASLKKVGKDSTVLLICITVFLSYLPEAGQYSSFFLYLRQVIGFGSVKIAAFIAMVGILSIVAQTAFLSILMRSLGNKNTVLLGLGFQMLQLAWYGFGSQAWMMWAAGTVAAMSSITFPAISALVSRNAESDQQGVAQGIITGIRGLCNGLGPALYGFIFYMFHVELTELGPKLNSNNVPLQGAVIPGPPFLFGACIVLMSFLVALFIPEYSKASGVQKHSNSSSGSLTNTPERGSDEDIEPLLQDSSIWELSSFEEPGNQCTEL

SEQ ID NO: 38151 - protein, 311 aa, Artificial Sequence
  Synthetic polypeptide
SQHFGRPRQADHEIRRSRPSWLNMGLLSFLSAPLIGALSDVWGRKPFLLGTVFFTCFPIPLMRISPWWYFAMISVSGVFSVTFSVIFAYVADVTQEHERSTAYGWVSATFAASLVSSPAIGAYLSASYGDSLVVLVATVVALLDICFILVAVPESLPEKMRPVSWGAQISWKQADPFASLKKVGKDSTVLLICITVFLSYLPEAGQYSSFFLYLRQVIGFGSVKIAAFIAMVGILSIVAQTAFLSILMRSLGNKNTVLLGLGFQMLQLAWYGFGSQAWSCPGDHNWNKRTMQWPGASTVWLHILHVPCGTD

SEQ ID NO: 38152 - protein, 26 aa, Artificial Sequence
  Synthetic polypeptide
DGYQKDRQGCGEIGALILAGHRFWIC

SEQ ID NO: 38153 - protein, 252 aa, Artificial Sequence
  Synthetic polypeptide
DNHFTCSRMAIKKTDKDVEKSEPSYLLVIGFGSVKIAAFIAMVGILSIVAQTAFLSILMRSLGNKNTVLLGLGFQMLQLAWYGFGSQAWMMWAAGTVAAMSSITFPAISALVSRNAESDQQGVAQGIITGIRGLCNGLGPALYGFIFYMFHVELTELGPKLNSNNVPLQGAVIPGPPFLFGACIVLMSFLVALFIPEYSKASGVQKHSNSSSGSLTNTPERGSDEDIEPLLQDSSIWELSSFEEPGNQCTEL

SEQ ID NO: 38154 - protein, 49 aa, Artificial Sequence
  Synthetic polypeptide
AQEKKNNITSRQGHASHTNNEITISHVLGWLSKRQTRMWRNRSPHTCWS

SEQ ID NO: 38155 - protein, 122 aa, Artificial Sequence
  Synthetic polypeptide
DNHFTCSRMAIKKTDKDVEKSEPSYLLVIGFGSVKIAAFIAMVGILSIVAQTAFLSILMRSLGNKNTVLLGLGFQMLQLAWYGFGSQAWSCPGDHNWNKRTMQWPGASTVWLHILHVPCGTD

SEQ ID NO: 38156 - protein, 90 aa, Artificial Sequence
  Synthetic polypeptide
GQTRWLTPVIPALWEAKAGGSPEVRRSRPAWPIWRNPVSTKNTKISWVWWHVLVIPATQEAEAGESLEPGKWRLLGAEIAPLHSSLDGLS

SEQ ID NO: 38157 - protein, 25 aa, Artificial Sequence
  Synthetic polypeptide
TWEVEVAGSRDCATALQPRRPFLAS

SEQ ID NO: 38158 - protein, 29 aa, Artificial Sequence
  Synthetic polypeptide
KRTLEKGRSFVCLDQAPPLEAMALLVLPT

SEQ ID NO: 38159 - protein, 47 aa, Artificial Sequence
  Synthetic polypeptide
QTNLLFIYLFLLFLCENVHSKRAGVLSVWIRLHPWKLWHCWFYQRDR

SEQ ID NO: 38160 - protein, 376 aa, Artificial Sequence
  Synthetic polypeptide
GNRSPSHLHRRVASFTSLLTYPFLREAFTEASAHPLLPSTFRVFLFYFVSLYGTYGLCNKLIYCLYIYFYCFSVKTYTRKGQEFCLFGSGSTPGSYGIAGSTNVTGDQVKKLDVLSNDLVMNMLKSSFATCVLVSEEDKHAIIVEPEKRGKYVVCFDPLDGSSNIDCLVSVGTIFGIYRKKSTDEPSEKDALQPGRNLVAAGYALYGSATMLVLAMDCGVNCFMLDPAIGEFILVDKDVKIKKKGKIYSLNEGYARDFDPAVTEYIQRKKFPPDNSAPYGARYVGSMVADVHRTLVYGGIFLYPANKKSPNGKLRLLYECNPMAYVMEKAGGMATTGKEAVLDVIPTDIHQRAPVILGSPDDVLEFLKVYEKHSAQ

SEQ ID NO: 38161 - protein, 34 aa, Artificial Sequence
  Synthetic polypeptide
VVKKVPASSCTVIVKFPEASPAMQNSMALLVLPT

SEQ ID NO: 38162 - protein, 24 aa, Artificial Sequence
  Synthetic polypeptide
LLSFLRPPQPCRTLWHCWFYQRDR

SEQ ID NO: 38163 - protein, 289 aa, Artificial Sequence
  Synthetic polypeptide
GLPSHAELYGIAGSTNVTGDQVKKLDVLSNDLVMNMLKSSFATCVLVSEEDKHAIIVEPEKRGKYVVCFDPLDGSSNIDCLVSVGTIFGIYRKKSTDEPSEKDALQPGRNLVAAGYALYGSATMLVLAMDCGVNCFMLDPAIGEFILVDKDVKIKKKGKIYSLNEGYARDFDPAVTEYIQRKKFPPDNSAPYGARYVGSMVADVHRTLVYGGIFLYPANKKSPNGKLRLLYECNPMAYVMEKAGGMATTGKEAVLDVIPTDIHQRAPVILGSPDDVLEFLKVYEKHSAQ

SEQ ID NO: 38164 - protein, 38 aa, Artificial Sequence
  Synthetic polypeptide
NFNRHIKKKWMQIHCHTQRKASNRVKAAFHFLFTFQIL

SEQ ID NO: 38165 - protein, 110 aa, Artificial Sequence
  Synthetic polypeptide
NKFHKTVTGINNDFSGGLGQSQLLTFWKGVTILDIIENIFDSWEHFKISTLTEVWKKLIPALMDDFERFKTLVGELTVDVVEAARELELEMEPEDGTELLQSHDKTLTDI

SEQ ID NO: 38166 - protein, 387 aa, Artificial Sequence
  Synthetic polypeptide
QTYKEKVDADTLPHTKKGQQPSEGSISLPLYISNPVNQKKKKVYHTNQTTFIIGETPKGIRRKQFEEMASYFNSSSVNEFAKHITNATSEERQKMLRDFYASQYPEVKEFFVDSVSQFNNSSFEKGEQRTRKKSDKRESLIKPRLSDSETLSFKDSTNKISQVCSLKTYKRKSVKFQNHISYREEVFFNDAETKKSPVSSTQEIDSGKNSQASEDTVTSRSLNSESETRERRLENTMKDQQDLTRTGISRKEPLLKLENKKIENPVLENTSVISLLGDTSILDDLFKSHGNSPTQLPKKVLSGPMEKAKQRPKDFWDILNEQNDESLSKLTDLAVIETLCEKAPLAAPFKRREEPATSLWKSNEKFLWKKFSPSDTDENATNTQSTT

SEQ ID NO: 38167 - protein, 69 aa, Artificial Sequence
  Synthetic polypeptide
KYKNEPGVVNVSVAYIGILIGGDYIFSLLNFVGLNICMAGGLRYSFLTLSSQLKPKPVGEENICLDLKS

SEQ ID NO: 38168 - protein, 50 aa, Artificial Sequence
  Synthetic polypeptide
ARRGECIRCLHWDINRWRLHFLFVKLCRVKYLHGRGLEIFLFNTEQPVKT

SEQ ID NO: 38169 - protein, 212 aa, Artificial Sequence
  Synthetic polypeptide
GAAGRTAAAPRGRAPVGAGQGQKRTPRRGEQQGWNDSRGPEGMLERAERRSYREYRPYETERQADFTAEKFPDEKVPELEVEEETQVQEMTLDEWKNLQEQTRPKPEFNIRKPESTVPSKAVVIHKSKYRDDMVKDDYEDDSHVFRKPANDITSQLEINFGNLPRPGRGARGGTRGGRGRIRRAENYGPRAEVVMQDVAPNPDDPEDFPALS

SEQ ID NO: 38170 - protein, 64 aa, Artificial Sequence
  Synthetic polypeptide
GPDRARSGLLEEGSSKDGMTAVGRRGCSKELSGDPTGNTDPMRQRGRQTSQLRSFQMKKFLSWR

SEQ ID NO: 38171 - protein, 25 aa, Artificial Sequence
  Synthetic polypeptide
RSGADGGGAAGAGAGRGRTGPEADS

SEQ ID NO: 38172 - protein, 317 aa, Artificial Sequence
  Synthetic polypeptide
GAAGRTAAAPRGRAPVGAGQGQKRTPRRGEQQGWNDSRGPEGMLERAERRSYREYRPYETERQADFTAEKFPDEKPGDRFDRDRPLRGRGGPRGGMRGRGRGGPGNRVFDAFDQRGKREFERYGGNDKIAVRTEDNMGGCGVRTWGSGKDTSDVEPTAPMEEPTVVEESQGTPEEESPAKVPELEVEEETQVQEMTLDEWKNLQEQTRPKPEFNIRKPESTVPSKAVVIHKSKYRDDMVKDDYEDDSHVFRKPANDITSQLEINFGNLPRPGRGARGGTRGGRGRIRRAENYGPRAEVVMQDVAPNPDDPEDFPALS

SEQ ID NO: 38173 - protein, 69 aa, Artificial Sequence
  Synthetic polypeptide
GPDRARSGLLEEGSSKDGMTAVGRRGCSKELSGDPTGNTDPMRQRGRQTSQLRSFQMKNQVIGLIETDR

SEQ ID NO: 38174 - protein, 49 aa, Artificial Sequence
  Synthetic polypeptide
RPRALELEKPGLLLYKTRTDLHIGTRRRSMVIRERERISKQELPRRLPT

SEQ ID NO: 38175 - protein, 662 aa, Artificial Sequence
  Synthetic polypeptide
DPELWSWKNPGYCFTKPELIFTLEQGEDPWLLEKEKGFLSRNSPEDSQPDEISEKSPENQGKHLLQVLFTNKLLTTEQEISGKPHNRDINIFRARMMPCKCDIAGSACQGLSLMAPHCQYSKEKAHERNVCDKWLISIKDGRTNTQEKSFAYSKIVKTLHHKEEVIQHQTIQTLGQDFEYNESRKAFLEKAALVTSNSTHPKGKSYNFNKFGENKYDKSTFIIPQNMNPEKSHYEFNDTGNCFCRITHKTLTGGKSFSQKSHIREHHRVHIGVKPFEYGKSFNRNSTLPVHQRTHATDKYSDYHPCTETFSYQSTFSVHQKVHIRAKPYEYNECGKSCSMNSHLIWPQKSHTGEKPYECPECGKAFSEKSRLRKHQRTHTGEKPYKCDGCDKAFSAKSGLRIHQRTHTGEKPFECHECGKSFNYKSILIVHQRTHTGEKPFECNECGKSFSHMSGLRNHRRTHTGERPYKCDECGKAFKLKSGLRKHHRTHTGEKPYKCNQCGKAFGQKSQLRGHHRIHTGEKPYKCNHCGEAFSQKSNLRVHHRTHTGEKPYQCEECGKTFRQKSNLRGHQRTHTGEKPYECNECGKAFSEKSVLRKHQRTHTGEKPYNCNQCGEAFSQKSNLRVHQRTHTGEKPYKCDKCGRTFSQKSSLREHQKAHPGD

SEQ ID NO: 38176 - protein, 18 aa, Artificial Sequence
  Synthetic polypeptide
TPSSGAGKTRATALQNQN

SEQ ID NO: 38177 - protein, 168 aa, Artificial Sequence
  Synthetic polypeptide
DPELWSWKNPGYCFTKPELIFTLEQGEDPWLLEKEKGFLSRNSPEDSQPDEISEKSPENQGKHLLQVLFTNKLLTTEQEISGKPHNRDINIFRARMMPCKCDIAGSACQGLSLMAPHCQYSKEKAHERNVCDKWLISIKDGRTNTQEKSFAYSKIVKTLHHKEEVIQH

SEQ ID NO: 38178 - protein, 18 aa, Artificial Sequence
  Synthetic polypeptide
RPRALELEKPGHQCHSRT

SEQ ID NO: 38179 - protein, 33 aa, Artificial Sequence
  Synthetic polypeptide
DPELWSWKNPGISVIPGRDCGIQPGGVAAHGPC

SEQ ID NO: 38180 - protein, 704 aa, Artificial Sequence
  Synthetic polypeptide
TPSSGAGKTRASVSFQDVTVEFSQEEWQHMGPVERTLYRDVMLENYSHLVSVGYCFTKPELIFTLEQGEDPWLLEKEKGFLSRNSPEDSQPDEISEKSPENQGKHLLQVLFTNKLLTTEQEISGKPHNRDINIFRARMMPCKCDIAGSACQGLSLMAPHCQYSKEKAHERNVCDKWLISIKDGRTNTQEKSFAYSKIVKTLHHKEEVIQHQTIQTLGQDFEYNESRKAFLEKAALVTSNSTHPKGKSYNFNKFGENKYDKSTFIIPQNMNPEKSHYEFNDTGNCFCRITHKTLTGGKSFSQKSHIREHHRVHIGVKPFEYGKSFNRNSTLPVHQRTHATDKYSDYHPCTETFSYQSTFSVHQKVHIRAKPYEYNECGKSCSMNSHLIWPQKSHTGEKPYECPECGKAFSEKSRLRKHQRTHTGEKPYKCDGCDKAFSAKSGLRIHQRTHTGEKPFECHECGKSFNYKSILIVHQRTHTGEKPFECNECGKSFSHMSGLRNHRRTHTGERPYKCDECGKAFKLKSGLRKHHRTHTGEKPYKCNQCGKAFGQKSQLRGHHRIHTGEKPYKCNHCGEAFSQKSNLRVHHRTHTGEKPYQCEECGKTFRQKSNLRGHQRTHTGEKPYECNECGKAFSEKSVLRKHQRTHTGEKPYNCNQCGEAFSQKSNLRVHQRTHTGEKPYKCDKCGRTFSQKSSLREHQKAHPGD

SEQ ID NO: 38181 - protein, 210 aa, Artificial Sequence
  Synthetic polypeptide
TPSSGAGKTRASVSFQDVTVEFSQEEWQHMGPVERTLYRDVMLENYSHLVSVGYCFTKPELIFTLEQGEDPWLLEKEKGFLSRNSPEDSQPDEISEKSPENQGKHLLQVLFTNKLLTTEQEISGKPHNRDINIFRARMMPCKCDIAGSACQGLSLMAPHCQYSKEKAHERNVCDKWLISIKDGRTNTQEKSFAYSKIVKTLHHKEEVIQH

SEQ ID NO: 38182 - protein, 16 aa, Artificial Sequence
  Synthetic polypeptide
HGPALFFECPTHWCPV

SEQ ID NO: 38183 - protein, 85 aa, Artificial Sequence
  Synthetic polypeptide
SQHFGRPRQADHEIRRSRPSWLNMGLLSFLSAPLIGALSDVWGRKPFLLGTVFFTCFPIPLMRISPCRVWWRAPVVPATCGRRMA

SEQ ID NO: 38184 - protein, 38 aa, Artificial Sequence; identical to SEQ ID NO: 38149
  Synthetic polypeptide

SEQ ID NO: 38185 - protein, 69 aa, Artificial Sequence
  Synthetic polypeptide
SQHFGRPRQADHEIRRSRPSWLNMGLLSFLSAPLIGALSDVWGRKPFLLGTVFFTCFPIPLMRISPCQA

SEQ ID NO: 38186 - protein, 63 aa, Artificial Sequence
  Synthetic polypeptide
IIVSQESPEERTVNVSSIRGKKWSWYLDYLFSQGLQGLKLFIRSSVHHSSIPRAEGINCNNQY

SEQ ID NO: 38187 - protein, 12 aa, Artificial Sequence
  Synthetic polypeptide
SLSVRKAQKKGQ

SEQ ID NO: 38188 - protein, 43 aa, Artificial Sequence
  Synthetic polypeptide
HCQSGKPRRKDSKCELYSGKEMELVFGLFIFTGVTRLETFYKK

SEQ ID NO: 38189 - protein, 31 aa, Artificial Sequence
  Synthetic polypeptide
SQHFGRPRRVYHLRSGDQDQPVQHDETPISS

SEQ ID NO: 38190 - protein, 64 aa, Artificial Sequence
  Synthetic polypeptide
GQGIKTSLSNMMKPPSLAKTTKKIVLRLECVEPNCRSKRMLAIKRCKHFELGGDKKRKGQVIQF

SEQ ID NO: 38191 - protein, 70 aa, Artificial Sequence
  Synthetic polypeptide
GQGIKTSLSNMMKPPSLAKTTKKIVLRLECVEPNCRSKRMLAIKRCKHFELGGDKKRKVYNYGWKVQSFS

SEQ ID NO: 38192 - protein, 76 aa, Artificial Sequence
  Synthetic polypeptide
GQGIKTSLSNMMKPPSLAKTTKKIVLRLECVEPNCRSKRMLAIKRCKHFELGGDKKRKLHQNCIEPNLPPRAQQSP

SEQ ID NO: 38193 - protein, 90 aa, Artificial Sequence
  Synthetic polypeptide
GERDQSLTCEDTARRCLSTSQEESPHQNLTLLDVDLRFLESRTKESRSVARLECSDTISAHCKLRFPSSSSSPASASRVAGTSGTSPSQA

SEQ ID NO: 38194 - protein, 42 aa, Artificial Sequence
  Synthetic polypeptide
DFLNLELRSLALSPGWSAATRFRLTANFASRVQAVLLPQPPE

SEQ ID NO: 38195 - protein, 71 aa, Artificial Sequence
  Synthetic polypeptide
VALACPVEHPCGGLQPAGATRILRALPGRHLPRWDASPEPCVAGPRGGSTQWLNTGKELALGVQTSKTCKT

SEQ ID NO: 38196 - protein, 20 aa, Artificial Sequence
  Synthetic polypeptide
TLGRNWHLESRHLKLAKLRE

SEQ ID NO: 38197 - protein, 449 aa, Artificial Sequence
  Synthetic polypeptide
NLQNLESNLTNLIKRNTELETLLAKLIQTCQHVEVNASRQEAKLTEECDLLIEIIQQRRQIIGTKIKEGKVMRLRKLAQQIANCKQCIERSASLISQAEHSLKENDHARFLQTAKNITERVSMATASSQVLIPEINLNDTFDTFALDFSREKKLLECLDYLTAPNPPTIREELCTASYDTITVHWTSDDEFSVVSYELQYTIFTGQANVVSLCNSADSWMIVPNIKQNHYTVHGLQSGTKYIFMVKAINQAGSRSSEPGKLKTNSQPFKLDPKSAHRKLKVSHDNLTVERDESSSKKSHTPERFTSQGSYGVAGNVFIDSGRHYWEVVISGSTWYAIGLAYKSAPKHEWIGKNSASWALCRCNNNWVVRHNSKEIPIEPAPHLRRVGILLDYDNGSIAFYDALNSIHLYTFDVAFAQPVCPTFTVWNKCLTIITGLPIPDHLDCTEQLP

SEQ ID NO: 38198 - protein, 334 aa, Artificial Sequence
  Synthetic polypeptide
NLQNLESNLTNLIKRNTELETLLAKLIQTCQHVEVNASRQEAKLTEECDLLIEIIQQRRQIIGTKIKEGKVMRLRKLAQQIANCKQCIERSASLISQAEHSLKENDHARFLQTAKNITERVSMATASSQVLIPEINLNDTFDTFALDFSREKKLLECLDYLTAPNPPTIREELCTASYDTITVHWTSDDEFSVVSYELQYTIFTGQANVVSLCNSADSWMIVPNIKQNHYTVHGLQSGTKYIFMVKAINQAGSRSSEPGKLKTNSQPFKLDPKSAHRKLKVSHDNLTVERDESSSKKSHTPERFTSQGSYGVAGNVFIDSGRHYWEVVISGSTW

SEQ ID NO: 38199 - protein, 265 aa, Artificial Sequence
  Synthetic polypeptide
NLQNLESNLTNLIKRNTELETLLAKLIQTCQHVEVNASRQEAKLTEECDLLIEIIQQRRQIIGTKIKEGKVMRLRKLAQQIANCKQCIERSASLISQAEHSLKENDHARFLQTAKNITERVSMATASSQVLIPEINLNDTFDTFALDFSREKKLLECLDYLTAPNPPTIREELCTASYDTITVHWTSDDEFSVVSYELQYTIFTGQANVVSLCNSADSWMIVPNIKQNHYTVHGLQSGTKYIFMVKAINQAGSRSSEPGKLKTNS

SEQ ID NO: 38200 - protein, 8 aa, Artificial Sequence
  Synthetic polypeptide
KQSRKKSA

SEQ ID NO: 38201 - protein, 48 aa, Artificial Sequence
  Synthetic polypeptide
SHRNRVERNLPESSRSPNKYNYHSRKAGETRMETAKAKSPIYHKVRTG

SEQ ID NO: 38202 - protein, 433 aa, Artificial Sequence
  Synthetic polypeptide
KEICLNLRDPPTNIIIIPEKQVKPEWRLPKLNHRFTTRSELDDMPENCICDVIGLLVFVGRVQRSKKKENREDFWSYRWIHIADGTSEQPFIVELFSTSQPEIFENIYPMAYFVCTQLKVVRNDNQVPKLLYLTTTNESGVFITGHRGQPYTYDAKNANRPSTSQAARVEIQERNGKRHQDDEPVNSQYFQTTSTNLSLSNKIRILQGPHANPVAVPQPGASVQTKGIKPGMPSIFNRRANINANLQGKARKTISDRWESQLWREKKFGLIDHLHYSRVYPESIPRKFMFEHRKFLSDQYNSQPAKYVPPEGRPPKLDDFKSARSLGHFEVTILGLNHEIAIDVAFLPMYCPEDIRTSQIDTLLTSMNYSCAYPQDTTGNDRLPGPRAVAGDIIKAATELDRVHIVGILDICNLGNNKVEVYLHKIYSPENTS

SEQ ID NO: 38203 - protein, 530 aa, Artificial Sequence
  Synthetic polypeptide
KEICLNLRDPPTNIIIIPEKQVKPEWRLPKLNHRFTTRSELDDMPENCICDVIGLLVFVGRVQRSKKKENREDFWSYRWIHIADGTSEQPFIVELFSTSQPEIFENIYPMAYFVCTQLKVVRNDNQVPKLLYLTTTNESGVFITGHRGQPYTYDAKVKNFIQWIRTKSDSGEQKNMVIGGYYPYPPVPETFSKYSSSIKVESLLTAISEVRKEIEDLQYREQKRIAIQGIITAIKYIPHSSATESASASETLRNANRPSTSQAARVEIQERNGKRHQDDEPVNSQYFQTTSTNLSLSNKIRILQGPHANPVAVPQPGASVQTKGIKPGMPSIFNRRANINANLQGKARKTISDRWESQLWREKKFGLIDHLHYSRVYPESIPRKFMFEHRKFLSDQYNSQPAKYVPPEGRPPKLDDFKSARSLGHFEVTILGLNHEIAIDVAFLPMYCPEDIRTSQIDTLLTSMNYSCAYPQDTTGNDRLPGPRAVAGDIIKAATELDRVHIVGILDICNLGNNKVEVYLHKIYSPENTS

SEQ ID NO: 38204 - protein, 242 aa, Artificial Sequence
  Synthetic polypeptide
KEICLNLRDPPTNIIIIPEKQVKPEWRLPKLNHRFTTRSELDDMPENCICDVIGLLVFVGRVQRSKKKENREDFWSYRWIHIADGTSEQPFIVELFSTSQPEIFENIYPMAYFVCTQLKVVRNDNQVPKLLYLTTTNESGVFITGHRGQPYTYDAKVKNFIQWIRTKSDSGEQKNMVIGGYYPYPPVPETFSKYSSSIKGTNVIASPSKYVYILYVWLMLFQLVIFILFFYGSDLKFSNIHR

SEQ ID NO: 38205 - protein, 12 aa, Artificial Sequence
  Synthetic polypeptide
MAWSPPCGTESG

SEQ ID NO: 38206 - protein, 422 aa, Artificial Sequence
  Synthetic polypeptide
GWITHEWLGALRVVLSQVSVVQVTIPDGFVNVTVGSNVTLICIYTTTVASREQLSIQWSFFHKKEMEPISHSSCLSTEGMEEKAVSQCLKMTHARDARGRCSWTSEIYFSQGGQAVAIGQFKDRITGSNDPGNASITISHMQPADSGIYICDVNNPPDFLGQNQGILNVSVLVKPSKPLCSVQGRPETGHTISLSCLSALGTPSPVYYWHKLEGRDIVPVKENFNPTTGILVIGNLTNFEQGYYQCTAINRLGNSSCEIDLTSSHPEVGIIVGALIGSLVGAAIIISVVCFARNKAKAKAKERNSKTIAELEPMTKINPRGESEAMPREDATQLEVTLPSSIHETGPDTIQEPDYEPKPTQEPAPEPAPGSEPMAVPDLDIELELEPETQSELEPEPEPEPESEPGVVVEPLSEDEKGVVKA

SEQ ID NO: 38207 - protein, 386 aa, Artificial Sequence
  Synthetic polypeptide
GWITHEWLGALRVVLSQVSVVQVTIPDGFVNVTVGSNVTLICIYTTTVASREQLSIQWSFFHKKEMEPISIYFSQGGQAVAIGQFKDRITGSNDPGNASITISHMQPADSGIYICDVNNPPDFLGQNQGILNVSVLVKPSKPLCSVQGRPETGHTISLSCLSALGTPSPVYYWHKLEGRDIVPVKENFNPTTGILVIGNLTNFEQGYYQCTAINRLGNSSCEIDLTSSHPEVGIIVGALIGSLVGAAIIISVVCFARNKAKAKAKERNSKTIAELEPMTKINPRGESEAMPREDATQLEVTLPSSIHETGPDTIQEPDYEPKPTQEPAPEPAPGSEPMAVPDLDIELELEPETQSELEPEPEPEPESEPGVVVEPLSEDEKGVVKA

SEQ ID NO: 38208 - protein, 167 aa, Artificial Sequence
  Synthetic polypeptide
GWITHEWLGALRVVLSQVSVVQVTIPDGFVNVTVGSNVTLICIYTTTVASREQLSIQWSFFHKKEMEPISHSSCLSTEGMEEKAVSQCLKMTHARDARGRCSWTSEIYFSQGGQAVAIGQFKDRITGSNDPGNASITISHMQPADSGIYICDVNNPPDFLGQNQGIL

SEQ ID NO: 38209 - protein, 45 aa, Artificial Sequence
  Synthetic polypeptide
SACYPRISWTSWGEGLAWVSWAPWKRWLAWDDWQSRLTWFQGSHW

SEQ ID NO: 38210 - protein, 1008 aa, Artificial Sequence
  Synthetic polypeptide
WKCKFSASPQDLLIITSGDGPGNLLVTPGFPGPRGEKGLPGFPGLPGKDGLPGMIGSPGLPGSKGATGDIFGAENGAPGEQGLQGLTGHKGFLGDSGLPGLKGVHGKPGLLGPKGERGSPGTPGQVGQPGTPGSSGPYGIKGKSGLPGAPGFPGISGHPGKKGTRGKKGPPGSIVKKGLPGLKGLPGNPGLVGLKGSPGSPGVAGLPALSGPKGEKGSVGFVGFPGIPGLPGIPGTRGLKGIPGSTGKMGPSGRAGTPGEKGDRGNPGPVGIPSPRRPMSNLWLKGDKGSQGSAGSNGFPGPRGDKGEAGRPGPPGLPGAPGLPGIIKGVSGKPGPPGFMGIRGLPGLKGSSGITGFPGMPGESGSQGIRGSPGLPGASGLPGLKGDNGQTVEISGSPGPKGQPGESGFKGTKGRDGLIGNIGFPGNKGEDGKVGVSGDVGLPGAPGFPGVAGMRGEPGLPGSSGHQGAIGPLGSPGLIGPKGFPGFPGLHGLNGLPGTKGTHGTPGPSITGVPGPAGLPGPKGEKGYPGIGIGAPGKPGLRGQKGDRGFPGLQGPAGLPGAPGISLPSLIAGQPGDPGRPGLDGERGRPGPAGPPGPPGPSSNQGDTGDPGFPGIPGPKGPKGDQGIPGFSGLPGELGLKGMRGEPGFMGTPGKVGPPGDPGFPGMKGKAGPRGSSGLQGDPGQTPTAEAVQVPPGPLGLPGIDGIPGLTGDPGAQGPVGLQGSKGLPGIPGKDGPSGLPGPPGALGDPGLPGLQGPPGFEGAPGQQGPFGMPGMPGQSMRVGYTLVKHSQSEQVPPCPIGMSQLWVGYSLLFVEGQEKAHNQDLGFAGSCLPRFSTMPFIYCNINEVCHYARRNDKSYWLSTTAPIPMMPVSQTQIPQYISRCSVCEAPSQAIAVHSQDITIPQCPLGWRSLWIGYSFLMHTAAGAEGGGQSLVSPGSCLEDFRATPFIECSGARGTCHYFANKYSFWLTTVEERQQFGELPVSETLKAGQLHTRVSRCQVCMKSL

SEQ ID NO: 38211 - protein, 38 aa, Artificial Sequence
  Synthetic polypeptide
PLGMGPVICLLPQDFLDLVGRRACLGFLGSLEKMACLG

SEQ ID NO: 38212 - protein, 951 aa, Artificial Sequence
  Synthetic polypeptide
WKCKFSASPQDLLIITSGDGPGNLLVTPGFPGPRGEKGLPGFPGLPGKDGLPGMIGSPGLPGSKGATGDIFGAENGAPGEQGLQGLTGHKGFLGDSGLPGLKGVHGKPGLLGPKGERGSPGTPGQVGQPGTPGSSGPYGIKGKSGLPGAPGFPGISGHPGKKGTRGKKGPPGSIVKKGLPGLKGLPGNPGLVGLKGSPGSPGVAGLPALSGPKGEKGSVGFVGFPGIPGLPGIPGTRGLKGIPGSTGKMGPSGRAGTPGEKGDRGNPGPVGIPSPRRPMSNLWLKGDKGSQGSAGSNGFPGPRGDKGEAGRPGPPGLPGAPGLPGIIKGVSGKPGPPGFMGIRGLPGLKGSSGITGFPGMPGESGSQGIRGSPGLPGASGLPGLKGDNGQTVEISGSPGPKGQPGESGFKGTKGRDGLIGNIGFPGNKGEDGKVGVSGDVGLPGAPGFPGVAGMRGEPGLPGSSGHQGAIGPLGSPGLIGPKGPSITGVPGPAGLPGPKGEKGYPGIGIGAPGKPGLRGQKGDRGFPGLQGPAGLPGAPGISLPSLIAGQPGDPGRPGLDGERGRPGPAGPPGPPGPSSNQGDTGDPGFPGIPGPKGPKGDQGIPGFSGLPGELGLKGSSGLQGDPGQTPTAEAVQVPPGPLGLPGIDGIPGLTGDPGAQGPVGLQGSKGLPGIPGKDGPSGLPGPPGALGDPGLPGLQGPPGFEGAPGQQGPFGMPGMPGQSMRVGYTLVKHSQSEQVPPCPIGMSQLWVGYSLLFVEGQEKAHNQDLGFAGSCLPRFSTMPFIYCNINEVCHYARRNDKSYWLSTTAPIPMMPVSQTQIPQYISRCSVCEAPSQAIAVHSQDITIPQCPLGWRSLWIGYSFLMHTAAGAEGGGQSLVSPGSCLEDFRATPFIECSGARGTCHYFANKYSFWLTTVEERQQFGELPVSETLKAGQLHTRVSRCQVCMKSL

SEQ ID NO: 38213 - protein, 984 aa, Artificial Sequence
  Synthetic polypeptide
WKCKFSASPQDLLIITSGDGPGNLLVTPGFPGPRGEKGLPGFPGLPGKDGLPGMIGSPGLPGSKGATGDIFGAENGAPGEQGLQGLTGHKGFLGDSGLPGLKGVHGKPGLLGPKGERGSPGTPGQVGQPGTPGSSGPYGIKGKSGLPGAPGFPGISGHPGKKGTRGKKGPPGSIVKKGLPGLKGLPGNPGLVGLKGSPGSPGVAGLPALSGPKGEKGSVGFVGFPGIPGLPGIPGTRGLKGIPGSTGKMGPSGRAGTPGEKGDRGNPGPVGIPSPRRPMSNLWLKGDKGSQGSAGSNGFPGPRGDKGEAGRPGPPGLPGAPGLPGIIKGVSGKPGPPGFMGIRGLPGLKGSSGITGFPGMPGESGSQGIRGSPGLPGASGLPGLKGDNGQTVEISGSPGPKGQPGESGFKGTKGRDGLIGNIGFPGNKGEDGKVGVSGDVGLPGAPGFPGVAGMRGEPGLPGSSGHQGAIGPLGSPGLIGPKGPSITGVPGPAGLPGPKGEKGYPGIGIGAPGKPGLRGQKGDRGFPGLQGPAGLPGAPGISLPSLIAGQPGDPGRPGLDGERGRPGPAGPPGPPGPSSNQGDTGDPGFPGIPGPKGPKGDQGIPGFSGLPGELGLKGMRGEPGFMGTPGKVGPPGDPGFPGMKGKAGPRGSSGLQGDPGQTPTAEAVQVPPGPLGLPGIDGIPGLTGDPGAQGPVGLQGSKGLPGIPGKDGPSGLPGPPGALGDPGLPGLQGPPGFEGAPGQQGPFGMPGMPGQSMRVGYTLVKHSQSEQVPPCPIGMSQLWVGYSLLFVEGQEKAHNQDLGFAGSCLPRFSTMPFIYCNINEVCHYARRNDKSYWLSTTAPIPMMPVSQTQIPQYISRCSVCEAPSQAIAVHSQDITIPQCPLGWRSLWIGYSFLMHTAAGAEGGGQSLVSPGSCLEDFRATPFIECSGARGTCHYFANKYSFWLTTVEERQQFGELPVSETLKAGQLHTRVSRCQVCMKSL

SEQ ID NO: 38214 - protein, 1684 aa, Artificial Sequence
  Synthetic polypeptide
NFRFCYSTSAYWKNLYDGLLACYGCSPGSKCDCSGIKGEKGERGFPGLEGHPGLPGFPGPEGPPGPRGQKGDDGIPGPPGPKGIRGPPGLPGFPGTPGLPGMPGHDGAPGPQGIPGCNGTKGERGFPGSPGFPGLQGPPGPPGIPGMKGEPGSIIMSSLPGPKGNPGYPGPPGIQGLPGPTGIPGPIGPPGPPGLMGPPGPPGLPGPKGNMGLNFQGPKGEKGEQGLQGPPGPPGQISEQKRPIDVEFQKGDQGLPGDRGPPGPPGIRGPPGPPGGEKGEKGEQGEPGKRGKPGKDGENGQPGIPGLPGDPGYPGEPGRDGEKGQKGDTGPPGPPGLVIPRPGTGITIGEKGNIGLPGLPGEKGERGFPGIQGPPGLPGPPGAAVMGPPGPPGFPGERGQKGDEGPPGISIPGPPGLDGQPGAPGLPGPPGPAGPHIPPSDEICEPGPPGPPGSPGDKGLQGEQGVKGDKGDTCFNCIGTGISGPPGQPGLPGLPGPPGSLGFPGQKGEKGQAGATGPKGLPGIPGAPGAPGFPGSKGEPGDILTFPGMKGDKGELGSPGAPGLPGLPGTPGQDGLPGLPGPKGEPGGITFKGERGPPGNPGLPGLPGNIGPMGPPGFGPPGPVGEKGIQGVAGNPGQPGIPGPKGDPGQTITQPGKPGLPGNPGRDGDVGLPGDPGLPGQPGLPGIPGSKGEPGIPGIGLPGPPGPKGFPGIPGPPGAPGTPGRIGLEGPPGPPGFPGPKGEPGFALPGPPGPPGLPGFKGALGPKGDRGFPGPPGPPGRTGLDGLPGPKGDVGPNGQPGPMGPPGLPGIGVQGPPGPPGIPGPIGQPGLHGIPGEKGDPGPPGLDVPGPPGERGSPGIPGAPGPIGPPGSPGLPGKAGASGFPGTKGEMGMMGPPGPPGPLGIPGRSGVPGLKGDDGLQGQPGLPGPTGEKGSKGEPGLPGPPGPMDPNLLGSKGEKGEPGLPGIPGVSGPKGYQGLPGDPGQPGLSGQPGLPGPPGPKGNPGLPGQPGLIGPPGLKGTIGDMGFPGPQGVEGPPGPSGVPGQPGSPGLPGQKGDKGDPGISSIGLPGLPGPKGEPGLPGYPGNPGIKGSVGDPGLPGLPGTPGAKGQPGLPGFPGTPGPPGPKGISGPPGNPGLPGEPGPVGGGGHPGQPGPPGEKGKPGQDGIPGPAGQKGEPGQPGFGNPGPPGLPGLSGQKGDGGLPGIPGNPGLPGPKGEPGFHGFPGVQGPPGPPGSPGPALEGPKGNPGPQGPPGRPGPTGFQGLPGPEGPPGLPGNGGIKGEKGNPGQPGLPGLPGLKGDQGPPGLQGNPGRPGLNGMKGDPGLPGVPGFPGMKGPSGVPGSAGPEGEPGLIGPPGPPGLPGPSGQSIIIKGDAGPPGIPGQPGLKGLPGPQGPQGLPGPTGPPGDPGRNGLPGFDGAGGRKGDPGLPGQPGTRGLDGPPGPDGLQGPPGPPGTSSVAHGFLITRHSQTTDAPQCPQGTLQVYEGFSLLYVQGNKRAHGQDLGTAGSCLRRFSTMPFMFCNINNVCNFASRNDYSYWLSTPEPMPMSMQPLKGQSIQPFISRCAVCEAPAVVIAVHSQTIQIPHCPQGWDSLWIGYSFMMHTSAGAEGSGQALASPGSCLEEFRSAPFIECHGRGTCNYYANSYSFWLATVDVSDMFSKPQSETLKAGDLRTRISRCQVCMKRT

SEQ ID NO: 38215 - protein, 53 aa, Artificial Sequence
  Synthetic polypeptide
VCVSLEHLNQNYLEMFIKISDSAIQLQLTGRIFTMGCWLAMGVLQDQSVTAVA

SEQ ID NO: 38216 - protein, 35 aa, Artificial Sequence
  Synthetic polypeptide
RCLLKFQILLFNFSLLEESLRWVAGLLWVFSRIKV

SEQ ID NO: 38217 - protein, 1678 aa, Artificial Sequence
  Synthetic polypeptide
NFRFCYSTSAYWKNLYDGLLACYGCSPGSKCDCSGIKGEKGERGFPGLEGHPGLPGFPGPEGPPGPRGQKGDDGIPGPPGPKGIRGPPGLPGFPGTPGLPGMPGHDGAPGPQGIPGCNGTKGERGFPGSPGFPGLQGPPGPPGIPGMKGEPGSIIMSSLPGPKGNPGYPGPPGIQGLPGPTGIPGPIGPPGPPGLMGPPGPPGLPGPKGNMGLNFQGPKGEKGEQGLQGPPGPPGQISEQKRPIDVEFQKGDQGLPGDRGPPGPPGIRGPPGPPGGEKGEKGEQGEPGKRGKPGKDGENGQPGIPGLPGDPGYPGEPGRDGEKGQKGDTGPPGPPGLVIPRPGTGITIGEKGNIGLPGLPGEKGERGFPGIQGPPGLPGPPGAAVMGPPGPPGFPGERGQKGDEGPPGISIPGPPGLDGQPGAPGLPGPPGPAGPHIPPSDEICEPGPPGPPGSPGDKGLQGEQGVKGDKGDTCFNCIGTGISGPPGQPGLPGLPGPPGSLGFPGQKGEKGQAGATGPKGLPGIPGAPGAPGFPGSKGEPGDILTFPGMKGDKGELGSPGAPGLPGLPGTPGQDGLPGLPGPKGEPGGITFKGERGPPGNPGLPGLPGNIGPMGPPGFGPPGPVGEKGIQGVAGNPGQPGIPGPKGDPGQTITQPGKPGLPGNPGRDGDVGLPGDPGLPGQPGLPGIPGSKGEPGIPGIGLPGPPGPKGFPGIPGPPGAPGTPGRIGLEGPPGPPGFPGPKGEPGFALPGPPGPPGLPGFKGALGPKGDRGFPGPPGPPGRTGLDGLPGPKGDVGPNGQPGPMGPPGLPGIGVQGPPGPPGIPGPIGQPGLHGIPGEKGDPGPPGLDVPGPPGERGSPGIPGAPGPIGPPGSPGLPGKAGASGFPGTKGEMGMMGPPGPPGPLGIPGRSGVPGLKGDDGLQGQPGLPGPTGEKGSKGEPGLPGPPGPMDPNLLGSKGEKGEPGLPGIPGVSGPKGYQGLPGDPGQPGLSGQPGLPGPPGPKGNPGLPGQPGLIGPPGLKGTIGDMGFPGPQGVEGPPGPSGVPGQPGSPGLPGQKGDKGDPGISSIGLPGLPGPKGEPGLPGYPGNPGIKGSVGDPGLPGLPGTPGAKGQPGLPGFPGTPGPPGPKGISGPPGNPGLPGEPGPVGGGGHPGQPGPPGEKGKPGQDGIPGPAGQKGEPGQPGFGNPGPPGLPGLSGQKGDGGLPGIPGNPGLPGPKGEPGFHGFPGVQGPPGPPGSPGPALEGPKGNPGPQGPPGRPGLPGPEGPPGLPGNGGIKGEKGNPGQPGLPGLPGLKGDQGPPGLQGNPGRPGLNGMKGDPGLPGVPGFPGMKGPSGVPGSAGPEGEPGLIGPPGPPGLPGPSGQSIIIKGDAGPPGIPGQPGLKGLPGPQGPQGLPGPTGPPGDPGRNGLPGFDGAGGRKGDPGLPGQPGTRGLDGPPGPDGLQGPPGPPGTSSVAHGFLITRHSQTTDAPQCPQGTLQVYEGFSLLYVQGNKRAHGQDLGTAGSCLRRFSTMPFMFCNINNVCNFASRNDYSYWLSTPEPMPMSMQPLKGQSIQPFISRCAVCEAPAVVIAVHSQTIQIPHCPQGWDSLWIGYSFMMHTSAGAEGSGQALASPGSCLEEFRSAPFIECHGRGTCNYYANSYSFWLATVDVSDMFSKPQSETLKAGDLRTRISRCQVCMKRT

SEQ ID NO: 38218 - protein, 14 aa, Artificial Sequence
  Synthetic polypeptide
TFQQSSLRTGHVRR

SEQ ID NO: 38219 - protein, 14 aa, Artificial Sequence
  Synthetic polypeptide
TVRPSSNLPCGPDT

SEQ ID NO: 38220 - protein, 175 aa, Artificial Sequence
  Synthetic polypeptide
NRPLDLPAIFPADRTREEVVTPTLPEHTATRSQMATSLDFKTYVDQACRAAEEFVNIYYETMDKRRRALTRLYLDKATLIWNGNAVSGLDALNNFFDTLPSSEFQVNMLDCQPVHEQATQSQTTVLVVTSGTVKFDGNKQHFFNQNFLLTAQSTPNNTVWKIASDCFRFQDWSSS

SEQ ID NO: 38221 - protein, 23 aa, Artificial Sequence
  Synthetic polypeptide
EFKNPLALPGKCGVNMHLFGHWE

SEQ ID NO: 38222 - protein, 241 aa, Artificial Sequence
  Synthetic polypeptide
ICTCLVTGNKMTSLNLATIFGPNLLHKQKSSDKEFSVQSSARAEESTAIIAVVQKMIENYEALFMVPPDLQNEVLISLLETDPDVVDYLLRRKASQSSSPDMLQSEVSFSVGGRHSSTDSNKASSGDISPYDNNSPVLSERSLLAMQEDAAPGGSEKLYRVPGQFMLVGHLSSSKSRESSPGPRLGKDLSEEPFDIWGTWHSTLKSGSKDPGMTGTTPLLNISSQEDHRQKDLRLIFKIYP

SEQ ID NO: 38223 - protein, 24 aa, Artificial Sequence
  Synthetic polypeptide
VQEPPGTAWKMWCEYALVWSLGIK

SEQ ID NO: 38224 - protein, 436 aa, Artificial Sequence
  Synthetic polypeptide
ICTCLVTGNKMTSLNLATIFGPNLLHKQKSSDKEFSVQSSARAEESTAIIAVVQKMIENYEALFMVPPDLQNEVLISLLETDPDVVDYLLRRKASQSSSPDMLQSEVSFSVGGRHSSTDSNKASSGDISPYDNNSPVLSERSLLAMQEDAAPGGSEKLYRVPGQFMLVGHLSSSKSRESSPGPRLGKDLSEEPFDIWGTWHSTLKSGSKDPGMTGSSGDIFESSSLRAGPCSLSQGNLSPNWPRWQGSPAELDSDTQGARRTQAAAPATEGRAHPAVSRACSTPHVQVAGKAERPTARSEQYLTLSGAHDLSESELDVAGLQSRATPQCQRPHGSGRDDKRPPPPYPGPGKPAAAAAWIQGPPEGVETPTDQGGQAAEREQQVTQKKLSSANSLPAGEQDSPRLGDAGWLDWQRERWQIWELLSTDNPDALPETLV

SEQ ID NO: 38225 - protein, 120 aa, Artificial Sequence
  Synthetic polypeptide
ICTCLVTGNKMTSLNLATIFGPNLLHKQKSSDKEFSVQSSARAEESTAIIAVVQKMIENYEALFMVPPDLQNEVLISLLETDPDVVDYLLRRKASQSSTSSVLPAAVQACPQYPASMFTP

SEQ ID NO: 38226 - protein, 227 aa, Artificial Sequence
  Synthetic polypeptide
ICTCLVTGNKMTSLNLATIFGPNLLHKQKSSDKEFSVQSSARAEESTAIIAVVQKMIENYEALFMVPPDLQNEVLISLLETDPDVVDYLLRRKASQSSSPDMLQSEVSFSVGGRHSSTDSNKASSGDISPYDNNSPVLSERSLLAMQEDAAPGGSEKLYRVPGQFMLVGHLSSSKSRESSPGPRLGKGNWSLASRRWPKQATLLLLHVAWCGALRTFSSSLPYLMFL

SEQ ID NO: 38227 - protein, 29 aa, Artificial Sequence
  Synthetic polypeptide
SCPSVSAGSTCIQPTLIENMWGKKAKKKV

SEQ ID NO: 38228 - protein, 212 aa, Artificial Sequence
  Synthetic polypeptide
LKICGEKRQKKKYKSMRKSSSGNENDEQDSDNANMSTQSPVSSEEYDRTDGFSHSPFGLKPRSAFSRSSRQEYGAADPGFTMRRKMEHLREEREQIRQLRNNLESRLKVILPDDIGAALMDGVVLCHLANHIRPRSVASIHVPSPAVPKLSMAKCRRNVENFLDACKKLGVSQERLCLPHHILEERGLVKVGVTVQALLELPTTKASQLSVA

SEQ ID NO: 38229 - protein, 14 aa, Artificial Sequence
  Synthetic polypeptide
KYVGKKGKKKSINQ

SEQ ID NO: 38230 - protein, 195 aa, Artificial Sequence
  Synthetic polypeptide
LKICGEKRQKKKYKSMRKSSSGNENDEEYDRTDGFSHSPFGLKPRSAFSRSSRQEYGAADPGFTMRRKMEHLREEREQIRQLRNNLESRLKVILPDDIGAALMDGVVLCHLANHIRPRSVASIHVPSPAVPKLSMAKCRRNVENFLDACKKLGVSQERLCLPHHILEERGLVKVGVTVQALLELPTTKASQLSVA

SEQ ID NO: 38231 - protein, 48 aa, Artificial Sequence
  Synthetic polypeptide
ISLTRSDGFKKGRFPAQALFSCLPLCEMCLLPSTMTVRFPQPHGTTTL

SEQ ID NO: 38232 - protein, 13 aa, Artificial Sequence
  Synthetic polypeptide
GFPSHMELRHYNL

SEQ ID NO: 38233 - protein, 66 aa, Artificial Sequence
  Synthetic polypeptide
DVPFTFHHDCEVSPATWNYDIIIYKELEGTNAEEEKNKRQNHSKKESPSRQQSKAHRHRHRRGEVQ

SEQ ID NO: 38234 - protein, 301 aa, Artificial Sequence
  Synthetic polypeptide
DVPFTFHHDCEVSPATWNYDIIIYKELEGTNAEEEKNKRQNHSKKESPSRQQSKAHRHRHRRGYSRCRSNSEEGNHDKKPSQKPSGFKSGQHPLNGQPLIEQEKCSDNYEAQAEKNQGQSEGNQHQSEGNPDKSEESQGQPEENHHSERSRNHLERSLSQSDRSQGQLKRHHPQYERSHGQYKRSHGQSERSHGHSERSHGHSERSHGHSERSHGHSKRSRSQGDLVDTQSDLIATQRDLIATQKDLIATQRDLIATQRDLIVTQRDLVATERDLINQSGRSHGQSERHQRYSTGKNTITT

SEQ ID NO: 38235 - protein, 50 aa, Artificial Sequence
  Synthetic polypeptide
PISRGRGRPTHEIVPWRQRNGPLIPFAVFQGRTYTHLYQQYPQFCGVTGL

SEQ ID NO: 38236 - protein, 645 aa, Artificial Sequence
  Synthetic polypeptide
SQHFGRPSRVDHLRSRVRDQPDQSLVEEEDQHMKLSLGGSEMGLSSHLQSSKAGPTRIFTSNTHSSVVLQGFDQLRLEGLLCDVTLMPGDTDDAFPVHRVMMASASDYFKAMFTGGMKEQDLMCIKLHGVSKVGLRKIIDFIYTAKLSLNMDNLQDTLEAASFLQILPVLDFCKVFLISGVTLDNCVEVGRIANTYNLTEVDKYVNSFVLKNFPALLSTGEFLKLPFERLAFVLSSNSLKHCTELELFKATCRWLRLEEPRMDFAAKLMKNIRFPLMTPQELINYVQTVDFMRTDNTCVNLLLEASNYQMMPYMQPVMQSDRTAIRSDTTHLVTLGGVLRQQLVVSKELRMYDEKAHEWKSLAPMDAPRYQHGIAVIGNFLYVVGGQSNYDTKGKTAVDTVFRFDPRYNKWMQVASLNEKRTFFHLSALKGYLYAVGGRNAAGELPTVECYNPRTNEWTYVAKMSEPHYGHAGTVYGGVMYISGGITHDTFQKELMCFDPDTDKWIQKAPMTTVRGLHCMCTVGERLYVIGGNHFRGTSDYDDVLSCEYYSPILDQWTPIAAMLRGQSDVGVAVFENKIYVVGGYSWNNRCMVEIVQKYDPDKDEWHKVFDLPESLGGIRACTLTVFPPEETTPSPSRESPLSAP

SEQ ID NO: 38237 - protein, 19 aa, Artificial Sequence
  Synthetic polypeptide
GQEFETSLTNLSWKRKTNT

SEQ ID NO: 38238 - protein, 29 aa, Artificial Sequence
  Synthetic polypeptide
RRPRPHPVCSLLYSEHPAHDLSWKRKTNT

SEQ ID NO: 38239 - protein, 105 aa, Artificial Sequence
  Synthetic polypeptide
TRSPPLKVNSSHTLALLCHNYAYLMPGHLPTCLWLHEGDLDLIRFAHCCILSTQHMISRGRGRPTHEIVPWRQRNGPLIPFAVFQGRTYTHLYQQYPQFCGVTGL

SEQ ID NO: 38240 - protein, 17 aa, Artificial Sequence
  Synthetic polypeptide
DLCLSPSNLSWKRKTNT

SEQ ID NO: 38241 - protein, 77 aa, Artificial Sequence
  Synthetic polypeptide
FGDHEGTFTYRQAVRQSPSGETFAYRQAISRGRGRPTHEIVPWRQRNGPLIPFAVFQGRTYTHLYQQYPQFCGVTGL

SEQ ID NO: 38242 - protein, 636 aa, Artificial Sequence
  Synthetic polypeptide
DNRRAVRPLPIAKQSLVEEEDQHMKLSLGGSEMGLSSHLQSSKAGPTRIFTSNTHSSVVLQGFDQLRLEGLLCDVTLMPGDTDDAFPVHRVMMASASDYFKAMFTGGMKEQDLMCIKLHGVSKVGLRKIIDFIYTAKLSLNMDNLQDTLEAASFLQILPVLDFCKVFLISGVTLDNCVEVGRIANTYNLTEVDKYVNSFVLKNFPALLSTGEFLKLPFERLAFVLSSNSLKHCTELELFKATCRWLRLEEPRMDFAAKLMKNIRFPLMTPQELINYVQTVDFMRTDNTCVNLLLEASNYQMMPYMQPVMQSDRTAIRSDTTHLVTLGGVLRQQLVVSKELRMYDEKAHEWKSLAPMDAPRYQHGIAVIGNFLYVVGGQSNYDTKGKTAVDTVFRFDPRYNKWMQVASLNEKRTFFHLSALKGYLYAVGGRNAAGELPTVECYNPRTNEWTYVAKMSEPHYGHAGTVYGGVMYISGGITHDTFQKELMCFDPDTDKWIQKAPMTTVRGLHCMCTVGERLYVIGGNHFRGTSDYDDVLSCEYYSPILDQWTPIAAMLRGQSDVGVAVFENKIYVVGGYSWNNRCMVEIVQKYDPDKDEWHKVFDLPESLGGIRACTLTVFPPEETTPSPSRESPLSAP

SEQ ID NO: 38243 - protein, 28 aa, Artificial Sequence
  Synthetic polypeptide
TENQMPHVLTYKWELDNENTWTHGGPRG

SEQ ID NO: 38244 - protein, 175 aa, Artificial Sequence
  Synthetic polypeptide
QKTKCHMFSLISGSWTMRTHGHMEVQEAKCENPEFERNVENTSCFMVPGVLPDTLNTVRIRVKTNKLCYEDDKLWSNWSQEMSIGKKRNSTLYITMLLIVPVIVAGAIIVLLLYLKRLKIIIFPPIPDPGKIFKEMFGDQNDDTLHWKKYDIYEKQTKEETDSVVLIENLKKASQ

SEQ ID NO: 38245 - protein, 37 aa, Artificial Sequence
  Synthetic polypeptide
EHMDTWRSKRLNVRIQNLREMWRIHLVSWSLVFFLIL

SEQ ID NO: 38246 - protein, 28 aa, Artificial Sequence
  Synthetic polypeptide
ACCFIPQWTLTPSQLTRLRAPTSHTVEE

SEQ ID NO: 38247 - protein, 60 aa, Artificial Sequence
  Synthetic polypeptide
PHHSSQGSEPLPPTQWRSRCPFLRSSGLLPADSEGPGGPGALEWIDSQFTEDSSIFWNYV

SEQ ID NO: 38248 - protein, 127 aa, Artificial Sequence
  Synthetic polypeptide
MLLYTPVDFDPITAHKAQSPYLPHSGGVDVHFSGAVDCFRQIVKAQGVLGLWNGLTANLLKIVPYFGIMFSTFEFCKRICLYQNGYILSPLSYKLTPGVDQSLQPQELRELKKFFKTRKPKPKKPTL

SEQ ID NO: 38249 - protein, 70 aa, Artificial Sequence
  Synthetic polypeptide
MLLYTPVDFDPITAHKAQSPYLPHSGGVDVHFSGAVDCFRQIVKAQGVLGLWNGLTANLLKIVPYFGIMF

SEQ ID NO: 38250 - protein, 120 aa, Artificial Sequence
  Synthetic polypeptide
ASSSSSVLRAQSPYLPHSGGVDVHFSGAVDCFRQIVKAQGVLGLWNGLTANLLKIVPYFGIMFSTFEFCKRICLYQNGYILSPLSYKLTPGVDQSLQPQELRELKKFFKTRKPKPKKPTL

SEQ ID NO: 38251 - protein, 72 aa, Artificial Sequence
  Synthetic polypeptide
TCVHHITHLSLIFLICFEGSEPLPPTQWRSRCPFLRSSGLLPADSEGPGGPGALEWIDSQFTEDSSIFWNYV

SEQ ID NO: 38252 - protein, 63 aa, Artificial Sequence
  Synthetic polypeptide
ASSSSSVLRAQSPYLPHSGGVDVHFSGAVDCFRQIVKAQGVLGLWNGLTANLLKIVPYFGIMF

SEQ ID NO: 38253 - protein, 96 aa, Artificial Sequence
  Synthetic polypeptide
DQPGQHGETLSLQKKVMMTKRTKDMGKFSSVTVSTIDEEEEEIEAREVADSYAQNAKVIEKQLERKGMSKRRLQELAELEAKKAKMKGTLIDNQFK

SEQ ID NO: 38254 - protein, 20 aa, Artificial Sequence
  Synthetic polypeptide
GQEFETSLGSTARPYLYKKK

SEQ ID NO: 38255 - protein, 62 aa, Artificial Sequence
  Synthetic polypeptide
WAWWLMPVIPALWEAEVGGSLEARSLRPAWAARRDPISTKKSDDDQTDQRHGQVQFCHRVYH

SEQ ID NO: 38256 - protein, 19 aa, Artificial Sequence
  Synthetic polypeptide
TQPGQHENCNHFRPWHCDI

SEQ ID NO: 38257 - protein, 378 aa, Artificial Sequence
  Synthetic polypeptide
WAWWLMPVIPAFWKAKAGGLLEPSPGNMKTVTISDHGTVTYNGSICGDDQNGPKIAVQFGPGFSWIANFTKAASTYSIDSVSFSYNTGDNTTFPDAEDKGILTVDELLAIRIPLNDLFRCNSLSTLEKNDVVQHYWDVLVQAFVQNGTVSTNEFLCDKDKTSTVAPTIHTTVPSPTTTPTPKEKPEAGTYSVNNGNDTCLLATMGLQLNITQDKVASVININPNTTHSTGSCRSHTALLRLNSSTIKYLDFVFAVKNENRFYLKEVNISMYLVNGSVFSIANNNLSYWDAPLGSSYMCNKEQTVSVSGAFQINTFDLRVQPFNVTQGKYSTAEECSADSDLNFLIPVAVGVALGFLIIVVFISYMIGRRKSRTGYQSV

SEQ ID NO: 38258 - protein, 377 aa, Artificial Sequence
  Synthetic polypeptide
WAWWLMPVIPAFWKAKAGGLLEPSPGNMKTVTISDHGTVTYNGSICGDDQNGPKIAVQFGPGFSWIANFTKAASTYSIDSVSFSYNTGDNTTFPDAEDKGILTVDELLAIRIPLNDLFRCNSLSTLEKNDVVQHYWDVLVQAFVQNGTVSTNEFLCDKDKTSTVAPTIHTTVPSPTTTPTPKEKPEAGTYSVNNGNDTCLLATMGLQLNITQDKVASVININPNTTHSTGSCRSHTALLRLNSSTIKYLDFVFAVKNENRFYLKEVNISMYLVNGSVFSIANNNLSYWDAPLGSSYMCNKEQTVSVSGAFQINTFDLRVQPFNVTQGKYSTAQDCSADDDNFLVPIAVGAALAGVLILVLLAYFIGLKHHHAGYEQF

SEQ ID NO: 38259 - protein, 377 aa, Artificial Sequence
  Synthetic polypeptide
WAWWLMPVIPAFWKAKAGGLLEPSPGNMKTVTISDHGTVTYNGSICGDDQNGPKIAVQFGPGFSWIANFTKAASTYSIDSVSFSYNTGDNTTFPDAEDKGILTVDELLAIRIPLNDLFRCNSLSTLEKNDVVQHYWDVLVQAFVQNGTVSTNEFLCDKDKTSTVAPTIHTTVPSPTTTPTPKEKPEAGTYSVNNGNDTCLLATMGLQLNITQDKVASVININPNTTHSTGSCRSHTALLRLNSSTIKYLDFVFAVKNENRFYLKEVNISMYLVNGSVFSIANNNLSYWDAPLGSSYMCNKEQTVSVSGAFQINTFDLRVQPFNVTQGKYSTAQECSLDDDTILIPIIVGAGLSGLIIVIVIAYVIGRRKSYAGYQTL

SEQ ID NO: 38260 - protein, 65 aa, Artificial Sequence
  Synthetic polypeptide
CHRWKIPHFTSFDRLQSKLCFMHKRYKIIFRLCKPADLKKRIESLIDRDYMERDKENPNQYNYIA

SEQ ID NO: 38261 - protein, 63 aa, Artificial Sequence
  Synthetic polypeptide
TPLMRIQNLKCSKIGNFECQHDATGGKFHTLPHLTGCSQNFVSCTKGIKLSSGYVSLLILRRE

SEQ ID NO: 38262 - protein, 41 aa, Artificial Sequence
  Synthetic polypeptide
WRRVEQDGRIESATDHTPPPQGHQVNYLHRRNTFIRIKNQI

SEQ ID NO: 38263 - protein, 182 aa, Artificial Sequence
  Synthetic polypeptide
ESKIRFDEKENVSNCIQLKTSVIKGIKNQLIEQFPGIEPWLNQIMPKKDPVKIVRCHEHIEILTVNGELLFFRQREGPFYPTLRLLHKYPFILPHQQVDKGAIKFVLSGANIMCPGLTSPGAKLYPAAVDTIVAIMAEGKQHALCVGVMKMSAEDIEKVNKGIGIENIHYLNDGLWHMKTYK

SEQ ID NO: 38264 - protein, 27 aa, Artificial Sequence
  Synthetic polypeptide
LPTQKKYLHKNQKSDLMKKKMCPTASS

SEQ ID NO: 38265 - protein, 1316 aa, Artificial Sequence
  Synthetic polypeptide
TFPRLSCSHRTKSSGWPPPSGTWGLSQVPPYGWEMTANRDGRDYFINHMTQAIPFDDPRLESCQIIPPAPRKVEMRRDPVLGFGFVAGSEKPVVVRSVTPGGPSEGKLIPGDQIVMINDEPVSAAPRERVIDLVRSCKESILLTVIQPYPSPKSAFISAAKKARLKSNPVKVRFSEEVIINGQVSETVKDNSLLFMPNVLKVYLENGQTKSFRFDCSTSIKDVILTLQEKLSIKGIEHFSLMLEQRTEGAGTKLLLLHEQETLTQVTQRPSSHKMRCLFRISFVPKDPIDLLRRDPVAFEYLYVQSCNDVVQERFGPELKYDIALRLAALQMYIATVTTKQTQKISLKYIEKEWGLETFLPSAVLQSMKEKNIKKALSHLVKANQNLVPPGKKLSALQAKVHYLKFLSDLRLYGGRVFKATLVQAEKRSEVTLLVGPRYGISHVINTKTNLVALLADFSHVNRIEMFSEEESLVRVELHVLDVKPITLLMESSDAMNLACLTAGYYRLLVDSRRSIFNMANKKNTATQETGPENKGKHNLLGPDWNCIPQMTTFIGEGEQEAQITYIDSKQKTVEITDSTMCPKEHRHLYIDNAYSSDGLNQQLSQPGEAPCEADYRSLAQRSLLTLSGPETLKKAQESPRGAKVSFIFGDFALDDGISPPTLGYETLLDEGPEMLEKQRNLYIGSANDMKGLDLTPEAEGIQFVENSVYANIGDVKSFQAAEGIEEPLLHDICYAENTDDAEDEDEVSCEEDLVVGEMNQPAILNLSGSSDDIIDLTSLPPPEGDDNEDDFLLRSLNMAIAAPPPGFRDSSDEEDSQSQAASFPEDKEKGSSLQNDEIPVSLIDAVPTSAEGKCEKGLDNAVVSTLGALEALSVSEEQQTSDNSGVAILRAYSPESSSDSGNETNSSEMTESSELATAQKQSENLSRMFLATHEGYHPLAEEQTEFPASKTPAGGLPPKSSHALAARPATDLPPKVVPSKQLLHSDHMEMEPETMETKSVTDYFSKLHMGSVAYSCTSKRKSKLADGEGKAPPNGNTTGKKQQGTKTAEMEEEASGKFGTVSSRDSQHLSTFNLERTAFRKDSQRWYVATEGGMAEKSGLEAATGKTFPRASGLGAREAEGKEEGAPDGETSDGSGLGQGDRFLTDVTCASSAKDLDNPEDADSSTCDHPSKLPEADESVARLCDYHLAKRMSSLQSEGHFSLQSSQGSSVDAGCGTGSSGSACATPVESPLCPSLGKHLIPDASGKGVNYIPSEERAPGLPNHGATFKELHPQTEGMCPRMTVPALHTAINTEPLFGTLRDGCHRLPKIKETTV

SEQ ID NO: 38266 - protein, 24 aa, Artificial Sequence
  Synthetic polypeptide
HFPDSLVATGRSLQAGRLPREPGA

SEQ ID NO: 38267 - protein, 22 aa, Artificial Sequence
  Synthetic polypeptide
LGSFLSNHSPGALLEGFGGSSP

SEQ ID NO: 38268 - protein, 70 aa, Artificial Sequence
  Synthetic polypeptide
NNWNFHPLVVGMQNATATLENSLAVSYQITLRAHCWRGLVVLHPDHNFFLYCQSRCFPDCGEDGFSHREC

SEQ ID NO: 38269 - protein, 287 aa, Artificial Sequence
  Synthetic polypeptide
WECKMLQPHWKIAWQFLIKSLSGRIVGGVWWFFTLIIISSYTANLAAFLTVERMVSPIESAEDLAKQTEIAYGTLDSGSTKEFFRRSKIAVYEKMWSYMKSAEPSVFTKTTADGVARVRKSKGKFAFLLESTMNEYIEQRKPCDTMKVGGNLDSKGYGVATPKGSALRNAVNLAVLKLNEQGLLDKLKNKWWYDKGECGSGGGDSKDKTSALSLSNVAGVFYILVGGLGLAMMVALIEFCYKSRAESKRMKLTKNTQNFKPAPATNTQNYATYREGYNVYGTESVKI

SEQ ID NO: 38270 - protein, 217 aa, Artificial Sequence
  Synthetic polypeptide
WECKMLQPHWKIAWQFLIKSLSGRIVGGVWWFFTLIIISSYTANLAAFLTVERMVSPIESAEDLAKQTEIAYGTLDSGSTKEFFRRSKIAVYEKMWSYMKSAEPSVFTKTTADGVARVRKSKGKFAFLLESTMNEYIEQRKPCDTMKVGGNLDSKGYGVATPKGSALRNAVNLAVLKLNEQGLLDKLKNKWWYDKGECGSGGGDSKNACKPCSIETQ

SEQ ID NO: 38271 - protein, 287 aa, Artificial Sequence
  Synthetic polypeptide
WECKMLQPHWKIAWQFLIKSLSGRIVGGVWWFFTLIIISSYTANLAAFLTVERMVSPIESAEDLAKQTEIAYGTLDSGSTKEFFRRSKIAVYEKMWSYMKSAEPSVFTKTTADGVARVRKSKGKFAFLLESTMNEYIEQRKPCDTMKVGGNLDSKGYGVATPKGSALRTPVNLAVLKLSEQGILDKLKNKWWYDKGECGAKDSGSKDKTSALSLSNVAGVFYILVGGLGLAMMVALIEFCYKSRAESKRMKLTKNTQNFKPAPATNTQNYATYREGYNVYGTESVKI

SEQ ID NO: 38272 - protein, 22 aa, Artificial Sequence
  Synthetic polypeptide
NLAVAPHCPLKSEMFNKSYKSG

SEQ ID NO: 38273 - protein, 962 aa, Artificial Sequence
  Synthetic polypeptide
SPKCLISHTSLASFCGAVFRKYPIDLAGLLQYVANQLKAGKSFDLLILKEVVQKMAGIEITEEMTMEQLEAMTGGEQLKAEGGYFGQIRNTKKSSQRLKDALLDHDLALPLCLLMAQQRNGVIFQEGGEKHLKLVGKLYDQCHDTLVQFGGFLASNLSTEDYIKRVPSIDVLCNEFHTPHDAAFFLSRPMYAHHISSKYDELKKSEKGSKQQHKVHKYITSCEMVMAPVHEAVVSLHVSKVWDDISPQFYATFWSLTMYDLAVPHTSYEREVNKLKVQMKAIDDNQEMPPNKKKKEKERCTALQDKLLEEEKKQMEHVQRVLQRLKLEKDNWLLAKSTKNETITKFLQLCIFPRCIFSAIDAVYCARFVELVHQQKTPNFSTLLCYDRVFSDIIYTVASCTENEASRYGRFLCCMLETVTRWHSDRATYEKECGNYPGFLTILRATGFDGGNKADQLDYENFRHVVHKWHYKLTKASVHCLETGEYTHIRNILIVLTKILPWYPKVLNLGQALERRVHKICQEEKEKRPDLYALAMGYSGQLKSRKSYMIPENEFHHKDPPPRNAVASVQNGPGGGPSSSSIGSASKSDESSTEETDKSRERSQCGVKAVNKASSTTPKGNSSNGNSGSNSNKAVKENDKEKGKEKEKEKKEKTPATTPEARVLGKDGKEKPKEERPNKDEKARETKERTPKSDKEKEKFKKEEKAKDEKFKTTVPNAESKSTQEREREKEPSRERDIAKEMKSKENVKGGEKTPVSGSLKSPVPRSDIPEPEREQKRRKIDTHPSPSHSSTVKDSLIELKESSAKLYINHTPPPLSKSKEREMDKKDLDKSRERSREREKKDEKDRKERKRDHSNNDREVPPDLTKRRKEENGTMGVSKHKSESPCESPYPNEKDKEKNKSKSSGKEKGSDSFKSEKMDKISSGGKKESRHDKEKIEKKEKRDSSGGKEEKKHHKSSDKHR

SEQ ID NO: 38274 - protein, 30 aa, Artificial Sequence
  Synthetic polypeptide
VIQVWLVSVVQFFVNIQLILLVFFSMLPIS

SEQ ID NO: 38275 - protein, 8 aa, Artificial Sequence
  Synthetic polypeptide
LLNLAVSV

SEQ ID NO: 38276 - protein, 1132 aa, Artificial Sequence
  Synthetic polypeptide
QFQSDGSKQEDKEKTEVILSCLLSITDQVLLPSLSLMDCNACMSEELWGMFKTFPYQHRYRLYGQWKNETYNSHPLLVKVKAQTIDRAKYIMKRLTKENVKPSGRQIGKLSHSNPTILFDYILSQIQKYDNLITPVVDSLKYLTSLNYDVLAYCIIEALANPEKERMKHDDTTISSWLQSLASFCGAVFRKYPIDLAGLLQYVANQLKAGKSFDLLILKEVVQKMAGIEITEEMTMEQLEAMTGGEQLKAEGGYFGQIRNTKKSSQRLKDALLDHDLALPLCLLMAQQRNGVIFQEGGEKHLKLVGKLYDQCHDTLVQFGGFLASNLSTEDYIKRVPSIDVLCNEFHTPHDAAFFLSRPMYAHHISSKYDELKKSEKGSKQQHKVHKYITSCEMVMAPVHEAVVSLHVSKVWDDISPQFYATFWSLTMYDLAVPHTSYEREVNKLKVQMKAIDDNQEMPPNKKKKEKERCTALQDKLLEEEKKQMEHVQRVLQRLKLEKDNWLLAKSTKNETITKFLQLCIFPRCIFSAIDAVYCARFVELVHQQKTPNFSTLLCYDRVFSDIIYTVASCTENEASRYGRFLCCMLETVTRWHSDRATYEKECGNYPGFLTILRATGFDGGNKADQLDYENFRHVVHKWHYKLTKASVHCLETGEYTHIRNILIVLTKILPWYPKVLNLGQALERRVHKICQEEKEKRPDLYALAMGYSGQLKSRKSYMIPENEFHHKDPPPRNAVASVQNGPGGGPSSSSIGSASKSDESSTEETDKSRERSQCGVKAVNKASSTTPKGNSSNGNSGSNSNKAVKENDKEKGKEKEKEKKEKTPATTPEARVLGKDGKEKPKEERPNKDEKARETKERTPKSDKEKEKFKKEEKAKDEKFKTTVPNAESKSTQEREREKEPSRERDIAKEMKSKENVKGGEKTPVSGSLKSPVPRSDIPEPEREQKRRKIDTHPSPSHSSTVKDSLIELKESSAKLYINHTPPPLSKSKEREMDKKDLDKSRERSREREKKDEKDRKERKRDHSNNDREVPPDLTKRRKEENGTMGVSKHKSESPCESPYPNEKDKEKNKSKSSGKEKGSDSFKSEKMDKISSGGKKESRHDKEKIEKKEKRDSSGGKEEKKHHKSSDKHR

SEQ ID NO: 38277 - protein, 43 aa, Artificial Sequence
  Synthetic polypeptide
KMLIVEFSSFSLMEANKKIKKKRKLSLAVCLALLTRYYFHLFL

SEQ ID NO: 38278 - protein, 72 aa, Artificial Sequence
  Synthetic polypeptide
PRFLLIERNVHGALSAYKRICDETNKPGKPSWHGHISEKSDTSSRRASGPSGGTKWRDTIIFIQSCSSTSTI

SEQ ID NO: 38279 - protein, 1383 aa, Artificial Sequence
  Synthetic polypeptide
RGMYMAHCLLTSESVMKQTNQANHRGMDIFLKRVTPPQEEPQVLQEEPNGETPSSLYRVAAVLLQFNLIDLDDLYVHLLPADNCIMDEHKREIAEAKQIVRKLTMVVLSSEKMDEREKEKEKEEEKVEKPPDNQKLGLLEALLKIGDWQHAQNIMDQMPPYYAASHKLIALAICKLIHITIEPLYRRVGVPKGAKGSPVNALQNKRAPKQAESFEDLRRDVFNMFCYLGPHLSHDPILFAKVVRIGKSFMKEFQSDGSKQEDKEKTEVILSCLLSITDQVLLPSLSLMDCNACMSEELWGMFKTFPYQHRYRLYGQWKNETYNSHPLLVKVKAQTIDRAKYIMKRLTKENVKPSGRQIGKLSHSNPTILFDYILSQIQKYDNLITPVVDSLKYLTSLNYDVLAYCIIEALANPEKERMKHDDTTISSWLQSLASFCGAVFRKYPIDLAGLLQYVANQLKAGKSFDLLILKEVVQKMAGIEITEEMTMEQLEAMTGGEQLKAEGGYFGQIRNTKKSSQRLKDALLDHDLALPLCLLMAQQRNGVIFQEGGEKHLKLVGKLYDQCHDTLVQFGGFLASNLSTEDYIKRVPSIDVLCNEFHTPHDAAFFLSRPMYAHHISSKYDELKKSEKGSKQQHKVHKYITSCEMVMAPVHEAVVSLHVSKVWDDISPQFYATFWSLTMYDLAVPHTSYEREVNKLKVQMKAIDDNQEMPPNKKKKEKERCTALQDKLLEEEKKQMEHVQRVLQRLKLEKDNWLLAKSTKNETITKFLQLCIFPRCIFSAIDAVYCARFVELVHQQKTPNFSTLLCYDRVFSDIIYTVASCTENEASRYGRFLCCMLETVTRWHSDRATYEKECGNYPGFLTILRATGFDGGNKADQLDYENFRHVVHKWHYKLTKASVHCLETGEYTHIRNILIVLTKILPWYPKVLNLGQALERRVHKICQEEKEKRPDLYALAMGYSGQLKSRKSYMIPENEFHHKDPPPRNAVASVQNGPGGGPSSSSIGSASKSDESSTEETDKSRERSQCGVKAVNKASSTTPKGNSSNGNSGSNSNKAVKENDKEKGKEKEKEKKEKTPATTPEARVLGKDGKEKPKEERPNKDEKARETKERTPKSDKEKEKFKKEEKAKDEKFKTTVPNAESKSTQEREREKEPSRERDIAKEMKSKENVKGGEKTPVSGSLKSPVPRSDIPEPEREQKRRKIDTHPSPSHSSTVKDSLIELKESSAKLYINHTPPPLSKSKEREMDKKDLDKSRERSREREKKDEKDRKERKRDHSNNDREVPPDLTKRRKEENGTMGVSKHKSESPCESPYPNEKDKEKNKSKSSGKEKGSDSFKSEKMDKISSGGKKESRHDKEKIEKKEKRDSSGGKEEKKHHKSSDKHR

SEQ ID NO: 38280 - protein, 36 aa, Artificial Sequence
  Synthetic polypeptide
HLLKKSLRSFRRNQMARHHHLYTELQQYFYNLILLI

SEQ ID NO: 38281 - protein, 33 aa, Artificial Sequence
  Synthetic polypeptide
LTPVIPAFLEGEAGTKWRDTIIFIQSCSSTSTI

SEQ ID NO: 38282 - protein, 1346 aa, Artificial Sequence
  Synthetic polypeptide
FQHFWRARQEPNGETPSSLYRVAAVLLQFNLIDLDDLYVHLLPADNCIMDEHKREIAEAKQIVRKLTMVVLSSEKMDEREKEKEKEEEKVEKPPDNQKLGLLEALLKIGDWQHAQNIMDQMPPYYAASHKLIALAICKLIHITIEPLYRRVGVPKGAKGSPVNALQNKRAPKQAESFEDLRRDVFNMFCYLGPHLSHDPILFAKVVRIGKSFMKEFQSDGSKQEDKEKTEVILSCLLSITDQVLLPSLSLMDCNACMSEELWGMFKTFPYQHRYRLYGQWKNETYNSHPLLVKVKAQTIDRAKYIMKRLTKENVKPSGRQIGKLSHSNPTILFDYILSQIQKYDNLITPVVDSLKYLTSLNYDVLAYCIIEALANPEKERMKHDDTTISSWLQSLASFCGAVFRKYPIDLAGLLQYVANQLKAGKSFDLLILKEVVQKMAGIEITEEMTMEQLEAMTGGEQLKAEGGYFGQIRNTKKSSQRLKDALLDHDLALPLCLLMAQQRNGVIFQEGGEKHLKLVGKLYDQCHDTLVQFGGFLASNLSTEDYIKRVPSIDVLCNEFHTPHDAAFFLSRPMYAHHISSKYDELKKSEKGSKQQHKVHKYITSCEMVMAPVHEAVVSLHVSKVWDDISPQFYATFWSLTMYDLAVPHTSYEREVNKLKVQMKAIDDNQEMPPNKKKKEKERCTALQDKLLEEEKKQMEHVQRVLQRLKLEKDNWLLAKSTKNETITKFLQLCIFPRCIFSAIDAVYCARFVELVHQQKTPNFSTLLCYDRVFSDIIYTVASCTENEASRYGRFLCCMLETVTRWHSDRATYEKECGNYPGFLTILRATGFDGGNKADQLDYENFRHVVHKWHYKLTKASVHCLETGEYTHIRNILIVLTKILPWYPKVLNLGQALERRVHKICQEEKEKRPDLYALAMGYSGQLKSRKSYMIPENEFHHKDPPPRNAVASVQNGPGGGPSSSSIGSASKSDESSTEETDKSRERSQCGVKAVNKASSTTPKGNSSNGNSGSNSNKAVKENDKEKGKEKEKEKKEKTPATTPEARVLGKDGKEKPKEERPNKDEKARETKERTPKSDKEKEKFKKEEKAKDEKFKTTVPNAESKSTQEREREKEPSRERDIAKEMKSKENVKGGEKTPVSGSLKSPVPRSDIPEPEREQKRRKIDTHPSPSHSSTVKDSLIELKESSAKLYINHTPPPLSKSKEREMDKKDLDKSRERSREREKKDEKDRKERKRDHSNNDREVPPDLTKRRKEENGTMGVSKHKSESPCESPYPNEKDKEKNKSKSSGKEKGSDSFKSEKMDKISSGGKKESRHDKEKIEKKEKRDSSGGKEEKKHHKSSDKHR

SEQ ID NO: 38283 - protein, 42 aa, Artificial Sequence
  Synthetic polypeptide
PGVVAYTCNSSIFGGRGRNQMARHHHLYTELQQYFYNLILLI

SEQ ID NO: 38284 - protein, 44 aa, Artificial Sequence
  Synthetic polypeptide
FQLLGRLRHKNFLNLEGGGFCELRSCYCTPAWVMDRDSISNINK

SEQ ID NO: 38285 - protein, 132 aa, Artificial Sequence
  Synthetic polypeptide
INDTIFQNPMVQEAIRMGFSFKDIKKIMEEKIQISGSNYKSLEVLVADLVNAQKDSMQDESSQTSLQKEISTEEQLRRLQEEKLCKICMDRNIAIVFVPCGHLVTCKQCAEAVDKCPMCYTVITFKQKIFMS

SEQ ID NO: 38286 - protein, 10 aa, Artificial Sequence
  Synthetic polypeptide
SQHFGRPSRW

SEQ ID NO: 38287 - protein, 19 aa, Artificial Sequence
  Synthetic polypeptide
ARCSSSHNPSTLGGQVGGR

SEQ ID NO: 38288 - protein, 467 aa, Artificial Sequence
  Synthetic polypeptide
PGVAAHIIPALWEAKSVVDDWIESYKHDRDIALLDLINFFIQCSGCKGVVTAEMFRHMQNSEIIRKMTEEFDEDSGDYPLTMAGPQWKKFKSSFCEFIGVLVRQCQYSIIYDEYMMDTVISLLTGLSDSQVRAFRHTSTLAAMKLMTALVNVALNLSINMDNTQRQYEAERNKMIGKRANERLELLLQKRKELQENQDEIENMMNAIFKGVFVHRYRDAIAEIRAICIEEIGIWMKMYSDAFLNDSYLKYVGWTMHDKQGEVRLKCLTALQGLYYNKELNSKLELFTSRFKDRIVSMTLDKEYDVAVQAIKLLTLVLQSSEEVLTAEDCENVYHLVYSAHRPVAVAAGEFLYKKLFSRRDPEEDGMMKRRGRQGPNANLVKTLVFFFLESELHEHAAYLVDSMWDCATELLKDWECMNSLLLEEPLSGEEALTDRQESALIEIMLCTIRQAAECHPPVGRGTGKRVL

SEQ ID NO: 38289 - protein, 1187 aa, Artificial Sequence
  Synthetic polypeptide
PGVAAHIIPALWEAKSVVDDWIESYKHDRDIALLDLINFFIQCSGCKGVVTAEMFRHMQNSEIIRKMTEEFDEDSGDYPLTMAGPQWKKFKSSFCEFIGVLVRQCQYSIIYDEYMMDTVISLLTGLSDSQVRAFRHTSTLAAMKLMTALVNVALNLSINMDNTQRQYEAERNKMIGKRANERLELLLQKRKELQENQDEIENMMNAIFKGVFVHRYRDAIAEIRAICIEEIGIWMKMYSDAFLNDSYLKYVGWTMHDKQGEVRLKCLTALQGLYYNKELNSKLELFTSRFKDRIVSMTLDKEYDVAVQAIKLLTLVLQSSEEVLTAEDCENVYHLVYSAHRPVAVAAGEFLYKKLFSRRDPEEDGMMKRRGRQGPNANLVKTLVFFFLESELHEHAAYLVDSMWDCATELLKDWECMNSLLLEEPLSGEEALTDRQESALIEIMLCTIRQAAECHPPVGRGTGKRVLTAKEKKTQLDDRTKITELFAVALPQLLAKYSVDAEKVTNLLQLPQYFDLEIYTTGRLEKHLDALLRQIRNIVEKHTDTDVLEACSKTYHALCNEEFTIFNRVDISRSQLIDELADKFNRLLEDFLQEGEEPDEDDAYQVLSTLKRITAFHNAHDLSKWDLFACNYKLLKTGIENGDMPEQIVIHALQCTHYVILWQLAKITESSSTKEDLLRLKKQMRVFCQICQHYLTNVNTTVKEQAFTILCDILMIFSHQIMSGGRDMLEPLVYTPDSSLQSELLSFILDHVFIEQDDDNNSADGQQEDEASKIEALHKRRNLLAAFCKLIVYTVVEMNTAADIFKQYMKYYNDYGDIIKETMSKTRQIDKIQCAKTLILSLQQLFNEMIQENGYNFDRSSSTFSGIKELARRFALTFGLDQLKTREAIAMLHKDGIEFAFKEPNPQGESHPPLNLAFLDILSEFSSKLLRQDKRTVYVYLEKFMTFQMSLRREDVWLPLMSYRNSLLAGGDDDTMSVISGISSRGSTVRSKKSKPSTGKRKVVEGMQLSLTEESSSSDSMWLSREQTLHTPVMMQTPQLTSTIMREPKRLRPEDSFMSVYPMQTEHHQTPLDYNTQVTWMLAQRQQEEARQQQERAAMSYVKLRTNLQHAIRRGTSLMEDDEEPIVEDVMMSSEGRIEDLNEGMDFDTMDIDLPPSKNRRERTELKPDFFDPASIMDESVLGVSMF

SEQ ID NO: 38290 - protein, 1150 aa, Artificial Sequence
  Synthetic polypeptide
PGVAAHIIPALWEAKSVVDDWIESYKHDRDIALLDLINFFIQCSGCKGVVTAEMFRHMQNSEIIRKMTEEFDEDSGDYPLTMAGPQWKKFKSSFCEFIGVLVRQCQYSIIYDEYMMDTVISLLTGLSDSQVRAFRHTSTLAAMKLMTALVNVALNLSINMDNTQRQYEAERNKMIGKRANERLELLLQKRKELQENQDEIENMMNAIFKGVFVHRYRDAIAEIRAICIEEIGIWMKMYSDAFLNDSYLKYVGWTMHDKQGEVRLKCLTALQGLYYNKELNSKLELFTSRFKDRIVSMTLDKEYDVAVQAIKLLTLVLQSSEEVLTAEDCENVYHLVYSAHRPVAVAAGEFLYKKLFSRRDPEEDGMMKRRGRQGPNANLVKTLVFFFLESELHEHAAYLVDSMWDCATELLKDWECMNSLLLEEPLSGEEALTDRQESALIEIMLCTIRQAAECHPPVGRGTGKRVLTAKEKKTQLDDRTKITELFAVALPQLLAKYSVDAEKVTNLLQLPQYFDLEIYTTGRLEKHLDALLRQIRNIVEKHTDTDVLEACSKTYHALCNEEFTIFNRVDISRSQLIDELADKFNRLLEDFLQEGEEPDEDDAYQVLSTLKRITAFHNAHDLSKWDLFACNYKLLKTGIENGDMPEQIVIHALQCTHYVILWQLAKITESSSTKEDLLRLKKQMRVFCQICQHYLTNVNTTVKEQAFTILCDILMIFSHQIMSGGRDMLEPLVYTPDSSLQSELLSFILDHVFIEQDDDNNSADGQQEDEASKIEALHKRRNLLAAFCKLIVYTVVEMNTAADIFKQYMKYYNDYGDIIKETMSKTRQIDKIQCAKTLILSLQQLFNEMIQENGYNFDRSSSTFSGIKELARRFALTFGLDQLKTREAIAMLHKDGIEFAFKEPNPQGESHPPLNLAFLDILSEFSSKLLRQDKRTVYVYLEKFMTFQMSLRREDVWLPLMSYRNSLLAGGDDDTMSVISGISSRGSTVRSKKSKPSTGKRKVVEGMQLSLTEESSSSDSMWLSREQTLHTPVMMQTPQLTSTIMREPKRLRPEDSFMSVYPMQTEHHQTPLDYNRRGTSLMEDDEEPIVEDVMMSSEGRIEDLNEGMDFDTMDIDLPPSKNRRERTELKPDFFDPASIMDESVLGVSMF

SEQ ID NO: 38291 - protein, 73 aa, Artificial Sequence
  Synthetic polypeptide
PGVAAHIIPALWEAKSVVDDWIESYKHDRDIALLDLINFFIQCSGCKGVVTAEMFRHMQNSEIIRKMTEEFDE

SEQ ID NO: 38292 - protein, 88 aa, Artificial Sequence
  Synthetic polypeptide
PGVAAHIIPALWEAKSVVDDWIESYKHDRDIALLDLINFFIQCSGCKGVVTAEMFRHMQNSEIIRKMTEEFDEDSGDYPLTMAGPQWK

SEQ ID NO: 38293 - protein, 126 aa, Artificial Sequence
  Synthetic polypeptide
PGVAAHIIPALWEAKSVVDDWIESYKHDRDIALLDLINFFIQCSGCKGVVTAEMFRHMQNSEIIRKMTEEFDEDSGDYPLTMAGPQWKKFKSSFCEFIGVLVRQCQYSIIYDEYMMDTVISLLTGL

SEQ ID NO: 38294 - protein, 34 aa, Artificial Sequence
  Synthetic polypeptide
PGVAAHIIPALWEAKSVVDDWIESYKHDRDIALL

SEQ ID NO: 38295 - protein, 2560 aa, Artificial Sequence
  Synthetic polypeptide
ATQKTADFCISIRDVQSSPHNQFTFRPLPPPPPPPHACTCARKPPPAADSLQRRSMTTRSQPSPAAPAPPTSTQDSVHLHNSWVLNSNIPLETRHFLFKHGSGSSAIFSAASQNYPLTSNTVYSPPPRPLPRSTFSRPAFTFNKPYRCCNWKCTALSATAITVTLALLLAYVIAVHLFGLTWQLQPVEGELYANGVSKGNRGTESMDTTYSPIGGKVSDKSEKKVFQKGRAIDTGEVDIGAQVMQTIPPGLFWRFQITIHHPIYLKFNISLAKDSLLGIYGRRNIPPTHTQFDFVKLMDGKQLVKQDSKGSDDTQHSPRNLILTSLQETGFIEYMDQGPWYLAFYNDGKKMEQVFVLTTAIEIMDDCSTNCNGNGECISGHCHCFPGFLGPDCARDSCPVLCGGNGEYEKGHCVCRHGWKGPECDVPEEQCIDPTCFGHGTCIMGVCICVPGYKGEICEEEDCLDPMCSNHGICVKGECHCSTGWGGVNCETPLPVCQEQCSGHGTFLLDAGVCSCDPKWTGSDCSTELCTMECGSHGVCSRGICQCEEGWVGPTCEERSCHSHCTEHGQCKDGKCECSPGWEGDHCTIAHYLDAVRDGCPGLCFGNGRCTLDQNGWHCVCQVGWSGTGCNVVMEMLCGDNLDNDGDGLTDCVDPDCCQQSNCYISPLCQGSPDPLDLIQQSQTLFSQHTSRLFYDRIKFLIGKDSTHVIPPEVSFDSRRACVIRGQVVAIDGTPLVGVNVSFLHHSDYGFTISRQDGSFDLVAIGGISVILIFDRSPFLPEKRTLWLPWNQFIVVEKVTMQRVVSDPPSCDISNFISPNPIVLPSPLTSFGGSCPERGTIVPELQVVQEEIPIPSSFVRLSYLSSRTPGYKTLLRILLTHSTIPVGMIKVHLTVAVEGRLTQKWFPAAINLVYTFAWNKTDIYGQKVWGLAEALVSVGYEYETCPDFILWEQRTVVLQGFEMDASNLGGWSLNKHHILNPQSGIIHKGNGENMFISQQPPVISTIMGNGHQRSVACTNCNGPAHNNKLFAPVALASGPDGSVYVGDFNFVRRIFPSGNSVSILELSTSPAHKYYLAMDPVSESLYLSDTNTRKVYKLKSLVETKDLSKNFEVVAGTGDQCLPFDQSHCGDGGRASEASLNSPRGITVDRHGFIYFVDGTMIRKIDENAVITTVIGSNGLTSTQPLSCDSGMDITQVRLEWPTDLAVNPMDNSLYVLDNNIVLQISENRRVRIIAGRPIHCQVPGIDHFLVSKVAIHSTLESARAISVSHSGLLFIAETDERKVNRIQQVTTNGEIYIIAGAPTDCDCKIDPNCDCFSGDGGYAKDAKMKAPSSLAVSPDGTLYVADLGNVRIRTISRNQAHLNDMNIYEIASPADQELYQFTVNGTHLHTLNLITRDYVYNFTYNSEGDLGAITSSNGNSVHIRRDAGGMPLWLVVPGGQVYWLTISSNGVLKRVSAQGYNLALMTYPGNTGLLATKSNENGWTTVYEYDPEGHLTNATFPTGEVSSFHSDLEKLTKVELDTSNRENVLMSTNLTATSTIYILKQENTQSTYRVNPDGSLRVTFASGMEIGLSSEPHILAGAVNPTLGKCNISLPGEHNANLIEWRQRKEQNKGNVSAFERRLRAHNRNLLSIDFDHITRTGKIYDDHRKFTLRILYDQTGRPILWSPVSRYNEVNITYSPSGLVTFIQRGTWNEKMEYDQSGKIISRTWADGKIWSYTYLEKSVMLLLHSQRRYIFEYDQPDCLLSVTMPSMVRHSLQTMLSVGYYRNIYTPPDSSTSFIQDYSRDGRLLQTLHLGTGRRVLYKYTKQARLSEVLYDTTQVTLTYEESSGVIKTIHLMHDGFICTIRYRQTGPLIGRQIFRFSEEGLVNARFDYSYNNFRVTSMQAVINETPLPIDLYRYVDVSGRTEQFGKFSVINYDLNQVITTTVMKHTKIFSANGQVIEVQYEILKAIAYWMTIQYDNVGRMVICDIRVGVDANITRYFYEYDADGQLQTVSVNDKTQWRYSYDLNGNINLLSHGKSARLTPLRYDLRDRITRLGEIQYKMDEDGFLRQRGNDIFEYNSNGLLQKAYNKASGWTVQYYYDGLGRRVASKSSLGQHLQFFYADLTNPIRVTHLYNHTSSEITSLYYDLQGHLIAMELSSGEEYYVACDNTGTPLAVFSSRGQVIKEILYTPYGDIYHDTYPDFQVIIGFHGGLYDFLTKLVHLGQRDYDVVAGRWTTPNHHIWKQLNLLPKPFNLYSFENNYPVGKIQDVAKYTTDIRSWLELFGFQLHNVLPGFPKPELENLELTYELLRLQTKTQEWDPGKTILGIQCELQKQLRNFISLDQLPMTPRYNDGRCLEGGKQPRFAAVPSVFGKGIKFAIKDGIVTADIIGVANEDSRRLAAILNNAHYLENLHFTIEGRDTHYFIKLGSLEEDLVLIGNTGGRRILENGVNVTVSQMTSVLNGRTRRFADIQLQHGALCFNIRYGTTVEEEKNHVLEIARQRAVAQAWTKEQRRLQEGEEGIRAWTEGEKQQLLSTGRVQGYDGYFVLSVEQYLELSDSANNIHFMRQSEIGRR

SEQ ID NO: 38296 - protein, 73 aa, Artificial Sequence
  Synthetic polypeptide
SDKDGRIGTSPVYSSQRERRRRRLISAFPSEMCRAAHTTSSPSDPSHRHLRLLMPAPVPGSHPLQRTLFRGDQ

SEQ ID NO: 38297 - protein, 73 aa, Artificial Sequence
  Synthetic polypeptide
FLHFHQRCAEQPTQPVHLQTPPTATSASSCLHLCQEATPCSGLSSEEINDYPQPAQPSCSSSPNQHAGFSPSA

SEQ ID NO: 38298 - protein, 2567 aa, Artificial Sequence
  Synthetic polypeptide
ATQKTADFCISIRDVQSSPHNQFTFRPLPPPPPPPHACTCARKPPPAADSLQRRSMTTRSQPSPAAPAPPTSTQDSVHLHNSWVLNSNIPLETRHFLFKHGSGSSAIFSAASQNYPLTSNTVYSPPPRPLPRSTFSRPAFTFNKPYRCCNWKCTALSATAITVTLALLLAYVIAVHLFGLTWQLQPVEGELYANGVSKGNRGTESMDTTYSPIGGKVSDKSEKKVFQKGRAIDTGEVDIGAQVMQTIPPGLFWRFQITIHHPIYLKFNISLAKDSLLGIYGRRNIPPTHTQFDFVKLMDGKQLVKQDSKGSDDTQHSPRNLILTSLQETGFIEYMDQGPWYLAFYNDGKKMEQVFVLTTAIEIMDDCSTNCNGNGECISGHCHCFPGFLGPDCARDSCPVLCGGNGEYEKGHCVCRHGWKGPECDVPEEQCIDPTCFGHGTCIMGVCICVPGYKGEICEEEDCLDPMCSNHGICVKGECHCSTGWGGVNCETPLPVCQEQCSGHGTFLLDAGVCSCDPKWTGSDCSTELCTMECGSHGVCSRGICQCEEGWVGPTCEERSCHSHCTEHGQCKDGKCECSPGWEGDHCTIAHYLDAVRDGCPGLCFGNGRCTLDQNGWHCVCQVGWSGTGCNVVMEMLCGDNLDNDGDGLTDCVDPDCCQQSNCYISPLCQGSPDPLDLIQQSQTLFSQHTSRLFYDRIKFLIGKDSTHVIPPEVSFDSRRACVIRGQVVAIDGTPLVGVNVSFLHHSDYGFTISRQDGSFDLVAIGGISVILIFDRSPFLPEKRTLWLPWNQFIVVEKVTMQRVVSDPPSCDISNFISPNPIVLPSPLTSFGGSCPERGTIVPELQVVQEEIPIPSSFVRLSYLSSRTPGYKTLLRILLTHSTIPVGMIKVHLTVAVEGRLTQKWFPAAINLVYTFAWNKTDIYGQKVWGLAEALVSVGYEYETCPDFILWEQRTVVLQGFEMDASNLGGWSLNKHHILNPQSGIIHKGNGENMFISQQPPVISTIMGNGHQRSVACTNCNGPAHNNKLFAPVALASGPDGSVYVGDFNFVRRIFPSGNSVSILELRNRDTRHSTSPAHKYYLAMDPVSESLYLSDTNTRKVYKLKSLVETKDLSKNFEVVAGTGDQCLPFDQSHCGDGGRASEASLNSPRGITVDRHGFIYFVDGTMIRKIDENAVITTVIGSNGLTSTQPLSCDSGMDITQVRLEWPTDLAVNPMDNSLYVLDNNIVLQISENRRVRIIAGRPIHCQVPGIDHFLVSKVAIHSTLESARAISVSHSGLLFIAETDERKVNRIQQVTTNGEIYIIAGAPTDCDCKIDPNCDCFSGDGGYAKDAKMKAPSSLAVSPDGTLYVADLGNVRIRTISRNQAHLNDMNIYEIASPADQELYQFTVNGTHLHTLNLITRDYVYNFTYNSEGDLGAITSSNGNSVHIRRDAGGMPLWLVVPGGQVYWLTISSNGVLKRVSAQGYNLALMTYPGNTGLLATKSNENGWTTVYEYDPEGHLTNATFPTGEVSSFHSDLEKLTKVELDTSNRENVLMSTNLTATSTIYILKQENTQSTYRVNPDGSLRVTFASGMEIGLSSEPHILAGAVNPTLGKCNISLPGEHNANLIEWRQRKEQNKGNVSAFERRLRAHNRNLLSIDFDHITRTGKIYDDHRKFTLRILYDQTGRPILWSPVSRYNEVNITYSPSGLVTFIQRGTWNEKMEYDQSGKIISRTWADGKIWSYTYLEKSVMLLLHSQRRYIFEYDQPDCLLSVTMPSMVRHSLQTMLSVGYYRNIYTPPDSSTSFIQDYSRDGRLLQTLHLGTGRRVLYKYTKQARLSEVLYDTTQVTLTYEESSGVIKTIHLMHDGFICTIRYRQTGPLIGRQIFRFSEEGLVNARFDYSYNNFRVTSMQAVINETPLPIDLYRYVDVSGRTEQFGKFSVINYDLNQVITTTVMKHTKIFSANGQVIEVQYEILKAIAYWMTIQYDNVGRMVICDIRVGVDANITRYFYEYDADGQLQTVSVNDKTQWRYSYDLNGNINLLSHGKSARLTPLRYDLRDRITRLGEIQYKMDEDGFLRQRGNDIFEYNSNGLLQKAYNKASGWTVQYYYDGLGRRVASKSSLGQHLQFFYADLTNPIRVTHLYNHTSSEITSLYYDLQGHLIAMELSSGEEYYVACDNTGTPLAVFSSRGQVIKEILYTPYGDIYHDTYPDFQVIIGFHGGLYDFLTKLVHLGQRDYDVVAGRWTTPNHHIWKQLNLLPKPFNLYSFENNYPVGKIQDVAKYTTDIRSWLELFGFQLHNVLPGFPKPELENLELTYELLRLQTKTQEWDPGKTILGIQCELQKQLRNFISLDQLPMTPRYNDGRCLEGGKQPRFAAVPSVFGKGIKFAIKDGIVTADIIGVANEDSRRLAAILNNAHYLENLHFTIEGRDTHYFIKLGSLEEDLVLIGNTGGRRILENGVNVTVSQMTSVLNGRTRRFADIQLQHGALCFNIRYGTTVEEEKNHVLEIARQRAVAQAWTKEQRRLQEGEEGIRAWTEGEKQQLLSTGRVQGYDGYFVLSVEQYLELSDSANNIHFMRQSEIGRR

SEQ ID NO: 38299 - protein, 165 aa, Artificial Sequence
  Synthetic polypeptide
GRARWLTPVIPALWETEPGGSPEYLPVTVVNTTMSLTALRQQMQTQNLSAYIIPGTDAHMNEYIGQHDERRAWITGFTGSAGTAVVTMKKAAVWTDSRYWTQAERQMDCNWELHKEVGTTPIVTWLLTEIPAGGRVGFDPFLLSIGMLFLQSLNLSMLTRVTQLP

SEQ ID NO: 38300 - protein, 50 aa, Artificial Sequence
  Synthetic polypeptide
SQHFGRPSQVDHLSTFQLLWSIPQCHSQPSASRCRPRISQPTSSQAQMLT

SEQ ID NO: 38301 - protein, 656 aa, Artificial Sequence
  Synthetic polypeptide
GRARWLTPVIPALWETEPGGSPEYLPVTVVNTTMSLTALRQQMQTQNLSAYIIPGTDAHMNEYIGQHDERRAWITGFTGSAGTAVVTMKKAAVWTDSRYWTQAERQMDCNWELHKEVGTTPIVTWLLTEIPAGGRVGFDPFLLSIDTWESYDLALQGSNRQLVSITTNLVDLVWGSERPPVPNQPIYALQEAFTGSTWQEKVSGVRSQMQKHQKVPTAVLLSALEETAWLFNLRASDIPYNPFFYSYTLLTDSSIRLFANKSRFSSETLSYLNSSCTGPMCVQIEDYSQVRDSIQAYSLGDVRIWIGTSYTMYGIYEMIPKEKLVTDTYSPVMMTKAVKNSKEQALLKASHVRDAVAVIRYLVWLEKNVPKGTVDEFSGAEIVDKFRGEEQFSSGPSFETISASGLNAALAHYSPTKELNRKLSSDEMYLLDSGGQYWDGTTDITRTVHWGTPSAFQKEAYTRVLIGNIDLSRLIFPAATSGRMVEAFARRALWDAGLNYGHGTGHGIGNFLCVHEWPVGFQSNNIAMAKGMFTSIEPGYYKDGEFGIRLEDVALVVEAKTKYPGSYLTFEVVSFVPYDRNLIDVSLLSPEHLQYLNRYYQTIREKVGPELQRRQLLEEFEWLQQHTEPLAARAPDTASWASVLVVSTLAILGWSV

SEQ ID NO: 38302 - protein, 164 aa, Artificial Sequence
  Synthetic polypeptide
GRVRWLTSVIPALWEAKAGRLLEVRSSRPAWPTWSDLGPDVGYEAIGLVDSSLPTVGVFAKATAQDNPKSATEQSGTGIRSESETESEASEITIPPSTPAVPQAPVQGEDYGKGVIFYLRDKVVVGIVLWNIFNRMPIARKIIKDGEQHEDLNEVAKLFNIHED

SEQ ID NO: 38303 - protein, 128 aa, Artificial Sequence
  Synthetic polypeptide
SLHFGRPRRADYLRSGVQDQPGQHGVIWAPMLAMKLLVLWTVVCPQLVFLQKQLHKTTPNLPQSSQELVSDQRVRQSPRPQKLLFLPAPRQFHRLPSRGRTTAKVSSSTSGTKWSWGLCYGTSLTECQ

SEQ ID NO: 38304 - protein, 12 aa, Artificial Sequence
  Synthetic polypeptide
GQEFKTSLANME

SEQ ID NO: 38305 - protein, 72 aa, Artificial Sequence
  Synthetic polypeptide
DQPGPYDMGRLLTLISCGTRKLGNPKDSVSSAMKTRGAQFWPSTILMGSRSKEELSEWIMCLTIGLLRTQKK

SEQ ID NO: 38306 - protein, 16 aa, Artificial Sequence
  Synthetic polypeptide
AQEFETSLGHMIWGDC

SEQ ID NO: 38307 - protein, 151 aa, Artificial Sequence
  Synthetic polypeptide
LFVSSGSRRPTVDLRMCGFWYCSGGVLEPIPHIYQGMTEEAMDLINRETMSEWKLQSEIQISHSWEEGLKLVKWHFNINQKRFSKAQPTCFLLILPNCQKIMCIYFQLLLMETTAMLDLLVIRQLKSALSQTLLCHLLILVLICSSRQTFN

SEQ ID NO: 38308 - protein, 108 aa, Artificial Sequence
  Synthetic polypeptide
LFVSSGSRRPTVDLRMCGFWYCSGGVLEPIPHIYQGMTEEAMDLINRETMSEWKLQSEIQISHSWEEGLKLNDNGLQKSSSLKCIDLTPVSSMASSIKKTGKSTSSYF

SEQ ID NO: 38309 - protein, 9 aa, Artificial Sequence
  Synthetic polypeptide
QRRSHGFNK

SEQ ID NO: 38310 - protein, 149 aa, Artificial Sequence
  Synthetic polypeptide
SQLLGRLRQENRLNPGTRGCSELRLYHCTHSSWCDKEEAMDLINRETMSEWKLQSEIQISHSWEEGLKLVKWHFNINQKRFSKAQPTCFLLILPNCQKIMCIYFQLLLMETTAMLDLLVIRQLKSALSQTLLCHLLILVLICSSRQTFN

SEQ ID NO: 38311 - protein, 18 aa, Artificial Sequence
  Synthetic polypeptide
DCTTALTPAGVTKKKPWI

SEQ ID NO: 38312 - protein, 106 aa, Artificial Sequence
  Synthetic polypeptide
SQLLGRLRQENRLNPGTRGCSELRLYHCTHSSWCDKEEAMDLINRETMSEWKLQSEIQISHSWEEGLKLNDNGLQKSSSLKCIDLTPVSSMASSIKKTGKSTSSYF

SEQ ID NO: 38313 - protein, 22 aa, Artificial Sequence
  Synthetic polypeptide
EVRSPSAQQPPRLRRRSHGFNK

SEQ ID NO: 38314 - protein, 114 aa, Artificial Sequence
  Synthetic polypeptide
EEEAMDLINRETMSEWKLQSEIQISHSWEEGLKLVKWHFNINQKRFSKAQPTCFLLILPNCQKIMCIYFQLLLMETTAMLDLLVIRQLKSALSQTLLCHLLILVLICSSRQTFN

SEQ ID NO: 38315 - protein, 33 aa, Artificial Sequence
  Synthetic polypeptide
EVRRPSAWQPPRLRSEEPLRPAAAPSEKKKPWI

SEQ ID NO: 38316 - protein, 71 aa, Artificial Sequence
  Synthetic polypeptide
EEEAMDLINRETMSEWKLQSEIQISHSWEEGLKLNDNGLQKSSSLKCIDLTPVSSMASSIKKTGKSTSSYF

SEQ ID NO: 38317 - protein, 33 aa, Artificial Sequence
  Synthetic polypeptide
EVRSPSAQQPPRLRSEEPLRPAATPSGKKKPWI

SEQ ID NO: 38318 - protein, 22 aa, Artificial Sequence
  Synthetic polypeptide
EVRSPSARQPHRLGRRSHGFNK

SEQ ID NO: 38319 - protein, 125 aa, Artificial Sequence
  Synthetic polypeptide
GAPPPGSHTVWEEEAMDLINRETMSEWKLQSEIQISHSWEEGLKLVKWHFNINQKRFSKAQPTCFLLILPNCQKIMCIYFQLLLMETTAMLDLLVIRQLKSALSQTLLCHLLILVLICSSRQTFN

SEQ ID NO: 38320 - protein, 82 aa, Artificial Sequence
  Synthetic polypeptide
GAPPPGSHTVWEEEAMDLINRETMSEWKLQSEIQISHSWEEGLKLNDNGLQKSSSLKCIDLTPVSSMASSIKKTGKSTSSYF

SEQ ID NO: 38321 - protein, 21 aa, Artificial Sequence
  Synthetic polypeptide
GASLPGSHPVREGGRSHGFNK

SEQ ID NO: 38322 - protein, 142 aa, Artificial Sequence
  Synthetic polypeptide
EVRSPSARQPHRLGSEERLCPAATPSGREEEAMDLINRETMSEWKLQSEIQISHSWEEGLKLVKWHFNINQKRFSKAQPTCFLLILPNCQKIMCIYFQLLLMETTAMLDLLVIRQLKSALSQTLLCHLLILVLICSSRQTFN

SEQ ID NO: 38323 - protein, 32 aa, Artificial Sequence
  Synthetic polypeptide
GAPPPGSHTVWEVRSVSARQPPRPGGRKKPWI

SEQ ID NO: 38324 - protein, 99 aa, Artificial Sequence
  Synthetic polypeptide
EVRSPSARQPHRLGSEERLCPAATPSGREEEAMDLINRETMSEWKLQSEIQISHSWEEGLKLNDNGLQKSSSLKCIDLTPVSSMASSIKKTGKSTSSYF

SEQ ID NO: 38325 - protein, 418 aa, Artificial Sequence
  Synthetic polypeptide
SCTALEPLKYGQYKLRSAVDMHDMLLEELAPVGTAHIPPTMHLESPALQVMGPAQEAPVAEAWIPQAGPPELNYGATGECQNFLDPGYPLPKLDMNFSLENREEPWVKELQDSKEMKQLLDSKIGFEIGIENEEDTSKQKKMETMYPFIVTLEGNALQGPILQKDYVQLENQWETPPEDLQTDLAKLVDQQNPTLGETPENSNLEEPLNPKPHKKKSPGEKPHRCPQCGKCFARKSQLTGHQRIHSGEEPHKCPECGKRFLRSSDLYRHQRLHTGERPYECTVCKKRFTRRSHLIGHQRTHSEEETYKCLECGKSFCHGSSLKRHLKTHTGEKPHRCHNCGKSFSRLTALTLHQRTHTEERPFKCNYCGKSFRQRPSLVIHLRIHTGEKPYKCTHCSKSFRQRAGLIMHQVTHFRGLI

SEQ ID NO: 38326 - protein, 27 aa, Artificial Sequence
  Synthetic polypeptide
DLLLICMTCSWKNWHQWERHTYHQPCT

SEQ ID NO: 38327 - protein, 13 aa, Artificial Sequence
  Synthetic polypeptide
ALEIWPIQIEICC

SEQ ID NO: 38328 - protein, 26 aa, Artificial Sequence
  Synthetic polypeptide
KKLICMTCSWKNWHQWERHTYHQPCT

SEQ ID NO: 38329 - protein, 13 aa, Artificial Sequence
  Synthetic polypeptide
NTHHMQKTWYEKS

SEQ ID NO: 38330 - protein, 428 aa, Artificial Sequence
  Synthetic polypeptide
ALEIWPIQIEICCKYEIHTTCRRLGMKKVDMHDMLLEELAPVGTAHIPPTMHLESPALQVMGPAQEAPVAEAWIPQAGPPELNYGATGECQNFLDPGYPLPKLDMNFSLENREEPWVKELQDSKEMKQLLDSKIGFEIGIENEEDTSKQKKMETMYPFIVTLEGNALQGPILQKDYVQLENQWETPPEDLQTDLAKLVDQQNPTLGETPENSNLEEPLNPKPHKKKSPGEKPHRCPQCGKCFARKSQLTGHQRIHSGEEPHKCPECGKRFLRSSDLYRHQRLHTGERPYECTVCKKRFTRRSHLIGHQRTHSEEETYKCLECGKSFCHGSSLKRHLKTHTGEKPHRCHNCGKSFSRLTALTLHQRTHTEERPFKCNYCGKSFRQRPSLVIHLRIHTGEKPYKCTHCSKSFRQRAGLIMHQVTHFRGLI

SEQ ID NO: 38331 - protein, 58 aa, Artificial Sequence
  Synthetic polypeptide
DASPCTSLPGALGGTFPTTPRGQVSRKCHQWGGATTSLPFCEVPLSLLQQGQDLRTGM

SEQ ID NO: 38332 - protein, 171 aa, Artificial Sequence
  Synthetic polypeptide
GLECDSPSYQKRQRMALLARKQGAGDSLIAGSAMSKAKKLMTGHAIPPSQLDSQIDDFTGFSKDRMMQKPGSNAPVGGNVTSSFSGDDLECRETASSPKSQREINADIKRKLVKELRCVGQKYEKIFEMLEGVQGPTAVRKRFFESIIKEAARCMRRDFVKHLKKKLKRMI

SEQ ID NO: 38333 - protein, 53 aa, Artificial Sequence
  Synthetic polypeptide
GAAVSPPARSGLKDWNVTVLRIRKGRGWPCWQGNKEQETALLQALPCPKQRSL

SEQ ID NO: 38334 - protein, 906 aa, Artificial Sequence
  Synthetic polypeptide
NLMQASPLQTSQPTPPEELHAAAYVFTNDGQQMRSDEVNLVATGHQSKKKHSRKSKRHSSSKRRKSMSSWLDKQEDAAVTHSICEERINNGQPVADNVLSTAPPWPDATIAHNIREERMENGQSRTDKVLSTAPPQLVHMAAAGIPSMSTRDLHSTVTHNIREERMENGQPQPDNVLSTGPTGLINMAATPIPAMSARDLYATVTHNVCEQKMENVQPAPDNVLLTLRPRRINMTDTGISPMSTRDPYATITYNVPEEKMEKGQPQPDNILSTASTGLINVAGAGTPAISTNGLYSTVPHNVCEEKMENDQPQPNNVLSTVQPVIIYLTATGIPGMNTRDQYATITHNVCEERVVNNQPLPSNALSTVLPGLAYLATADMPAMSTRDQHATIIHNLREEKKDNSQPTPDNVLSAVTPELINLAGAGIPPMSTRDQYATVNHHVHEARMENGQRKQDNVLSNVLSGLINMAGASIPAMSSRDLYATITHSVREEKMESGKPQTDKVISNDAPQLGHMAAGGIPSMSTKDLYATVTQNVHEERMENNQPQPSYDLSTVLPGLTYLTVAGIPAMSTRDQYATVTHNVHEEKIKNGQAASDNVFSTVPPAFINMAATGVSSMSTRDQYAAVTHNIREEKINNSQPAPGNILSTAPPWLRHMAAAGISSTITRDLYVTATHSVHEEKMTNGQQAPDNSLSTVPPGCINLSGAGISCRSTRDLYATVIHDIQEEEMENDQTPPDGFLSNSDSPELINMTGHCMPPNALDSFSHDFTSLSKDELLYKPDSNEFAVGTKNYSVSAGDPPVTVMSLVETVPNTPQISPAMAKKINDDIKYQLMKEVRRFGQNYERIFILLEEVQGSMKVKRQFVEFTIKEAARFKKVVLIQQLEKALKEIDSHCHLRKVKHMRKR

SEQ ID NO: 38335 - protein, 29 aa, Artificial Sequence
  Synthetic polypeptide
TPGRNWHFKSGHLKLDAGFSTSNESTNST

SEQ ID NO: 38336 - protein, 530 aa, Artificial Sequence
  Synthetic polypeptide
NLMQASPLQTSQPTPPEELHAAAYVFTNDGQQMRSDEVNLVATGHQSKKKHSRKSKRHSSSKRRKSMSSWLDKQEDAAVTHSICEERINNGQPVADNVLSTAPPWPDATIAHNIREERMENGQSRTDKVLSTAPPQLVHMAAAGIPSMSTRDLHATVTQNVHEERMENNQPQPSYDLSTVLPGLTYLTVAGIPAMSTRDQYATVTHNVHEEKIKNGQAASDNVFSTVPPAFINMAATGVSSMSTRDQYAAVTHNIREEKINNSQPAPGNILSTAPPWLRHMAAAGISSTITRDLYVTATHSVHEEKMTNGQQAPDNSLSTVPPGCINLSGAGISCRSTRDLYATVIHDIQEEEMENDQTPPDGFLSNSDSPELINMTGHCMPPNALDSFSHDFTSLSKDELLYKPDSNEFAVGTKNYSVSAGDPPVTVMSLVETVPNTPQISPAMAKKINDDIKYQLMKEVRRFGQNYERIFILLEEVQGSMKVKRQFVEFTIKEAARFKKVVLIQQLEKALKEIDSHCHLRKVKHMRKR

SEQ ID NO: 38337 - protein, 877 aa, Artificial Sequence
  Synthetic polypeptide
NLQMRSDEVNLVATGHQSKKKHSRKSKRHSSSKRRKSMSSWLDKQEDAAVTHSICEERINNGQPVADNVLSTAPPWPDATIAHNIREERMENGQSRTDKVLSTAPPQLVHMAAAGIPSMSTRDLHSTVTHNIREERMENGQPQPDNVLSTGPTGLINMAATPIPAMSARDLYATVTHNVCEQKMENVQPAPDNVLLTLRPRRINMTDTGISPMSTRDPYATITYNVPEEKMEKGQPQPDNILSTASTGLINVAGAGTPAISTNGLYSTVPHNVCEEKMENDQPQPNNVLSTVQPVIIYLTATGIPGMNTRDQYATITHNVCEERVVNNQPLPSNALSTVLPGLAYLATADMPAMSTRDQHATIIHNLREEKKDNSQPTPDNVLSAVTPELINLAGAGIPPMSTRDQYATVNHHVHEARMENGQRKQDNVLSNVLSGLINMAGASIPAMSSRDLYATITHSVREEKMESGKPQTDKVISNDAPQLGHMAAGGIPSMSTKDLYATVTQNVHEERMENNQPQPSYDLSTVLPGLTYLTVAGIPAMSTRDQYATVTHNVHEEKIKNGQAASDNVFSTVPPAFINMAATGVSSMSTRDQYAAVTHNIREEKINNSQPAPGNILSTAPPWLRHMAAAGISSTITRDLYVTATHSVHEEKMTNGQQAPDNSLSTVPPGCINLSGAGISCRSTRDLYATVIHDIQEEEMENDQTPPDGFLSNSDSPELINMTGHCMPPNALDSFSHDFTSLSKDELLYKPDSNEFAVGTKNYSVSAGDPPVTVMSLVETVPNTPQISPAMAKKINDDIKYQLMKEVRRFGQNYERIFILLEEVQGSMKVKRQFVEFTIKEAARFKKVVLIQQLEKALKEIDSHCHLRKVKHMRKR

SEQ ID NO: 38338 - protein, 8 aa, Artificial Sequence
  Synthetic polypeptide
VWTSKTCK

SEQ ID NO: 38339 - protein, 19 aa, Artificial Sequence
  Synthetic polypeptide
TPGRNWHFKSGHLKLANEE

SEQ ID NO: 38340 - protein, 501 aa, Artificial Sequence
  Synthetic polypeptide
NLQMRSDEVNLVATGHQSKKKHSRKSKRHSSSKRRKSMSSWLDKQEDAAVTHSICEERINNGQPVADNVLSTAPPWPDATIAHNIREERMENGQSRTDKVLSTAPPQLVHMAAAGIPSMSTRDLHATVTQNVHEERMENNQPQPSYDLSTVLPGLTYLTVAGIPAMSTRDQYATVTHNVHEEKIKNGQAASDNVFSTVPPAFINMAATGVSSMSTRDQYAAVTHNIREEKINNSQPAPGNILSTAPPWLRHMAAAGISSTITRDLYVTATHSVHEEKMTNGQQAPDNSLSTVPPGCINLSGAGISCRSTRDLYATVIHDIQEEEMENDQTPPDGFLSNSDSPELINMTGHCMPPNALDSFSHDFTSLSKDELLYKPDSNEFAVGTKNYSVSAGDPPVTVMSLVETVPNTPQISPAMAKKINDDIKYQLMKEVRRFGQNYERIFILLEEVQGSMKVKRQFVEFTIKEAARFKKVVLIQQLEKALKEIDSHCHLRKVKHMRKR

SEQ ID NO: 38341 - protein, 53 aa, Artificial Sequence
  Synthetic polypeptide
ASLPSTRGGTFPITPKRQVSTKLQQWGGATTSLPFCEVLPPLLRQGQDFRTGM

SEQ ID NO: 38342 - protein, 207 aa, Artificial Sequence
  Synthetic polypeptide
LPNGKFLQSYNSGEAPQLHCHFVRCCRPSSGKVRTSGLECDSPSYQKRQRMALLARKQGAGDSLIAGSAMSKAKKLMTGHAIPPSQLDSQIDDFTGFSKDRMMQKPGSNAPVGGNVTSSFSGDDLECRETASSPKSQQEINADIKRKLVKELRCVGQKYEKIFEMLEGVQGPTAVRKRFFESIIKEAARCMRRDFVKHLKKKLKRMI

SEQ ID NO: 38343 - protein, 53 aa, Artificial Sequence
  Synthetic polypeptide
GAAAPPPARSGLQDWNVTVLRIRKGRGWPCWQGNKEQETALLQALPCPKQRSL

SEQ ID NO: 38344 - protein, 53 aa, Artificial Sequence; identical to SEQ ID NO: 38341
  Synthetic polypeptide

SEQ ID NO: 38345 - protein, 207 aa, Artificial Sequence
  Synthetic polypeptide
LPNGKFLQSYNSGEAPQLHCHFVRCCRPSSGKVRTSGLECDSPSYQKRQRMALLARKQGAGDSLIAGSAMSKEKKLMTGHAIPPSQLDSQIDDFTGFSKDRMMQKPGSNAPVGGNVTSSFSGDDLECRETASSPKSQQEINADIKRKLVKELRCVGQKYEKIFEMLEGVQGPTAVRKRFFESIIKEAARCMRRDFVKHLKKKLKRMI

SEQ ID NO: 38346 - protein, 53 aa, Artificial Sequence
  Synthetic polypeptide
GAAAPPPARSGLQDWNVTVLRIRKGRGWPCWQGNKEQETALLQALPCPKKRSL

SEQ ID NO: 38347 - protein, 207 aa, Artificial Sequence
  Synthetic polypeptide
LPNGKFLQSYNSGEAPQLHCHFVRCCRPSSGKVRTSGLECDSPSYQKRQRMALLARKQGAGDSLIAGSAMSKEKKLMTGHAIPPSQLDSQIDDFTGFSKDGMMQKPGSNAPVGGNVTSNFSGDDLECRGIASSPKSQQEINADIKCQVVKEIRCLGRKYEKIFEMLEGVQGPTAVRKRFFESIIKEAARCMRRDFVKHLKKKLKRMI

SEQ ID NO: 38348 - protein, 53 aa, Artificial Sequence; identical to SEQ ID NO: 38341
  Synthetic polypeptide

SEQ ID NO: 38349 - protein, 207 aa, Artificial Sequence; identical to SEQ ID NO: 38342
  Synthetic polypeptide

SEQ ID NO: 38350 - protein, 53 aa, Artificial Sequence; identical to SEQ ID NO: 38343
  Synthetic polypeptide

SEQ ID NO: 38351 - protein, 24 aa, Artificial Sequence
  Synthetic polypeptide
PCCLQCDQQTSIMSTTWQIVLICD

SEQ ID NO: 38352 - protein, 16 aa, Artificial Sequence
  Synthetic polypeptide
APPGRSFLYAINRKRR

SEQ ID NO: 38353 - protein, 116 aa, Artificial Sequence
  Synthetic polypeptide
STDQHHEHHLADRSYMRLTEKEDESLPIDIVLQTLLAFAVTCYGIVHIAGEFKDMDATSELKNKTFDTLRNHPSFYVFNHRGRVLFRPSDTANSSNQDALSSNTSLKLRKLESLRR

SEQ ID NO: 38354 - protein, 158 aa, Artificial Sequence
  Synthetic polypeptide
AMIVPLHSILGNRVTETSSHDIYEEAEADNEESDKDSLNEMFPSAILNGTGSPTKFKMPFNNAKKMTHKLVFLEDGTSQVRKEPKTYFNGDLKNFRQKSMKDTSIQEVVSRPSSKRMTSHTTKTRKADETNTTSRSSAQTKSEGFHDILPKSSDTFRQ

SEQ ID NO: 38355 - protein, 35 aa, Artificial Sequence
  Synthetic polypeptide
SCHCTPSWATESQKHPAMTYMKRLRLTTKKATRTH

SEQ ID NO: 38356 - protein, 41 aa, Artificial Sequence
  Synthetic polypeptide
SQLLGRLRREITRVQKSEAAVSYDRATALHLGQQSHRNIQP

SEQ ID NO: 38357 - protein, 125 aa, Artificial Sequence
  Synthetic polypeptide
AMIVPLHSILGNRVTETSSHDIYEEAEADNEESDKDSLNEMFPSAILNGTGSPTKFKMPFNNAKKMTHKLVFLEDGTSQVRKEPKTYFNGDLKNFRQKSMKDTSIQEVVSRPSSKRMTSHTTKTR

SEQ ID NO: 38358 - protein, 243 aa, Artificial Sequence
  Synthetic polypeptide
TSFFFLDDAPPGTQEYIMLRQDSIQSAELKKKESPFRAKCHEIFCCPLKQVHHKENTEPEEPQLKGIVTKLYSRQGYHLQLQADGTIDGTKDEDSTYTLFNLIPVGLRVVAIQGVQTKLYLAMNSEGYLYTSELFTPECKFKESVFENYYVTYSSMIYRQQQSGRGWYLGLNKEGEIMKGNHVKKNKPAAHFLPKPLKVAMYKEPSLHDLTEFSRSGSGTPTKSRSVSGVLNGGKSMSHNEST

SEQ ID NO: 38359 - protein, 54 aa, Artificial Sequence
  Synthetic polypeptide
DVTCSCLPSSMIVRPPQPRGTVSPIKPLSFFWMTPPLAHRNTLCYDKIPSNLRN

SEQ ID NO: 38360 - protein, 10 aa, Artificial Sequence
  Synthetic polypeptide
VLLNLFLFSG

SEQ ID NO: 38361 - protein, 209 aa, Artificial Sequence
  Synthetic polypeptide
TSFFFLDDAPPGTQEYIMLRQDSIQSAELKKKESPFRAKCHEIFCCPLKQVHHKENTEPEEPQLKGIVTKLYSRQGYHLQLQADGTIDGTKDEDSTYTLFNLIPVGLRVVAIQGVQTKLYLAMNSEGYLYTSELFTPECKFKESVFENYYVTYSSMIYRQQQSGRGWYLGLNKEGEIMKGNHVKKNKPAAHFLPKPLKVAMYKEPSLHD

SEQ ID NO: 38362 - protein, 188 aa, Artificial Sequence
  Synthetic polypeptide
TSFFFLDDAPPGTQEYIMLRQDSIQSAELKKKESPFRAKCHEIFCCPLKQVHHKENTEPEEPQLKGIVTKLYSRQGYHLQLQADGTIDGTKDEDSTYTLFNLIPVGLRVVAIQGVQTKLYLAMNSEGYLYTSELFTPECKFKESVFENYYVTYSSMIYRQQQSGRGWYLGLNKEGEIMKGNHVKKNKP

SEQ ID NO: 38363 - protein, 86 aa, Artificial Sequence
  Synthetic polypeptide
TSFFFLDDAPPGTQEYIMLRQDSIQSAELKKKESPFRAKCHEIFCCPLKQVHHKENTEPEEPQLKGIVTKLYSRQGYHLQLQADGT

SEQ ID NO: 38364 - protein, 27 aa, Artificial Sequence
  Synthetic polypeptide
DVTCSCLPSSMIVRPPQPRGTSLSLRV

SEQ ID NO: 38365 - protein, 11 aa, Artificial Sequence
  Synthetic polypeptide
GLPSHVELASA

SEQ ID NO: 38366 - protein, 25 aa, Artificial Sequence
  Synthetic polypeptide
SPFIHGFTLHGVSYLWSTVVQNRLL

SEQ ID NO: 38367 - protein, 292 aa, Artificial Sequence
  Synthetic polypeptide
SSPPLFTVSLSMVSVTCGQQWSKIGCFECCIKCLGGVPYASLVATILCFSGVALFCGCGHVALAGTVAILEQHFSTNASDHALLSEVIQLMQYVIYGIASFFFLYGIILLAEGFYTTSAVKELHGEFKTTACGRCISGMFVFLTYVLGVAWLGVFGFSAVPVFMFYNIWSTCEVIKSPQTNGTTGVEQICVDIRQYGIIPWNAFPGKICGSALENICNTNEFYMSYHLFIVACAGAGATVIALIHFLMILSSNWAYLKDASKMQAYQDIKAKEEQELQDIQSRSKEQLNSYT

SEQ ID NO: 38368 - protein, 269 aa, Artificial Sequence
  Synthetic polypeptide
SSPPLFTVSLSMVSVTCGQQWSKIGCFECCIKCLGGVPYASLVATILCFSGVALFCGCGHVALAGTVAILEQHFSTNASDHALLSEVIQLMQYVIYGIASFFFLYGIILLAEGFYTTSAVKELHGEFKTTACGRCISGMFVFLTYVLGVAWLGVFGFSAVPVFMFYNIWSTCEVIKSPQTNGTTGVEQICVDIRQYGIIPWNAFPGKICGSALENICNTNEFYMSYHLFIVACAGAGATVIALLIYMMATTYNYAVLKFKSREDCCTKF

SEQ ID NO: 38369 - protein, 111 aa, Artificial Sequence
  Synthetic polypeptide
SSPPLFTVSLSMVSVTCGQQWSKIGCFECCIKCLGGVPYASLVATILCFSGVALFCGCGHVALAGTVAILEQHFSTNASDHALLSEVIQLMQYVIYGIASFFFLYGIILLA

SEQ ID NO: 38370 - protein, 37 aa, Artificial Sequence
  Synthetic polypeptide
LRNTLYFYHSSDLLGESISTVIVLRLLPGLWDLKISC

SEQ ID NO: 38371 - protein, 36 aa, Artificial Sequence
  Synthetic polypeptide
KVIPYFLRRLNSLLCDFGIPCTSITLVICWANQYLQ

SEQ ID NO: 38372 - protein, 320 aa, Artificial Sequence
  Synthetic polypeptide
VCLSPLNCQLHEVNSRAEMEIGRYHWMYPGSKNHQYHPVPTLGDRASPLSSPGCFECCIKCLGGVPYASLVATILCFSGVALFCGCGHVALAGTVAILEQHFSTNASDHALLSEVIQLMQYVIYGIASFFFLYGIILLAEGFYTTSAVKELHGEFKTTACGRCISGMFVFLTYVLGVAWLGVFGFSAVPVFMFYNIWSTCEVIKSPQTNGTTGVEQICVDIRQYGIIPWNAFPGKICGSALENICNTNEFYMSYHLFIVACAGAGATVIALIHFLMILSSNWAYLKDASKMQAYQDIKAKEEQELQDIQSRSKEQLNSYT

SEQ ID NO: 38373 - protein, 297 aa, Artificial Sequence
  Synthetic polypeptide
VCLSPLNCQLHEVNSRAEMEIGRYHWMYPGSKNHQYHPVPTLGDRASPLSSPGCFECCIKCLGGVPYASLVATILCFSGVALFCGCGHVALAGTVAILEQHFSTNASDHALLSEVIQLMQYVIYGIASFFFLYGIILLAEGFYTTSAVKELHGEFKTTACGRCISGMFVFLTYVLGVAWLGVFGFSAVPVFMFYNIWSTCEVIKSPQTNGTTGVEQICVDIRQYGIIPWNAFPGKICGSALENICNTNEFYMSYHLFIVACAGAGATVIALLIYMMATTYNYAVLKFKSREDCCTKF

SEQ ID NO: 38374 - protein, 6 aa, Artificial Sequence
  Synthetic polypeptide
CRNESL

SEQ ID NO: 38375 - protein, 1266 aa, Artificial Sequence
  Synthetic polypeptide
VNAGMSHYEQDRSALKKREWERRNQEVQQEDDLFSSGFDLFGEPYKTNKGDALANRVQNTLGNYDEMKNLLTNHSNQNHLVGIPKNSVPQNPNNKNEPSFFPEQKNRIIPPHQDNTHPSAPMPPPSVVILNSTLIHSNRKSKPEWSRDSHNPSTVLASQASGQPNKMQTLTQDQSQAKLEDFFVYPAEQPQIGEVEESNPSAKEDSNPNSSGEDAFKEIFQSNSPEESEFAVQAPGSPLVASSLLAPSSGLSVQNFPPGLYCKTSMGQQKPTAYVRPMDGQDQAPDISPTLKPSIEFENSFGNLSFGTLLDGKPSAASSKTKLPKFTILQTSEVSLPSDPSCVEEILRESQHLTPGFTLQKWNDPTTRASTKSVSFKSMLEDDLKLSSDEDDLEPVKTLTTQCTATELYQAVEKAKPRNNPVNPPLATPQPPPAVQASGGSGSSSESESSSESDSDTESSTTDSESNEAPRVATPEPEPPSTNKWQLDKWLNKVTSQNKSFICGQNETPMETISLPPPIIQPMEVQMKVKTNASQVPAEPKERPLLSLIREKARPRPTQKIPETKALKHKLSTTSETVSQRTIGKKQPKKVEKNTSTDEFTWPKPNITSSTPKEKESVELHDPPRGRNKATAHKPAPRKEPRPNIPLAPEKKKYRGPGKIVPKSREFIETDSSTSDSNTDQEETLQIKVLPPCIISGGNTAKSKEICGASLTLSTLMSSSGSNNNLSISNEEPTFSPIPVMQTEILSPLRDHENLKNLWVKIDLDLLSRVPGHSSLHAAPAKPDHKETATKPKRQTAVTAVEKPAPKGKRKHKPIEVAEKIPEKKQRLEEATTICLLPPCISPAPPHKPPNTRENNSSRRANRRKEEKLFPPPLSPLPEDPPRRRNVSGNNGPFGQDKNIAMTGQITSTKPKRTEGKFCATFKGISEGDTPKKASSATITVTNTAIATATVTATAIVTTTVTATATATATTTTTTTTISTITSTITTGLMDSSHLEMTSWAALPLLSSSSTNVRRPKLTFDDSVHNADYYMQEAKKLKHKADALFEKFGKAVNYADAALSFTECGNAMERDPLEAKSPYTMYSETVELLRYAMRLKNFASPLASDGDKKLAVLCYRCLSLLYLRMFKLKKDHAMKYSRSLMEYFKQNASKVAQIPSPWVSNGKNTPSPVSLNNVSPINAMGNCNNGPVTIPQRIHHMAASHVNITSNVLRGYEHWDMADKLTRENKEFFGDLDTLMGPLTQHSSMTNLVRYVRQGLCWLRIDAHLL

SEQ ID NO: 38376 - protein, 1301 aa, Artificial Sequence
  Synthetic polypeptide
VNAGMSHYEQDRSALKKREWERRNQEVQQEDDLFSSGFDLFGEPYKVAEYTNKGDALANRVQNTLGNYDEMKNLLTNHSNQNHLVGIPKNSVPQNPNNKNEPSFFPEQKNRIIPPHQDNTHPSAPMPPPSVVILNSTLIHSNRKSKPEWSRDSHNPSTVLASQASGQPNKMQTLTQDQSQAKLEDFFVYPAEQPQIGEVEESNPSAKEDSNPNSSGEDAFKEIFQSNSPEESEFAVQAPGSPLVASSLLAPSSGLSVQNFPPGLYCKTSMGQQKPTAYVRPMDGQDQAPDISPTLKPSIEFENSFGNLSFGTLLDGKPSAASSKTKLPKFTILQTSEVSLPSDPSCVEEILREMTHSWPTPLTSMHTAGHSEQSTFSIPGQESQHLTPGFTLQKWNDPTTRASTKSVSFKSMLEDDLKLSSDEDDLEPVKTLTTQCTATELYQAVEKAKPRNNPVNPPLATPQPPPAVQASGGSGSSSESESSSESDSDTESSTTDSESNEAPRVATPEPEPPSTNKWQLDKWLNKVTSQNKSFICGQNETPMETISLPPPIIQPMEVQMKVKTNASQVPAEPKERPLLSLIREKARPRPTQKIPETKALKHKLSTTSETVSQRTIGKKQPKKVEKNTSTDEFTWPKPNITSSTPKEKESVELHDPPRGRNKATAHKPAPRKEPRPNIPLAPEKKKYRGPGKIVPKSREFIETDSSTSDSNTDQEETLQIKVLPPCIISGGNTAKSKEICGASLTLSTLMSSSGSNNNLSISNEEPTFSPIPVMQTEILSPLRDHENLKNLWVKIDLDLLSRVPGHSSLHAAPAKPDHKETATKPKRQTAVTAVEKPAPKGKRKHKPIEVAEKIPEKKQRLEEATTICLLPPCISPAPPHKPPNTRENNSSRRANRRKEEKLFPPPLSPLPEDPPRRRNVSGNNGPFGQDKNIAMTGQITSTKPKRTEGKFCATFKGISVNEGDTPKKASSATITVTNTAIATATVTATAIVTTTVTATATATATTTTTTTTISTITSTITTGLMDSSHLEMTSWAALPLLSSSSTNVRRPKLTFDDSVHNADYYMQEAKKLKHKADALFEKFGKAVNYADAALSFTECGNAMERDPLEAKSPYTMYSETVELLRYAMRLKNFASPLASDGDKKLAVLCYRCLSLLYLRMFKLKKDHAMKYSRSLMEYFKQNASKVAQIPSPWVSNGKNTPSPVSLNNVSPINAMGNCNNGPVTIPQRIHHMAASHVNITSNVLRGYEHWDMADKLTRENKEFFGDLDTLMGPLTQHSSMTNLVRYVRQGLCWLRIDAHLL

SEQ ID NO: 38377 - protein, 1268 aa, Artificial Sequence
  Synthetic polypeptide
VNAGMSHYEQDRSALKKREWERRNQEVQQEDDLFSSGFDLFGEPYKTNKGDALANRVQNTLGNYDEMKNLLTNHSNQNHLVGIPKNSVPQNPNNKNEPSFFPEQKNRIIPPHQDNTHPSAPMPPPSVVILNSTLIHSNRKSKPEWSRDSHNPSTVLASQASGQPNKMQTLTQDQSQAKLEDFFVYPAEQPQIGEVEESNPSAKEDSNPNSSGEDAFKEIFQSNSPEESEFAVQAPGSPLVASSLLAPSSGLSVQNFPPGLYCKTSMGQQKPTAYVRPMDGQDQAPDISPTLKPSIEFENSFGNLSFGTLLDGKPSAASSKTKLPKFTILQTSEVSLPSDPSCVEEILRESQHLTPGFTLQKWNDPTTRASTKSVSFKSMLEDDLKLSSDEDDLEPVKTLTTQCTATELYQAVEKAKPRNNPVNPPLATPQPPPAVQASGGSGSSSESESSSESDSDTESSTTDSESNEAPRVATPEPEPPSTNKWQLDKWLNKVTSQNKSFICGQNETPMETISLPPPIIQPMEVQMKVKTNASQVPAEPKERPLLSLIREKARPRPTQKIPETKALKHKLSTTSETVSQRTIGKKQPKKVEKNTSTDEFTWPKPNITSSTPKEKESVELHDPPRGRNKATAHKPAPRKEPRPNIPLAPEKKKYRGPGKIVPKSREFIETDSSTSDSNTDQEETLQIKVLPPCIISGGNTAKSKEICGASLTLSTLMSSSGSNNNLSISNEEPTFSPIPVMQTEILSPLRDHENLKNLWVKIDLDLLSRVPGHSSLHAAPAKPDHKETATKPKRQTAVTAVEKPAPKGKRKHKPIEVAEKIPEKKQRLEEATTICLLPPCISPAPPHKPPNTRENNSSRRANRRKEEKLFPPPLSPLPEDPPRRRNVSGNNGPFGQDKNIAMTGQITSTKPKRTEGKFCATFKGISVNEGDTPKKASSATITVTNTAIATATVTATAIVTTTVTATATATATTTTTTTTISTITSTITTGLMDSSHLEMTSWAALPLLSSSSTNVRRPKLTFDDSVHNADYYMQEAKKLKHKADALFEKFGKAVNYADAALSFTECGNAMERDPLEAKSPYTMYSETVELLRYAMRLKNFASPLASDGDKKLAVLCYRCLSLLYLRMFKLKKDHAMKYSRSLMEYFKQNASKVAQIPSPWVSNGKNTPSPVSLNNVSPINAMGNCNNGPVTIPQRIHHMAASHVNITSNVLRGYEHWDMADKLTRENKEFFGDLDTLMGPLTQHSSMTNLVRYVRQGLCWLRIDAHLL

SEQ ID NO: 38378 - protein, 417 aa, Artificial Sequence
  Synthetic polypeptide
VNAGMSHYEQDRSALKKREWERRNQEVQQEDDLFSSGFDLFGEPYKTNKGDALANRVQNTLGNYDEMKNLLTNHSNQNHLVGIPKNSVPQNPNNKNEPSFFPEQKNRIIPPHQDNTHPSAPMPPPSVVILNSTLIHSNRKSKPEWSRDSHNPSTVLASQASGQPNKMQTLTQDQSQAKLEDFFVYPAEQPQIGEVEESNPSAKEDSNPNSSGEDAFKEIFQSNSPEESEFAVQAPGSPLVASSLLAPSSGLSVQNFPPGLYCKTSMGQQKPTAYVRPMDGQDQAPDISPTLKPSIEFENSFGNLSFGTLLDGKPSAASSKTKLPKFTILQTSEVSLPSDPSCVEEILRESQHLTPGFTLQKWNDPTTRASTKMLEDDLKLSSDEDDLEPVKTLTTQCTATELYQAVEKAKPRNNPVK

SEQ ID NO: 38379 - protein, 34 aa, Artificial Sequence
  Synthetic polypeptide
VHVLCRDKEEAGNHHSQQTIARTENQTPHVLTHR

SEQ ID NO: 38380 - protein, 706 aa, Artificial Sequence
  Synthetic polypeptide
QIYKKKTHNPIKKWAKDMNRHFSKEDIYAANRHMKKCSSSLATREMQIKTTMRYHLTPVRMAIIKKSGNNRCWRGCGEIGTLLHCWWDCKLVQPLWKTVWRFLKDLELEILFDPAIPLLGIYPKDYKSCCYKDTCTHMFIAALFTIAKTWNQAKCPTMIDWIKKMWHIYTMEYYAAIKKDEFMSFVGTRRKLETIILSKLSQGQKTKHRMFSLIDKSDKYDARDVERLQQDDNWVESYLSWRHNIVDETLKMLDESFQWRKEISVNDLNESSIPRWLLEIGVIYLHGYDKEGNKLFWIRVKYHVKDQKTILDKKKLIAFWLERYAKRENGKPVTVMFDLSETGINSIDMDFVRFIINCFKVYYPKYLSKIVIFDMPWLMNAAFKIVKTWLGPEAVSLLKFTSKNEVQDYVSVEYLPPHMGGTDPFKYSYPPLVDDDFQTPLCENGPITSEDETSSKEDIESDGKETLETISNEEQTPLLKKINPTESTSKAEENEKVDSKVKAFKKPLSVFKGPLLHISPAEELYFGSTESGEKKTLIVLTNVTKNIVAFKVRTTAPEKYRVKPSNSSCDPGASVDIVVSPHGGLTVSAQDRFLIMAAEMEQSSGTGPAELTQFWKEVPRNKVMEHRLRCHTVESSKPNTLTLKDNAFNMSDKTSEDICLQLSRLLESNRKLEDQVQRCIWFQQLLLSLTMLLLAFVTSFFYLLYS

SEQ ID NO: 38381 - protein, 674 aa, Artificial Sequence
  Synthetic polypeptide
QIYKKKTHNPIKKWAKDMNRHFSKEDIYAANRHMKKCSSSLATREMQIKTTMRYHLTPVRMAIIKKSGNNRCWRGCGEIGTLLHCWWDCKLVQPLWKTVWRFLKDLELEILFDPAIPLLGIYPKDYKSCCYKDTCTHMFIAALFTIAKTWNQAKCPTMIDWIKKMWHIYTMEYYAAIKKDEFMSFVGTRRKLETIILSKLSQGQKTKHRMFSLIDKSDKYDARDVERLQQDDNWVESYLSWRHNIVDETLKMLDESFQWRKEISVNDLNESSIPRWLLEIGVIYLHGYDKEGNKLFWIRVKYHVKDQKTILDKKKLIAFWLERYAKRENGKPVTVMFDLSETGINSIDMDFVRFIINCFKVYYPKYLSKIVIFDMPWLMNAAFKIVKTWLGPEAVSLLKFTSKNEVQDYVSVEYLPPHMGGTDPFKYSYPPLVDDDFQTPLCENGPITSEDETSSKEDIESDGKETLETISNEEQTPLLKKINPTESTSKAEENEKVDSKVKAFKKPLSVFKGPLLHISPAEELYFGSTESGEKKTLIVLTNVTKNIVAFKVRTTAPEKYRVKPSNSSCDPGASVDIVVSPHGGLTVSAQDRFLIMAAEMEQSSGTGPAELTQFWKEVPRNKVMEHRLRCHTVESSKPNTLTLKDNAFNMSDKTSEDICLQFATSSCEMDCSPP

SEQ ID NO: 38382 - protein, 23 aa, Artificial Sequence
  Synthetic polypeptide
QPTFLKKKKKKHTRRTKVPQVSD

SEQ ID NO: 38383 - protein, 33 aa, Artificial Sequence
  Synthetic polypeptide
PDNRHFLKKKKKSTPGGPKFHRFQTEDFIYQKV

SEQ ID NO: 38384 - protein, 27 aa, Artificial Sequence
  Synthetic polypeptide
KKKKKAHQEDQSSTGFRLKTSSTRKYK

SEQ ID NO: 38385 - protein, 50 aa, Artificial Sequence
  Synthetic polypeptide
GQAQWLTLTVPALWEAEVVCVPLWILMSFLCLVVLYYIVWSVLFLRSMDV

SEQ ID NO: 38386 - protein, 49 aa, Artificial Sequence
  Synthetic polypeptide
ARRSGLHLQSQHFGRPRLCVSRCGFSCPFCAWWSSTTLCGPSCSCALWM

SEQ ID NO: 38387 - protein, 49 aa, Artificial Sequence
  Synthetic polypeptide
PGAVAYTYSPSTLGGRGCVCPAVDSHVLSVPGGPLLHCVVRLVLALYGC

SEQ ID NO: 38388 - protein, 198 aa, Artificial Sequence
  Synthetic polypeptide
GQAQWLTLTVPALWEAEVVCVPLWILMSFLCLVVLYYIVWSVLFLRSMDVIAEQRRTHITMALSWMTIVVPLLTFEILLVHKLDGHNAFSSIPIFVPLWLSLITLMATTFGQKGGNHWWFGIRKDFCQFLLEIFPFLREYGNISYDLHHEDNEETEETPVPEPPKIAPMFRKKARVVITQSPGKYVLPPPKLNIEMPD

SEQ ID NO: 38389 - protein, 74 aa, Artificial Sequence
  Synthetic polypeptide
PGAVAYTYSPSTLGGRGCVCPAVDSHVLSVPGGPLLHCVVRLVLALYGCDCRAAQDTHNHGPELDDHRRAPSYI

SEQ ID NO: 38390 - protein, 450 aa, Artificial Sequence
  Synthetic polypeptide
GRAWWLMPVIPALWEAETGGSRGQEIETVLANMKECLVPLCGEEENSVHILDEKLSDNFQDSEQLVEKIWYRVIDDSLVVGVKTTSSLKLSLNDVTLSLLMDQAHDSRFRLLKCQNRVIKLSTNPFPAPYLMPCEIGLEAKRVTLTPDSKKEESFVCEHPSKKECVQIITAVTSLSPLLTFSKFCCTVLLQIMERESGNCPKDRYVVCGRVFLSLEDLSTGKYLLTFPKKKPIEHMEDLFALLAAFHKSCFQITSPGYALNSMKVWLLEHMKCEIIKEFPEVYFCERPGSFYGTLFTWKQRTPFEGILIIYSRNQTVMFQCLHNLIRILPINCFLKNLKSGSENFLIDNMAFTLEKELVTLSSLSSAIAKHESNFMQRCEVSKGKSSVVAAALSDRRENIHPYRKELQREKKKMLQTNLKVSGALYREITLKVAEVQLKSDFAAQKLSNL

SEQ ID NO: 38391 - protein, 15 aa, Artificial Sequence
  Synthetic polypeptide
DSPGQHEGMSCSSLW

SEQ ID NO: 38392 - protein, 409 aa, Artificial Sequence
  Synthetic polypeptide
GRAWWLMPVIPALWEAETGGSRGQEIETVLANMKECLVPLCGEEENSVHILDEKLSDNFQDSEQLVEKIWYRVIDDSLVVGVKTTSSLKLSLNDVTLSLLMDQAHDSRFRLLKCQNRVIKLSTNPFPAPYLMPCEIGLEAKRVTLTPDSKKEESFVCEHPSKKECVQIITAVTSLSPLLTFSKFCCTVLLQIMERESGNCPKDRYVVCGRVFLSLEDLSTGKYLLTFPKKKPIEHMEDLFALLAAFHKSCFQITSPGYALNSMKVWLLEHMKCEIIKEFPEVYFCERPGSFYGTLFTWKQRTPFEGILIIYSRNQTVMFQCLHNLIRILPINCFLKNLKSGSENFLIDNMAFTLEKELVTLSSLSSAIAKHESNFMQRCEVSKGKSSVVAAALSDRRENIHPYRKELQR

SEQ ID NO: 38393 - protein, 34 aa, Artificial Sequence
  Synthetic polypeptide
VHILCRDMDEAGNHHSEQTMARTENQTPHVLTHR

SEQ ID NO: 38394 - protein, 538 aa, Artificial Sequence
  Synthetic polypeptide
RKCGIYATIKNDEFISFVGTWMKLETIILSKLWQGQKTKHRMFSLIDKSDKYDARDVERLQQDDNWVESYLSWRHNIVDETLKMLDESFQWRKEISVNDLNESSIPRWLLEIGVIYLHGYDKEGNKLFWIRVKYHVKDQKTILDKKKLIAFWLERYAKRENGKPVTVMFDLSETGINSIDMDFVRFIINCFKVYYPKYLSKIVIFDMPWLMNAAFKIVKTWLGPEAVSLLKFTSKNEVQDYVSVEYLPPHMGGTDPFKYSYPPLVDDDFQTPLCENGPITSEDETSSKEDIESDGKETLETISNEEQTPLLKKINPTESTSKAEENEKVDSKVKAFKKPLSVFKGPLLHISPAEELYFGSTESGEKKTLIVLTNVTKNIVAFKVRTTAPEKYRVKPSNSSCDPGASVDIVVSPHGGLTVSAQDRFLIMAAEMEQSSGTGPAELTQFWKEVPRNKVMEHRLRCHTVESSKPNTLTLKDNAFNMSDKTSEDICLQLSRLLESNRKLEDQVQRCIWFQQLLLSLTMLLLAFVTSFFYLLYS

SEQ ID NO: 38395 - protein, 506 aa, Artificial Sequence
  Synthetic polypeptide
RKCGIYATIKNDEFISFVGTWMKLETIILSKLWQGQKTKHRMFSLIDKSDKYDARDVERLQQDDNWVESYLSWRHNIVDETLKMLDESFQWRKEISVNDLNESSIPRWLLEIGVIYLHGYDKEGNKLFWIRVKYHVKDQKTILDKKKLIAFWLERYAKRENGKPVTVMFDLSETGINSIDMDFVRFIINCFKVYYPKYLSKIVIFDMPWLMNAAFKIVKTWLGPEAVSLLKFTSKNEVQDYVSVEYLPPHMGGTDPFKYSYPPLVDDDFQTPLCENGPITSEDETSSKEDIESDGKETLETISNEEQTPLLKKINPTESTSKAEENEKVDSKVKAFKKPLSVFKGPLLHISPAEELYFGSTESGEKKTLIVLTNVTKNIVAFKVRTTAPEKYRVKPSNSSCDPGASVDIVVSPHGGLTVSAQDRFLIMAAEMEQSSGTGPAELTQFWKEVPRNKVMEHRLRCHTVESSKPNTLTLKDNAFNMSDKTSEDICLQFATSSCEMDCSPP

SEQ ID NO: 38396 - protein, 11 aa, Artificial Sequence
  Synthetic polypeptide
TVISKRATTRT

SEQ ID NO: 38397 - protein, 27 aa, Artificial Sequence
  Synthetic polypeptide
YPRGQQLGHEKPEVRFETGRPQQKRYV

SEQ ID NO: 38398 - protein, 15 aa, Artificial Sequence
  Synthetic polypeptide
SRTFSLQNSLVSGYS

SEQ ID NO: 38399 - protein, 28 aa, Artificial Sequence
  Synthetic polypeptide
RNQLCQHPDLGLSASRTLWYQDTASLME

SEQ ID NO: 38400 - protein, 54 aa, Artificial Sequence
  Synthetic polypeptide
GVPRTSSNHQKLRERHGTDSSLYPPKGTNSASTLISDFQPPELFGIRIQLASWN

SEQ ID NO: 38401 - protein, 36 aa, Artificial Sequence
  Synthetic polypeptide
PEQRVEDMKVKVLTQMQNLCSWRSTTFMSCESHYAN

SEQ ID NO: 38402 - protein, 23 aa, Artificial Sequence
  Synthetic polypeptide
NWTSASHPAISSPHYDQNKGWRI

SEQ ID NO: 38403 - protein, 342 aa, Artificial Sequence
  Synthetic polypeptide
IISYLTYSRNLEIGLLPHTLQSHLHIMTRTKGGGYESESAYPNAELVFLEIHNIHVMRESLRKLKEIVYPSIDEARWLSNVDGTHWLEYIRMLLAGAVRIADKIESGKTSVVVHCSDGWDRTAQLTSLAMLMLDSYYRTIKGFETLVEKEWISFGHRFALRVGHGNDNHADADRSPIFLQFVDCVWQMTRQFPSAFEFNELFLITILDHLYSCLFGTFLCNCEQQRFKEDVYTKTISLWSYINSQLDEFSNPFFVNYENHVLYPVASLSHLELWVNYYVRWNPRMRPQMPIHQNLKELLAVRAELQKRVEGLQREVATRAVSSSSERGSSPSHSATSVHTSV

SEQ ID NO: 38404 - protein, 245 aa, Artificial Sequence
  Synthetic polypeptide
IISYLTYSRNLEIGLLPHTLQSHLHIMTRTKGGGYESESAYPNAELVFLEIHNIHVMRESLRKLKEIVYPSIDEARWLSNVDGTHWLEYIRMLLAGAVRIADKIESGKTSVVVHCSDGWDRTAQLTSLAMLMLDSYYRTIKGFETLVEKEWISFGHRFALRVGHGNDNHADADRSPIFLQFVDCVWQMTRQFPSAFEFNELFLITILDHLYSCLFGTFLCNCEQQRFKEAWGAGTQRARGSLRSR

SEQ ID NO: 38405 - protein, 122 aa, Artificial Sequence
  Synthetic polypeptide
SRTQKNATFCLFLLSPYDLEAPHLYPCFELSHLSGPNQCMVAEPGTIAGVASALAMALIGAVSSYISYQQKKFCFSIQQGLNADYVKGENLEAVVCEEPQVKYSTLHTQSAEPPPPPEPARI

SEQ ID NO: 38406 - protein, 88 aa, Artificial Sequence
  Synthetic polypeptide
KADQGLKRMQPFVSFSYLPMTWKHPTSTPALSCPTFLDQTNAWWQSLAPLPGWPAPWPWPSSVPSPATSPTSRRSSASAFSRVSTQTT

SEQ ID NO: 38407 - protein, 67 aa, Artificial Sequence
  Synthetic polypeptide
VVPPFWTKPMHGGRAWHHCRGGQRPGHGPHRCRLQLHLLPAEEVLLQHSAGSQRRLREGREPGSRGM

SEQ ID NO: 38408 - protein, 69 aa, Artificial Sequence
  Synthetic polypeptide
STQHSPWNKVMAGTAAMTTLDLAWWQSLAPLPGWPAPWPWPSSVPSPATSPTSRRSSASAFSRVSTQTT

SEQ ID NO: 38409 - protein, 27 aa, Artificial Sequence
  Synthetic polypeptide
EALPPRITVRMTWEEPCEALSTVLGTR

SEQ ID NO: 38410 - protein, 112 aa, Artificial Sequence
  Synthetic polypeptide
HGRSHVKHSAQSLEQGDGRYGSNDDPGSGMVAEPGTIAGVASALAMALIGAVSSYISYQQKKFCFSIQQGLNADYVKGENLEAVVCEEPQVKYSTLHTQSAEPPPPPEPARI

SEQ ID NO: 38411 - protein, 25 aa, Artificial Sequence
  Synthetic polypeptide
STQHSPWNKVMAGTAAMTTLDLVGF

SEQ ID NO: 38412 - protein, 44 aa, Artificial Sequence
  Synthetic polypeptide
HGRSHVKHSAQSLEQGDGRYGSNDDPGSGGFLNPEAPVGHVKGK

SEQ ID NO: 38413 - protein, 48 aa, Artificial Sequence
  Synthetic polypeptide
GHHQKPTPPVLDLGLPDFKTPAGLPSLSWGKLGETRWTGVDCTETLVW

SEQ ID NO: 38414 - protein, 77 aa, Artificial Sequence
  Synthetic polypeptide
HFCACMSLLSLSRALCTCTEEGPRMDILRKGHLQARNKAITRSQPRQSLIWDFQTSKLLLACLHCPGGSSGRPGGLE

SEQ ID NO: 38415 - protein, 81 aa, Artificial Sequence
  Synthetic polypeptide
SGTSRLQNSCWPAFTVLGEARGDQVDWSRLYRDTGLVKMSRKPRASSPFSNNHPSTPKRFPRQPKREKGPVKEVPGTKGSP

SEQ ID NO: 38416 - protein, 40 aa, Artificial Sequence
  Synthetic polypeptide
GHHQKPTPPVLDLGLPDFKTPAGLPSLSWGKLGETRWTGV

SEQ ID NO: 38417 - protein, 28 aa, Artificial Sequence
  Synthetic polypeptide
SGTSRLQNSCWPAFTVLGEARGDQVDWS

SEQ ID NO: 38418 - protein, 76 aa, Artificial Sequence
  Synthetic polypeptide
SGTSRLQNSCWPAFTVLGEARGDQVDWSRLYRDTGLVKMSRKPRASSPFSNNHPSTPKRRGRGKHPLIPGPEALSK

SEQ ID NO: 38419 - protein, 314 aa, Artificial Sequence
  Synthetic polypeptide
GRGSWGGQGEEQSGGRQTKGFSHERALLEPGPLCEAASPSHPEKHSVQPFRALKGNLVIKVHAKEGASCSSSGGKGSDLGEADWGHNLGTLLTVGALRPGPSSLFASLFPSDNHQEKRKQVTPHEDRDNAGPVCHWLFHGQPRARPKGALAMSSCPVHDCPSWDPERLEPVETGSRGALRLRGGAPGSAAGFRASIWGPAGYPSPVGLGHPASLPRPAYSPRCPEPDARHGWGSGSNAGYRGPDRAGTPCPAQDREGRSSSPVPPPRLKAMTSQARKQNGGALIDTVDWTREAPDSDPVMSMQKTQKPQTTVGQ

SEQ ID NO: 38420 - protein, 54 aa, Artificial Sequence
  Synthetic polypeptide
GEAGAAGGDKERSRAVEDRQKGSPMNVPSWSLGHSARPHHPHTQKSTQCSHFEL

SEQ ID NO: 38421 - protein, 24 aa, Artificial Sequence
  Synthetic polypeptide
VRQGQLGGTRRGAERWKTDKRVLP

SEQ ID NO: 38422 - protein, 17 aa, Artificial Sequence
  Synthetic polypeptide
QNESLSQKKKRPGGRGG

SEQ ID NO: 38423 - protein, 299 aa, Artificial Sequence
  Synthetic polypeptide
AMIAPLHSSLGDRMSPCLRKKKDLVEEEAEEAGVALRSTQSTLQAGLAADAWAAPIAMQIYKKHLDPRPGPCPPELGLGLGQLACCCLHRRAKRRPPMTQVYERLEKLQAVVAGVPGHSEAASCIPPSPQENSYVSSTGRAHSGAAPWQPLAAPSGASAQAAEQLQRGPNQPVESDESLGGLSAALRSWHLTPSCPLDPAPLREAGCPQGDTAGESSWGSGPGSRPTAVEGLALGSSASSSSEPPQIIINPARQKMVQKLALYEDGALDSLQLLSSSSLPGLGLEQDRQGPEESDEFQS

SEQ ID NO: 38424 - protein, 21 aa, Artificial Sequence
  Synthetic polypeptide
VPVSEKKKTWWKRRLRRLEWL

SEQ ID NO: 38425 - protein, 254 aa, Artificial Sequence
  Synthetic polypeptide
AMIAPLHSSLGDRMSPCLRKKKDLVEEEAEEAGVALRSTQSTLQAGLAADAWAAPIAMQIYKKHLGQLACCCLHRRAKRRPPMTQENSYVSSTGRAHSGAAPWQPLAAPSGASAQAAEQLQRGPNQPVESDESLGGLSAALRSWHLTPSCPLDPAPLREAGCPQGDTAGESSWGSGPGSRPTAVEGLALGSSASSSSEPPQIIINPARQKMVQKLALYEDGALDSLQLLSSSSLPGLGLEQDRQGPEESDEFQS

SEQ ID NO: 38426 - protein, 219 aa, Artificial Sequence
  Synthetic polypeptide
AMIAPLHSSLGDRMSPCLRKKKDLVEEEAEEAGVALRSTQSTLQAGLAADAWAAPIAMQIYKKHLDPRPGPCPPELGLGLGQLACCCLHRRAKRRPPMTQDWPLAALHHRRQSHRRLSSTLPDRRWSRSWPCTRMGPWTACSCCRPAPSQAWAWNRTGRGPKKVMNFRADVFTWADPPNPEVKVLMVRSSHGARVLSTLPAVGVGAHARGGEKEVALLF

SEQ ID NO: 38427 - protein, 269 aa, Artificial Sequence
  Synthetic polypeptide
AMIAPLHSSLGDRMSPCLRKKKDLVEEEAEEAGVALRSTQSTLQAGLAADAWAAPIAMQIYKKHLDPRPGPCPPELGLGLGQLACCCLHRRAKRRPPMTQENSYVSSTGRAHSGAAPWQPLAAPSGASAQAAEQLQRGPNQPVESDESLGGLSAALRSWHLTPSCPLDPAPLREAGCPQGDTAGESSWGSGPGSRPTAVEGLALGSSASSSSEPPQIIINPARQKMVQKLALYEDGALDSLQLLSSSSLPGLGLEQDRQGPEESDEFQS

SEQ ID NO: 38428 - protein, 230 aa, Artificial Sequence
  Synthetic polypeptide
AMIAPLHSSLGDRMSPCLRKKKDLVEEEAEEAGVALRSTQSTLQAGLAADAWAAPIAMQIYKKHLDPRPGPCPPELGLGLGQLACCCLHRRAKRRPPMTQVYERLEKLQAVVAGVPGHSEAASCIPPSPQENSYVSSTGRAHSGAAPWQPLAAPSGASAQAAEQLQRGPNQPVESDESLGGLSAALRSWHLTPSCPLDPAPLREAGCPQGDTAGESSWGSGPGSRPTAVE

SEQ ID NO: 38429 - protein, 479 aa, Artificial Sequence
  Synthetic polypeptide
AREEKSEDQDLQGLKDKPLKFKKVKKDKKEEKEGKHEPVQPSAHHSAEPAEAGKAETSEGSGSAPAVPEASASPKQRRSIIRDRGPMYDDPTLPEGWTRKLKQRKSGRSAGKYDVYLINPQGKAFRSKVELIAYFEKVGDTSLDPNDFDFTVTGRGSPSRREQKPPKKPKSPKAPGTGRGRGRPKGSGTTRPKAATSEGVQVKRVLEKSPGKLLVKMPFQTSPGGKAEGGGATTSTQVMVIKRPGRKRKAEADPQAIPKKRGRKPGSVVAAAAAEAKKKAVKESSIRSVQETVLPIKKRKTRETVSIEVKEVVKPLLVSTLGEKSGKGLKTCKSPGRKSKESSPKGRSSSASSPPKKEHHHHHHHSESPKAPVPLLPPLPPPPPEPESSEDPTSPPEPQDLSSSVCKEEKMPRGGSLESDGCPKEPAKTQPAVATAATAAEKYKHRGEGERKDIVSSSMPRPNREEPVDSRTPVTERVS

SEQ ID NO: 38430 - protein, 45 aa, Artificial Sequence
  Synthetic polypeptide
PQLQEPPHPRSRHFQDSTLVTERGKKSQKTRTSRASRTNPSSLKR

SEQ ID NO: 38431 - protein, 22 aa, Artificial Sequence
  Synthetic polypeptide
LSEGRKVRRPGPPGPQGQTPQV

SEQ ID NO: 38432 - protein, 165 aa, Artificial Sequence
  Synthetic polypeptide
AREEKSEDQDLQGLKDKPLKFKKVKKDKKEEKEGKHEPVQPSAHHSAEPAEAGKAETSEGSGSAPAVPEASASPKQRRSIIRDRGPMYDDPTLPEGWTRKLKQRKSGRSAGKYDVYLINPQGKAFRSKVELIAYFEKLQELAEAGDAPKGAAPRDPRRPRQRVCR

SEQ ID NO: 38433 - protein, 43 aa, Artificial Sequence
  Synthetic polypeptide
AREEKSEDQDLQGLKDKPLKFKKVKKDKKEEKEGKHEPVQPSA

SEQ ID NO: 38434 - protein, 39 aa, Artificial Sequence
  Synthetic polypeptide
SKHVLSKAPHLLLPPGPLQLSSCLLTGPGGQRAGAAAGE

SEQ ID NO: 38435 - protein, 118 aa, Artificial Sequence
  Synthetic polypeptide
PCHLYLVTCWAPALKQTRLKQSSSPAAPTWPPAVVLVSVDGPGRPASRRGSWRVSARRCSSSTACRWTSCACRARAWRPRSAWSARPPRRRRGSWPSCRWPITSSSKNTTTTSRAAWW

SEQ ID NO: 38436 - protein, 73 aa, Artificial Sequence
  Synthetic polypeptide
PCHLYLVTCWAPALKQTRLKQSSSPAAPTWPPAVVLVSVDGPGRPASRRGSWRVSARRCSSSTACRWTSCACR

SEQ ID NO: 38437 - protein, 147 aa, Artificial Sequence
  Synthetic polypeptide
PCHLYLVTCWAPALKQTRLKQSSSPAAPTWPPAVVLVSVDGPGRPASRRGSWRVSARRCSSSTACRWTSCACRARAWRPRSAWSARPPRRRRGSWPSCRWPITSSSKNTTTTSRAAWWAVSGSEECSWKISNSSSSRPRRPWWPNRR

SEQ ID NO: 38438 - protein, 75 aa, Artificial Sequence
  Synthetic polypeptide
PCHLYLVTCWAPALKQTRLKQSSSPAAPTWPPAVVLVSVDGPGRPASRRGSWRVSARRCSSSTACRWTSCACRAR

SEQ ID NO: 38439 - protein, 140 aa, Artificial Sequence
  Synthetic polypeptide
PCHLYLVTCWAPALKQTRLKQSSSPAAPTWPPAVVLVSVDGPGRPASRRGSWRVSARRCSSSTACRWTSCACRARAWRPRSAWSARPPRRRRGSWPSCRWPITSSSKNTTTTSRAAWECSWKISNSSSSRPRRPWWPNRR

SEQ ID NO: 38440 - protein, 451 aa, Artificial Sequence
  Synthetic polypeptide
TKFGAHFSLPDFSKIWKVVAVSHPLNTVTEDMYTNGSPAPGSPAQVKGQEVRKVRLIQFEKVTEEPMGITLKLNEKQSCTVARILHGGMIHRQGSLHVGDEILEINGTNVTNHSVDQLQKAMKETKGMISLKVIPNQQSRLPALQMFMRAQFDYDPKKDNLIPCKEAGLKFATGDIIQIINKDDSNWWQGRVEGSSKESAGLIPSPELQEWRVASMAQSAPSEAPSCSPFGKKKKYKDKYLAKHSSIFDQLDVVSYEEVVRLPAFKRKTLVLIGASGVGRSHIKNALLSQNPEKFVYPVPYTTRPPRKSEEDGKEYHFISTEEMTRNISANEFLEFGSYQGNMFGTKFETVHQIHKQNKIAILDIEPQTLKIVRTAELSPFIVFIAPTDQGTQTEALQQLQKDSEAIRSQYAHYFDLSLVNNGVDETLKKLQEAFDQACSSPQWVPVSWVY

SEQ ID NO: 38441 - protein, 30 aa, Artificial Sequence
  Synthetic polypeptide
FLQNLESSCCIASIEYCDRGHVHQRVSCPR

SEQ ID NO: 38442 - protein, 431 aa, Artificial Sequence
  Synthetic polypeptide
TKFGAHFSLPDFSKIWKVVAVSHPLNTVTEDMYTNGSPAPGSPAQVKGQEVRKVRLIQFEKVTEEPMGITLKLNEKQSCTVARILHGGMIHRQGSLHVGDEILEINGTNVTNHSVDQLQKAMKETKGMISLKVIPNQQSRLPALQEAGLKFATGDIIQIINKDDSNWWQGRVEGSSKESAGLIPSPELQEWRVASMAQSAPSEAPSCSPFGKKKKYKDKYLAKHSSIFDQLDVVSYEEVVRLPAFKRKTLVLIGASGVGRSHIKNALLSQNPEKFVYPVPYTTRPPRKSEEDGKEYHFISTEEMTRNISANEFLEFGSYQGNMFGTKFETVHQIHKQNKIAILDIEPQTLKIVRTAELSPFIVFIAPTDQGTQTEALQQLQKDSEAIRSQYAHYFDLSLVNNGVDETLKKLQEAFDQACSSPQWVPVSWVY

SEQ ID NO: 38443 - protein, 25 aa, Artificial Sequence
  Synthetic polypeptide
TKFGAHFSLPDFSKIWKVVAVSHPL

SEQ ID NO: 38444 - protein, 14 aa, Artificial Sequence
  Synthetic polypeptide
FLQNLESSCCIASI

SEQ ID NO: 38445 - protein, 116 aa, Artificial Sequence
  Synthetic polypeptide
TKFGAHFSLPDFSKIWKVVAVSHPLNTVTEDMYTNGSPAPGSPAQVKGQEGITLKLNEKQSCTVARILHGGMIHRQGSLHVGDEILEINGTNVTNHSVDQLQKAMKETKGMISLKV

SEQ ID NO: 38446 - protein, 26 aa, Artificial Sequence
  Synthetic polypeptide
DPLLGCIASIEYCDRGHVHQRVSCPR

SEQ ID NO: 38447 - protein, 16 aa, Artificial Sequence
  Synthetic polypeptide
RAVFSLRPTPRLYRIH

SEQ ID NO: 38448 - protein, 10 aa, Artificial Sequence
  Synthetic polypeptide
DPLLGCIASI

SEQ ID NO: 38449 - protein, 49 aa, Artificial Sequence
  Synthetic polypeptide
ALTFPHHSLNCSPRATSSPANSIHGMRESKSQSILYLMSLSGKCALNQQ

SEQ ID NO: 38450 - protein, 23 aa, Artificial Sequence
  Synthetic polypeptide
HSLTTHLIAHPEQLPVLQTPFMV

SEQ ID NO: 38451 - protein, 123 aa, Artificial Sequence
  Synthetic polypeptide
LLTQSNFQSCKLHSWYERIEIPIHIVPHVTIGKVCLESAVELPKILCQEEQDAYRRIHSLTHLDSVTKIHNGSVFTKNLCSQMSAVSGPLLQWLEDRLEQNQQHLQELQQEKEELMQELSSLE

SEQ ID NO: 38452 - protein, 57 aa, Artificial Sequence
  Synthetic polypeptide
LLTQSNFQSCKLHSWYERIEIPIHIVPHVTIGKVCLESAVELPKILCQEEQDAYRRI

SEQ ID NO: 38453 - protein, 124 aa, Artificial Sequence
  Synthetic polypeptide
LLTQSNFQSCKLHSWYERIEIPIHIVPHVTIGKVCLESAVELPKILCQEEQDAYRRIHSLTHLDSVTKIHNGSEVFTKNLCSQMSAVSGPLLQWLEDRLEQNQQHLQELQQEKEELMQELSSLE

SEQ ID NO: 38454 - protein, 4 aa, Artificial Sequence
  Synthetic polypeptide
MIQC

SEQ ID NO: 38455 - protein, 71 aa, Artificial Sequence
  Synthetic polypeptide
YNANVMLEYDIDEAQALLEKNLSTATKNLDSLEEDLDFLRDQFTTTEVNMARVYNWDVKRRNKDDSTKNKA

SEQ ID NO: 38456 - protein, 8 aa, Artificial Sequence
  Synthetic polypeptide
GLNDTMLM

SEQ ID NO: 38457 - protein, 267 aa, Artificial Sequence
  Synthetic polypeptide
WLYKGPFHLALILFSCLLPCEMCLSPSSMIVRPSQPRGTAGSDGESIGNCPFCQRLFMILWLKGVKFNVTTVDMTRKPEELKDLAPGTNPPFLVYNKELKTDFIKIEEFLEQTLAPPRYPHLSPKYKESFDVGCNLFAKFSAYIKNTQKEANKNFEKSLLKEFKRLDDYLNTPLLDEIDPDSAEEPPVSRRLFLDGDQLTLADCSLLPKLNIIKVAAKKYRDFDIPAEFSGVWRYLHNAYAREEFTHTCPEDKEIENTYANVAKQKS

SEQ ID NO: 38458 - protein, 26 aa, Artificial Sequence
  Synthetic polypeptide
GLPSHVELLEVMERVLETVPFANAFS

SEQ ID NO: 38459 - protein, 21 aa, Artificial Sequence
  Synthetic polypeptide
DVPFTFFHDCEAFPATWNCWK

SEQ ID NO: 38460 - protein, 153 aa, Artificial Sequence
  Synthetic polypeptide
WLYKGPFHLALILFSCLLPCEMCLSPSSMIVRPSQPRGTAGSDGESIGNCPFCQRLFMILWLKGVKFNVTTVDMTRYPHLSPKYKESFDVGCNLFAKFSAYIKNTQKEANKNFEKSLLKEFKRLDDYLNTPLLDEIDPDSAEEPPVSRRLFLD

SEQ ID NO: 38461 - protein, 13 aa, Artificial Sequence
  Synthetic polypeptide
FLHFHLRARWSCD

SEQ ID NO: 38462 - protein, 37 aa, Artificial Sequence
  Synthetic polypeptide
GRSQDGRIGTAPVYSSQRERRRRRVISAFPSEGQMVM

SEQ ID NO: 38463 - protein, 27 aa, Artificial Sequence
  Synthetic polypeptide
EEGAPRYPTSWKGAAWPMKTSVDTLVK

SEQ ID NO: 38464 - protein, 42 aa, Artificial Sequence
  Synthetic polypeptide
WAEGVSGGSFHSAVSSGRLRDASARRKGHLGILPPGRGQHGP

SEQ ID NO: 38465 - protein, 32 aa, Artificial Sequence
  Synthetic polypeptide
DYKRSDQGRTPGTQLPIEAVPFSLGGHRCLGF

SEQ ID NO: 38466 - protein, 214 aa, Artificial Sequence
  Synthetic polypeptide
PTYLDRIIREVIKGGPLEHNYRLKQFHFHWGAIDAWGSEHTVDSKCFPAELHLVHWNAVRFENFEDAALEENGLAVIGVFLKLGKHHKELQKLVDTLPSIKHKDALVEFGSFDPSCLMPTCPDYWTYSGSLTTPPLSESVTWIIKKQPVEVDHDQLEQFRTLLFTSEGEKEKRMVDNFRPLQPLMNRTVRSSFRHDYVLNVQAKPKPATSQATP

SEQ ID NO: 38467 - protein, 27 aa, Artificial Sequence
  Synthetic polypeptide
DYKRSDQGRTPGTQLPIEAVPFSLGGH

SEQ ID NO: 38468 - protein, 33 aa, Artificial Sequence
  Synthetic polypeptide
PTYLDRIIREVIKGGPLEHNYRLKQFHFHWGAI

SEQ ID NO: 38469 - protein, 33 aa, Artificial Sequence
  Synthetic polypeptide
PCKEGCVCFLFCHDCKFPEASPAMLNYAVYVAF

SEQ ID NO: 38470 - protein, 158 aa, Artificial Sequence
  Synthetic polypeptide
TMQFMLLFSRQGKLRLQKWYVPLSDKEKKKITRELVQTVLARKPKMCSFLEWRDLKIVYKRYASLYFCCAIEDQDNELITLEIIHRYVELLDKYFGSVCELDIIFNFEKAYFILDEFLLGGEVQETSKKNVLKAIEQADLLQEEAETPRSVLEEIGLT

SEQ ID NO: 38471 - protein, 46 aa, Artificial Sequence
  Synthetic polypeptide
GLTSHAELCSLCCFLVVRESFDCKNGMSHYQTKRRKRSQENLFRPF

SEQ ID NO: 38472 - protein, 161 aa, Artificial Sequence
  Synthetic polypeptide
TMQFMLLFSRQGKLRLQKWYVPLSDKEKKKITRELVQTVLARKPKMCSFLEWRDLKIVYKRYASLYFCCAIEDQDNELITLEIIHRYVELLDKYFGSVCELDIIFNFEKAYFILDEFLLGGEVQETSKKNVLKAIEQADLLQEKTETMYHSKSFIGFKKAY

SEQ ID NO: 38473 - protein, 154 aa, Artificial Sequence
  Synthetic polypeptide
TMQFMLLFSRQGKLRLQKWYVPLSDKEKKKITRELVQTVLARKPKMCSFLEWRDLKIVYKRYASLYFCCAIEDQDNELITLEIIHRYVELLDKYFGSVCELDIIFNFEKAYFILDEFLLGGEVQETSKKNVLKAIEQADLLQEPRHEYFNVPVY

SEQ ID NO: 38474 - protein, 21 aa, Artificial Sequence
  Synthetic polypeptide
PCKEGCVCFLFCHDYAVYVAF

SEQ ID NO: 38475 - protein, 171 aa, Artificial Sequence
  Synthetic polypeptide
HVKKDVFASSSAMIMQFMLLFSRQGKLRLQKWYVPLSDKEKKKITRELVQTVLARKPKMCSFLEWRDLKIVYKRYASLYFCCAIEDQDNELITLEIIHRYVELLDKYFGSVCELDIIFNFEKAYFILDEFLLGGEVQETSKKNVLKAIEQADLLQEEAETPRSVLEEIGLT

SEQ ID NO: 38476 - protein, 174 aa, Artificial Sequence
  Synthetic polypeptide
HVKKDVFASSSAMIMQFMLLFSRQGKLRLQKWYVPLSDKEKKKITRELVQTVLARKPKMCSFLEWRDLKIVYKRYASLYFCCAIEDQDNELITLEIIHRYVELLDKYFGSVCELDIIFNFEKAYFILDEFLLGGEVQETSKKNVLKAIEQADLLQEKTETMYHSKSFIGFKKAY

SEQ ID NO: 38477 - protein, 167 aa, Artificial Sequence
  Synthetic polypeptide
HVKKDVFASSSAMIMQFMLLFSRQGKLRLQKWYVPLSDKEKKKITRELVQTVLARKPKMCSFLEWRDLKIVYKRYASLYFCCAIEDQDNELITLEIIHRYVELLDKYFGSVCELDIIFNFEKAYFILDEFLLGGEVQETSKKNVLKAIEQADLLQEPRHEYFNVPVY

SEQ ID NO: 38478 - protein, 267 aa, Artificial Sequence
  Synthetic polypeptide
LSCVLEDPTKVLMDISTPQIEYKAIVRPMDIQASHALMKICLKAAFIWIISMLLAIPEAVFSDLHPFHEESTNQTFISCAPYPHSNELHPKIHSMASFLVFYVIPLSIISVYYYFIAKNLIQSAYNLPVEGNIHVKKQIESRKRLAKTVLVFVGLFAFCWLPNHVIYLYRSYHYSEVDTSMLHFVTSICARLLAFTNSCVNPFALYLLSKSFRKQFNTQLLCCQPGLIIRSHSTGRSTTCMTSLKSTNPSVATFSLINGNICHERYV

SEQ ID NO: 38479 - protein, 24 aa, Artificial Sequence
  Synthetic polypeptide
WISPLLKLNTKPLSGQWISRPLMP

SEQ ID NO: 38480 - protein, 85 aa, Artificial Sequence
  Synthetic polypeptide
GPSWLGANHPPDSSSEIWFLKMCDAPDPLALLLLLSLCGTPAPVLPSVMNKSSLGLARSDASAMLPVQPTEPLKLAQWKKLEFVG

SEQ ID NO: 38481 - protein, 23 aa, Artificial Sequence
  Synthetic polypeptide
IRAPWASPEAMPAPCFLYSQQNL

SEQ ID NO: 38482 - protein, 515 aa, Artificial Sequence
  Synthetic polypeptide
ELPGPRQKRCQRHASCTANRTFEIGTMEEAGICGLGVKADMLCNSQSNDILQHQGSNCGGTSNKHSLEEDEGSDFITENRNLVSPAYCTQESREEIPGGEARTDPPDGQQDSECNRNKEKTLGKEVLLLMQALNTLSTPEEKLAALCKKYADLLEESRSVQKQMKILQKKQAQIVKEKVHLQSEHSKAILARSKLESLCRELQRHNKTLKEENMQQAREEEERRKEATAHFQITLNEIQAQLEQHDIHNAKLRQENIELGEKLKKLIEQYALREEHIDKVFKHKELQQQLVDAKLQQTTQLIKEADEKHQREREFLLKEATESRHKYEQMKQQEVQLKQQLSLYMDKFEEFQTTMAKSNELFTTFRQEMEKMTKKIKKLEKETIIWRTKWENNNKALLQMAEEKTVRDKEYKALQIKLERLEKLCRALQTERNELNEKVEVLKEQVSIKAAIKAANRDLATPVMQPCTALDSHKELNTSSKRALGAHLEAEPKSQRSAVQKPPSTGSAPAIESVD

SEQ ID NO: 38483 - protein, 73 aa, Artificial Sequence
  Synthetic polypeptide
ISSTASFSSCNRKMAISSLSCQMKQLACIEVPVMYEEDVGNLEAQDFTLNERLNSYCLSWMKRRKSGFGCRWK

SEQ ID NO: 38484 - protein, 13 aa, Artificial Sequence
  Synthetic polypeptide
GILKPKILHSTRD

SEQ ID NO: 38485 - protein, 41 aa, Artificial Sequence
  Synthetic polypeptide
SPRFYTQREIKQLLSELDEEKKIRLRLQMEVNDIKKALQSK

SEQ ID NO: 38486 - protein, 58 aa, Artificial Sequence
  Synthetic polypeptide
AFWIITGRFWSRATLEVADASPIINQAWYRRACTFRLSISVYGSLAQGDLSLISSEKD

SEQ ID NO: 38487 - protein, 14 aa, Artificial Sequence
  Synthetic polypeptide
RSGSSQEDSGPEQL

SEQ ID NO: 38488 - protein, 72 aa, Artificial Sequence
  Synthetic polypeptide
VLDHHRKILVQSNFRGGRCQPNYKSGLVQKSLYIQAKYQRLRFTGPRGFITHKFRERLMRKKKEYTDVATGI

SEQ ID NO: 38489 - protein, 65 aa, Artificial Sequence
  Synthetic polypeptide
VLDHHRKILVQSNFRGGRCQPNYKSGLVQKSLYIQAKYQRLRFTGPRGFITHKFRERLMRKKKVP

SEQ ID NO: 38490 - protein, 32 aa, Artificial Sequence
  Synthetic polypeptide
RSQDGRMGTAPVYSSQRERRRRRVISAFPSEG

SEQ ID NO: 38491 - protein, 107 aa, Artificial Sequence
  Synthetic polypeptide
FLHFHLRDDQNSSFSKNYTTQRKDIITHKPFEVEGNHRNTRVRPFKSNFRGGRCQPNYKSGLVQKSLYIQAKYQRLRFTGPRGFITHKFRERLMRKKKEYTDVATGI

SEQ ID NO: 38492 - protein, 100 aa, Artificial Sequence
  Synthetic polypeptide
FLHFHLRDDQNSSFSKNYTTQRKDIITHKPFEVEGNHRNTRVRPFKSNFRGGRCQPNYKSGLVQKSLYIQAKYQRLRFTGPRGFITHKFRERLMRKKKVP

SEQ ID NO: 38493 - protein, 136 aa, Artificial Sequence
  Synthetic polypeptide
FLHFHLRDDQNSSFSKVKNVHTDGFQKPTHFIKSNFRKCIEKPYMNYTTQRKDIITHKPFEVEGNHRNTRVRPFKSNFRGGRCQPNYKSGLVQKSLYIQAKYQRLRFTGPRGFITHKFRERLMRKKKEYTDVATGI

SEQ ID NO: 38494 - protein, 50 aa, Artificial Sequence
  Synthetic polypeptide
FLHFHLRDDQNSSFSKGLALSPRLECGVTITAYCSLYLQDSSYLPPQPPE

SEQ ID NO: 38495 - protein, 442 aa, Artificial Sequence
  Synthetic polypeptide
KWLKWTATKAYPQSPKTTKPPYPGSPVKYRLPALSGQDMPKRKAEKEKSNKEREGTLAQQAAGPQGEEALEKHVVDKHASEKHAAAAGGKAENSAALGKPTAGTTDAGEAAKILAEKRRQARLQKEQEEQERLEKEEQDRLEREELKRKAEEERLRLEEEARKQEEERKRQEEEKKKQEGEEKRKAGEEAKRKAEEELLLKEKQEQEKQEKAMIEKQKEAAETKAREVAEQMRLEREQIMLQIEQERLERKKRIDEIMKRTRKSDVSPQVKKEDPKVGVQPAVCVEKKTKLVVPNKMEINGLNTCQEVNGVDHAAPETYPQDIFSNGLKPAGGLIHLDALDGKSNSLDDSTEEVQSMDVSPVSKEELISIPEFSPVSEMIPGVSLDQNGTGNARALQDLLDFTGPPTFPKRSSENLSLDDCNKNLIEGFNSPGQETPLNTFC

SEQ ID NO: 38496 - protein, 23 aa, Artificial Sequence
  Synthetic polypeptide
NGQLLKLIHSLQRQRNLPTQGLL

SEQ ID NO: 38497 - protein, 12 aa, Artificial Sequence
  Synthetic polypeptide
TVHLKMVKMDSY

SEQ ID NO: 38498 - protein, 204 aa, Artificial Sequence
  Synthetic polypeptide
SEHFGRPRQEDCLTPGVSDQPGQHSETPSLQKILKLAGHGGVPVVSATQEAEVLKRQGYDAACDIWSLGVLLYTMLTGYTPFANGPDDTPEEILARIGSGKFSLSGGYWNSVSDTAKDLVSKMLHVDPHQRLTAALVLRHPWIVHWDQLPQYQLNRQDAPHLVKGAMAATYSALNRNQSPVLEPVGRSTLAQRRGIKKITSTAL

SEQ ID NO: 38499 - protein, 9 aa, Artificial Sequence
  Synthetic polypeptide
SQLLRRLRF

SEQ ID NO: 38500 - protein, 18 aa, Artificial Sequence
  Synthetic polypeptide
KVRTDGTRNSTAGGIFIL

SEQ ID NO: 38501 - protein, 245 aa, Artificial Sequence
  Synthetic polypeptide
EQMAPGIPLLVEFLYCDLASMTSIRQFVQKFKMKKIPLHVLINNAGVMMVPQRKTRDGFEEHFGLNYLGHFLLTNLLLDTLKESGSPGHSARVVTVSSATHYVAELNMDDLQSSACYSPHAAYAQSKLALVLFTYHLQRLLAAEGSHVTANVVDPGVVNTDVYKHVFWATRLAKKLLGWLLFKTPDEGAWTSIYAAVTPELEGVGGHYLYNEKETKSLHVTYNQKLQQQLWSKSCEMTGVLDVTL

SEQ ID NO: 38502 - protein, 24 aa, Artificial Sequence
  Synthetic polypeptide
IKSKNRWHQEFHCWWNFYTVTWLP

SEQ ID NO: 38503 - protein, 170 aa, Artificial Sequence
  Synthetic polypeptide
EQMAPGIPLLVEFLYCDLASMTSIRQFVQKFKMKKIPLHVLINNAGVMMVPQRKTRDGFEEHFGLNYLGHFLLTNLLLDTLKESGSPGHSARVVTVSSATHYVAELNMDDLQSSACYSPHAAYAQSKLALVLFTYHLQRLLAAEGSHVTANVVDPGVVNTDVYKHVFWAT

SEQ ID NO: 38504 - protein, 103 aa, Artificial Sequence
  Synthetic polypeptide
EQMAPGIPLLVEFLYCDLASMTSIRQFVQKFKMKKIPLHVLINNAGVMMVPQRKTRDGFEEHFGLNYLGHFLLTNLLLDTLKESGSPGHSARVVTVSSATHYV

SEQ ID NO: 38505 - protein, 21 aa, Artificial Sequence
  Synthetic polypeptide
PVPVPSLLVTGLCSRSFPPTT

SEQ ID NO: 38506 - protein, 300 aa, Artificial Sequence
  Synthetic polypeptide
LGCAAGVFPPRPDRVAIVTGGTDGIGYSTAKHLARLGMHVIIAGNNDSKAKQVVSKIKEETLNDKVEFLYCDLASMTSIRQFVQKFKMKKIPLHVLINNAGVMMVPQRKTRDGFEEHFGLNYLGHFLLTNLLLDTLKESGSPGHSARVVTVSSATHYVAELNMDDLQSSACYSPHAAYAQSKLALVLFTYHLQRLLAAEGSHVTANVVDPGVVNTDVYKHVFWATRLAKKLLGWLLFKTPDEGAWTSIYAAVTPELEGVGGHYLYNEKETKSLHVTYNQKLQQQLWSKSCEMTGVLDVTL

SEQ ID NO: 38507 - protein, 25 aa, Artificial Sequence
  Synthetic polypeptide
STGPQPFSNWAVQQEFSPHDLTVSL

SEQ ID NO: 38508 - protein, 202 aa, Artificial Sequence
  Synthetic polypeptide
LGCAAGVFPPRPDRVAIVTGGTDGIGYSTAKHLARLGMHVIIVEFLYCDLASMTSIRQFVQKFKMKKIPLHVLINNAGVMMVPQRKTRDGFEEHFGLNYLGHFLLTNLLLDTLKESGSPGHSARVVTVSSATHYVAELNMDDLQSSACYSPHAAYAQSKLALVLFTYHLQRLLAAEGSHVTANVVDPGVVNTDVYKHVFWAT

SEQ ID NO: 38509 - protein, 67 aa, Artificial Sequence
  Synthetic polypeptide
LGCAAGVFPPRPDRVAIVTGGTDGIGYSTAKHLARLGMHVIIAGNNDSKAKQVVSKIKEETLNDKET

SEQ ID NO: 38510 - protein, 103 aa, Artificial Sequence
  Synthetic polypeptide
SQHFGRPRQVDYKVKRSRPSWPTCTFVCPTEIIAFGDRLEEFRSINTEVVACSVDSQFTHLAWINTPRRQGGLGPIRIPLLSDLTHQISKDYGVYLEDSGHTL

SEQ ID NO: 38511 - protein, 46 aa, Artificial Sequence
  Synthetic polypeptide
CNPSTLGGQGRWITRSRDRDHPGQHAHLCVQLKLSLLATDLKNSDL

SEQ ID NO: 38512 - protein, 31 aa, Artificial Sequence
  Synthetic polypeptide
VIPALWEAKAGGLQGQEIETILANMHICVSN

SEQ ID NO: 38513 - protein, 175 aa, Artificial Sequence
  Synthetic polypeptide
SQHFGRPRQVDYKVKRSRPSWPTCTFVCPTEIIAFGDRLEEFRSINTEVVACSVDSQFTHLAWINTPRRQGGLGPIRIPLLSDLTHQISKDYGVYLEDSGHTLRGLFIIDDKGILRQITLNDLPVGRSVDETLRLVQAFQYTDKHGEVCPAGWKPGSETIIPDPAGKLKYFDKLN

SEQ ID NO: 38514 - protein, 90 aa, Artificial Sequence
  Synthetic polypeptide
SQHFGRPRQVDYKVKRSRPSWPTCTFVCPTEIIAFGDRLEEFRSINTEVVACSVDSQFTHLAWSVSYTYIRRKKRMDLLLKHGQITLDMI

SEQ ID NO: 38515 - protein, 26 aa, Artificial Sequence
  Synthetic polypeptide
TWEAEVAFLFVTCTTKSTPPRCLLYR

SEQ ID NO: 38516 - protein, 54 aa, Artificial Sequence
  Synthetic polypeptide
PVVLVGAVIPATWEAEARESLEPGRQRLRSYLLHAQQNPLRQDVSFIDSYSPGG

SEQ ID NO: 38517 - protein, 335 aa, Artificial Sequence
  Synthetic polypeptide
SQLLGRLRQENHLNLGGRGCVLICYMHNKIHSAKMSPLSIVTALVDKIDMCKKSLSPEQDIKFSGHVSWVGKTSMEVKMQMFQLHGDEFCPVLDATFVMVARDSENKGPAFVNPLIPESPEEEELFRQGELNKGRRIAFSSTSLLKMAPSAEERTTIHEMFLSTLDPKTISFRSRVLPSNAVWMENSKLKSLEICHPQERNIFNRIFGGFLMRKAYELAWATACSFGGSRPFVVAVDDIMFQKPVEVGSLLFLSSQVCFTQNNYIQVRVHSEVASLQEKQHTTTNVFHFTFMSEKEVPLVFPKTYGESMLYLDGQRHFNSMSGPATLRKDYLVEP

SEQ ID NO: 38518 - protein, 92 aa, Artificial Sequence
  Synthetic polypeptide
SQLLGRLRQENHLNLGGRGCVLICYMHNKIHSAKMSPLSIVTALVDKIDMCKKSLSPEQDIKFSGHVSWVGKTSMEVKMQMFQAGICKSTHP

SEQ ID NO: 38519 - protein, 16 aa, Artificial Sequence
  Synthetic polypeptide
RAPEMANVWFEISCGR

SEQ ID NO: 38520 - protein, 33 aa, Artificial Sequence
  Synthetic polypeptide
RKLFKLMENYTRWTLEFAQRNEEHQKWQMCGSR

SEQ ID NO: 38521 - protein, 424 aa, Artificial Sequence
  Synthetic polypeptide
WKIIPDGHLNLPKGMKSTRNGKCVVRDKLREIVGASTNWRDHVKAMEERKLLHSFLAKSQDGLPPRRMKDSYIEVLLPLGSEPELREKYLTVQNTVRFGRILEDLDSLGVLICYMHNKIHSAKMSPLSIVTALVDKIDMCKKSLSPEQDIKFSGHVSWVGKTSMEVKMQMFQLHGDEFCPVLDATFVMVARDSENKGPAFVNPLIPESPEEEELFRQGELNKGRRIAFSSTSLLKMAPSAEERTTIHEMFLSTLDPKTISFRSRVLPSNAVWMENSKLKSLEICHPQERNIFNRIFGGFLMRKAYELAWATACSFGGSRPFVVAVDDIMFQKPVEVGSLLFLSSQVCFTQNNYIQVRVHSEVASLQEKQHTTTNVFHFTFMSEKEVPLVFPKTYGESMLYLDGQRHFNSMSGPATLRKDYLVEP

SEQ ID NO: 38522 - protein, 40 aa, Artificial Sequence
  Synthetic polypeptide
RAPEMANVWALCLGQRAAYSWKRTDSRTPEPQETGNLPHS

SEQ ID NO: 38523 - protein, 472 aa, Artificial Sequence
  Synthetic polypeptide
RKLFKLMENYTRWTLEFAQRNEEHQKWQMCGLCALGKGQLTPGRGLTQGPQNPKKQGIFHIHEACSSIHVNHVRDKLREIVGASTNWRDHVKAMEERKLLHSFLAKSQDGLPPRRMKDSYIEVLLPLGSEPELREKYLTVQNTVRFGRILEDLDSLGVLICYMHNKIHSAKMSPLSIVTALVDKIDMCKKSLSPEQDIKFSGHVSWVGKTSMEVKMQMFQLHGDEFCPVLDATFVMVARDSENKGPAFVNPLIPESPEEEELFRQGELNKGRRIAFSSTSLLKMAPSAEERTTIHEMFLSTLDPKTISFRSRVLPSNAVWMENSKLKSLEICHPQERNIFNRIFGGFLMRKAYELAWATACSFGGSRPFVVAVDDIMFQKPVEVGSLLFLSSQVCFTQNNYIQVRVHSEVASLQEKQHTTTNVFHFTFMSEKEVPLVFPKTYGESMLYLDGQRHFNSMSGPATLRKDYLVEP

SEQ ID NO: 38524 - protein, 39 aa, Artificial Sequence
  Synthetic polypeptide
WKIIPDGHLNLPKGMKSTRNGKCVGFVPWAKGSLLLEED

SEQ ID NO: 38525 - protein, 463 aa, Artificial Sequence
  Synthetic polypeptide
RKLFKLMENYTRWTLEFAQRNEEHQKWQMCGLCALGKGQLTPGRGLTQGPQNPKKQGIFHIHEVRDKLREIVGASTNWRDHVKAMEERKLLHSFLAKSQDGLPPRRMKDSYIEVLLPLGSEPELREKYLTVQNTVRFGRILEDLDSLGVLICYMHNKIHSAKMSPLSIVTALVDKIDMCKKSLSPEQDIKFSGHVSWVGKTSMEVKMQMFQLHGDEFCPVLDATFVMVARDSENKGPAFVNPLIPESPEEEELFRQGELNKGRRIAFSSTSLLKMAPSAEERTTIHEMFLSTLDPKTISFRSRVLPSNAVWMENSKLKSLEICHPQERNIFNRIFGGFLMRKAYELAWATACSFGGSRPFVVAVDDIMFQKPVEVGSLLFLSSQVCFTQNNYIQVRVHSEVASLQEKQHTTTNVFHFTFMSEKEVPLVFPKTYGESMLYLDGQRHFNSMSGPATLRKDYLVEP

SEQ ID NO: 38526 - protein, 70 aa, Artificial Sequence
  Synthetic polypeptide
RKLFKLMENYTRWTLEFAQRNEEHQKWQMCGLCALGKGQLTPGRGLTQGPQNPKKQGIFHIHEGKHGVSV

SEQ ID NO: 38527 - protein, 449 aa, Artificial Sequence
  Synthetic polypeptide
RAPEMANVLCALGKGQLTPGRGLTQGPQNPKKQGIFHIHEACSSIHVNHVRDKLREIVGASTNWRDHVKAMEERKLLHSFLAKSQDGLPPRRMKDSYIEVLLPLGSEPELREKYLTVQNTVRFGRILEDLDSLGVLICYMHNKIHSAKMSPLSIVTALVDKIDMCKKSLSPEQDIKFSGHVSWVGKTSMEVKMQMFQLHGDEFCPVLDATFVMVARDSENKGPAFVNPLIPESPEEEELFRQGELNKGRRIAFSSTSLLKMAPSAEERTTIHEMFLSTLDPKTISFRSRVLPSNAVWMENSKLKSLEICHPQERNIFNRIFGGFLMRKAYELAWATACSFGGSRPFVVAVDDIMFQKPVEVGSLLFLSSQVCFTQNNYIQVRVHSEVASLQEKQHTTTNVFHFTFMSEKEVPLVFPKTYGESMLYLDGQRHFNSMSGPATLRKDYLVEP

SEQ ID NO: 38528 - protein, 44 aa, Artificial Sequence
  Synthetic polypeptide
RKLFKLMENYTRWTLEFAQRNEEHQKWQMCFVPWAKGSLLLEED

SEQ ID NO: 38529 - protein, 54 aa, Artificial Sequence
  Synthetic polypeptide
WKIIPDGHLNLPKGMKSTRNGKCALCLGQRAAYSWKRTDSRTPEPQETGNLPHS

SEQ ID NO: 38530 - protein, 440 aa, Artificial Sequence
  Synthetic polypeptide
RAPEMANVLCALGKGQLTPGRGLTQGPQNPKKQGIFHIHEVRDKLREIVGASTNWRDHVKAMEERKLLHSFLAKSQDGLPPRRMKDSYIEVLLPLGSEPELREKYLTVQNTVRFGRILEDLDSLGVLICYMHNKIHSAKMSPLSIVTALVDKIDMCKKSLSPEQDIKFSGHVSWVGKTSMEVKMQMFQLHGDEFCPVLDATFVMVARDSENKGPAFVNPLIPESPEEEELFRQGELNKGRRIAFSSTSLLKMAPSAEERTTIHEMFLSTLDPKTISFRSRVLPSNAVWMENSKLKSLEICHPQERNIFNRIFGGFLMRKAYELAWATACSFGGSRPFVVAVDDIMFQKPVEVGSLLFLSSQVCFTQNNYIQVRVHSEVASLQEKQHTTTNVFHFTFMSEKEVPLVFPKTYGESMLYLDGQRHFNSMSGPATLRKDYLVEP

SEQ ID NO: 38531 - protein, 47 aa, Artificial Sequence
  Synthetic polypeptide
RAPEMANVLCALGKGQLTPGRGLTQGPQNPKKQGIFHIHEGKHGVSV

SEQ ID NO: 38532 - protein, 11 aa, Artificial Sequence
  Synthetic polypeptide
DETRSRLIELS

SEQ ID NO: 38533 - protein, 14 aa, Artificial Sequence
  Synthetic polypeptide
TVHVAMVKMRQDQD

SEQ ID NO: 38534 - protein, 947 aa, Artificial Sequence
  Synthetic polypeptide
VWNILLYQKATTVLKSTEDMSKGLRNQLEESSTEQRWDNVRIIAMAALVHHSFALDKAAPKPPFQSHFCVVSKPKDCIFPYAFKEVIEKKNVKVEVAATERTLLGFFLAKVHKIDPDIIVGHNIYGFELEVLLQRINVCKAPHWSKIGRLKRSNMPKLGGRSGFGERNATCGRMICDVEISAKELIRCKSYHLSELVQQILKTERVVIPMENIQNMYSESSQLLYLLEHTWKDAKFILQIMCELNVLPLALQITNIAGNIMSRTLMGGRSERNEFLLLHAFYENNYIVPDKQIFRKPQQKLGDEDEEIDGDTNKYKKGRKKAAYAGGLVLDPKVGFYDKFILLLDFNSLYPSIIQEFNICFTTVQRVASEAQKVTEDGEQEQIPELPDPSLEMGILPREIRKLVERRKQVKQLMKQQDLNPDLILQYDIRQKALKLTANSMYGCLGFSYSRFYAKPLAALVTYKGREILMHTKEMVQKMNLEVIYGDTDSIMINTNSTNLEEVFKLGNKVKSEVNKLYKLLEIDIDGVFKSLLLLKKKKYAALVVEPTSDGNYVTKQELKGLDIVRRDWCDLAKDTGNFVIGQILSDQSRDTIVENIQKRLIEIGENVLNGSVPVSQFEINKALTKDPQDYPDKKSLPHVHVALWINSQGGRKVKAGDTVSYVICQDGSNLTASQRAYAPEQLQKQDNLTIDTQYYLAQQIHPVVARICEPIDGIDAVLIATWLGLDPTQFRVHHYHKDEENDALLGGPAQLTDEEKYRDCERFKCPCPTCGTENIYDNVFDGSGTDMEPSLYRCSNIDCKASPLTFTVQLSNKLIMDIRRFIKKYYDGWLICEEPTCRNRTRHLPLQFSRTGPLCPACMKATLQPEYSDKSLYTQLCFYRYIFDAECALEKLTTDHEKDKLKKQFFTPKVLQDYRKLKNTAEQFLSRSGYSEVNLSKLFAGCAVKS

SEQ ID NO: 38535 - protein, 22 aa, Artificial Sequence
  Synthetic polypeptide
TKMGQCEDYCYGSFGPSQFCIG

SEQ ID NO: 38536 - protein, 481 aa, Artificial Sequence
  Synthetic polypeptide
IILMHTKEMVQKMNLEVIYGDTDSIMINTNSTNLEEVFKLGNKVKSEVNKLYKLLEIDIDGVFKSLLLLKKKKYAALVVEPTSDGNYVTKQELKGLDIVRRDWCDLAKDTGNFVIGQILSDQSRDTIVENIQKRLIEIGENVLNGSVPVSQFEINKALTKDPQDYPDKKSLPHVHVALWINSQGGRKVKAGDTVSYVICQDGSNLTASQRAYAPEQLQKQDNLTIDTQYYLAQQIHPVVARICEPIDGIDAVLIATWLGLDPTQFRVHHYHKDEENDALLGGPAQLTDEEKYRDCERFKCPCPTCGTENIYDNVFDGSGTDMEPSLYRCSNIDCKASPLTFTVQLSNKLIMDIRRFIKKYYDGWLICEEPTCRNRTRHLPLQFSRTGPLCPACMKATLQPEYSDKSLYTQLCFYRYIFDAECALEKLTTDHEKDKLKKQFFTPKVLQDYRKLKNTAEQFLSRSGYSEVNLSKLFAGCAVKS

SEQ ID NO: 38537 - protein, 55 aa, Artificial Sequence
  Synthetic polypeptide
MFFHLCHPRVSKTSPSSSSALLNMKMMRMKTLMMIYFHLMNNFDAYERDGTKDES

SEQ ID NO: 38538 - protein, 178 aa, Artificial Sequence
  Synthetic polypeptide
GQVRWLTPVIPALWEAKAGQRDFDLADALDDPEPTKKPNSDIYPKPKPPYYPQPENPDSGGNIYPRPKPRPQPQPGNSGNSGGYFNDVDRDDGRYPPRPRPRPPAGGGGGGYSSYGNSDNTHGGDHHSTYGNPEGNMVAKIVSPIVSVVVVTLLGAAASYFKLNNRRNCFRTHEPENV

SEQ ID NO: 38539 - protein, 128 aa, Artificial Sequence
  Synthetic polypeptide
SQHFGRPRQVKETLIWQMPLMTLNPPRSQTQISTQSQNHLTTHSPRIPTAVEISTQGQSHALNPSLAIPATVEVTSMMWTVMTDATRPGPGHGRLQEVAAVATPVMATPTTRTVEITIQRMAIQKAIW

SEQ ID NO: 38540 - protein, 22 aa, Artificial Sequence
  Synthetic polypeptide
PGAVAHACNPSTLGGQGRSKRL

SEQ ID NO: 38541 - protein, 193 aa, Artificial Sequence
  Synthetic polypeptide
GQVRWLTPVIPALWEAKAGQRDFDLADALDDPEPTKKPNSDIYPKPKPPYYPQPENPDSGGNIYPRPKPRPQPQPGNSGNSGGYFNDVDRDDGRYPPRPRPRPPAGGGGGGYSSYGNSDNTHGRGGYRLNSRYGNTYGGDHHSTYGNPEGNMVAKIVSPIVSVVVVTLLGAAASYFKLNNRRNCFRTHEPENV

SEQ ID NO: 38542 - protein, 143 aa, Artificial Sequence
  Synthetic polypeptide
SQHFGRPRQVKETLIWQMPLMTLNPPRSQTQISTQSQNHLTTHSPRIPTAVEISTQGQSHALNPSLAIPATVEVTSMMWTVMTDATRPGPGHGRLQEVAAVATPVMATPTTRTEEGAIDSTLVMEILMVEITIQRMAIQKAIW

SEQ ID NO: 38543 - protein, 179 aa, Artificial Sequence
  Synthetic polypeptide
GQVRWLTPVIPALWEAKAGQRDFDLADALDDPEPTKKPNSDIYPKPKPPYYPQPENPDSGGNIYPRPKPRPQPQPGNSGNSGGSYFNDVDRDDGRYPPRPRPRPPAGGGGGGYSSYGNSDNTHGGDHHSTYGNPEGNMVAKIVSPIVSVVVVTLLGAAASYFKLNNRRNCFRTHEPENV

SEQ ID NO: 38544 - protein, 129 aa, Artificial Sequence
  Synthetic polypeptide
SQHFGRPRQVKETLIWQMPLMTLNPPRSQTQISTQSQNHLTTHSPRIPTAVEISTQGQSHALNPSLAIPATVEVVTSMMWTVMTDATRPGPGHGRLQEVAAVATPVMATPTTRTVEITIQRMAIQKAIW

SEQ ID NO: 38545 - protein, 22 aa, Artificial Sequence
  Synthetic polypeptide
LVGCILTPQTPAQLREKPEELA

SEQ ID NO: 38546 - protein, 110 aa, Artificial Sequence
  Synthetic polypeptide
RWSSFSVENILTDVHSCCILLTSRLHSDSSDPCTIERKARRISVTSKVQADIHDTQAAAADEHRTGSTQSPRTQPRDEDYEGAPWNCDSCTFLNHPALNRCEQCEMPRYT

SEQ ID NO: 38547 - protein, 13 aa, Artificial Sequence
  Synthetic polypeptide
LVGCILETLIQKP

SEQ ID NO: 38548 - protein, 6 aa, Artificial Sequence
  Synthetic polypeptide
AAFWKL

SEQ ID NO: 38549 - protein, 138 aa, Artificial Sequence
  Synthetic polypeptide
RWSSFSVENILTDVHSCCILLTSRLHSGNFDPKAMNNFYDNIEPGPVVPPKPSKKDSSDPCTIERKARRISVTSKVQADIHDTQAAAADEHRTGSTQSPRTQPRDEDYEGAPWNCDSCTFLNHPALNRCEQCEMPRYT

SEQ ID NO: 38550 - protein, 932 aa, Artificial Sequence
  Synthetic polypeptide
WFYKWEFPCTSSAVCHVRRAFASPLPSTMIMMPPQPCGTFKLMLTSLDKELASGLQMTAMVEYHPDKDEDTFDRLLISIENKTTEIPLIGLIPSCQLEIESVVNFGTLVANSKVYSKEITITNHGKAPGIFKAEYHGQLPILIFPTSGIVDAKSSMVIKVDFCADQPRIVDEEAIVILQGQPEMLLSIKAHVVEQIIELLSMSSDRRLECIHFGPVFFGSSKIKHARVYNNSPEPINWVAIIQDDAVGEELGTDIQQRTDIALNNLTYIRKIKNIDTTIIISCLPNEGTLQPYQKTVITFCFTPKLMAVGKKDIGPSYRQDYALFLRFESVGSKDGFLRDDDYKTIKSERFQKVELALTGTGLPVLLQFDPGPVLNFKPCFMGERSEIQCIIKNQCELLPVTYHFKKTANFEIDPEKGKITGGGMVDVMCSFVPHQLGVFKVKQMIEIIGLVAEEDLQSLSVKSFHHVYLAFNSICKASTKKVVMKFDPGILPSIRNPTGKFVVKDLAKRKNYAPVAMLQSAMTRTHNHRSCEEPVKDMLLAFPNDRAATIRSKDHHKHFRPIFTKVPRFNYVNHDFAYTTFEKQQKKLHENYYAMYLKYLRSVRLQKKQAERERMYSYDDTDIGLEPGSGLKSPSLSEAEIEEELSSAANSIRANRLLTTRGIASQEEESVRRKVLKGLKSEPSTPQEKHDCSLMLTPKQIHQVIVGPSVLNFGNICVNSPNTHLLHVINMLPMHVLLQLDTDLEELQKTNQFSYVILPTSSTYISMVFDSPTIGKFWKSFTFTVNNVPSGHILVVAVVQPVTLELSSNELVLRPRGFFMKTCFRGTVRLYNRQNCCAQFQWQPVNTGRGIAFSICPAKGTVEAYSSLECEVTWQQGFSSPEEGEFILHVFQGNALKLKCVAHVIIFLEHGFCFEGYEFVGYTLVYIVTYI

SEQ ID NO: 38551 - protein, 10 aa, Artificial Sequence
  Synthetic polypeptide
CLPSHVELSN

SEQ ID NO: 38552 - protein, 44 aa, Artificial Sequence
  Synthetic polypeptide
MGIPLHKLCRLPCKTCLCFSFAFHHDHDASPAMWNFQTDVDQSG

SEQ ID NO: 38553 - protein, 710 aa, Artificial Sequence
  Synthetic polypeptide
WFYKWEFPCTSSAVCHVRRAFASPLPSTMIMMPPQPCGTFKLMLTSLDKELASGLQMTAMVEYHPDKDEDTFDRLLISIENKTTEIPLIGLIPSCQLEIESVVNFGTLVANSKVYSKEITITNHGKAPGIFKAEYHGQLPILIFPTSGIVDAKSSMVIKVDFCADQPRIVDEEAIVILQGQPEMLLSIKAHVVEQIIELLSMSSDRRLECIHFGPVFFGSSKIKHARVYNNSPEPINWVAIIQDDAVGEELGTDIQQRTDIALNNLTYIRKIKNIDTTIIISCLPNEGTLQPYQKTVITFCFTPKLMAVGKKDIGPSYRQDYALFLRFESVGSKDGFLRDDDYKTIKSERFQKVELALTGTGLPVLLQFDPGPVLNFKPCFMGERSEIQCIIKNQCELLPVTYHFKKTANFEIDPEKGKITGGGMVDVMCSFVPHQLGVFKVKQMIEIIGLVAEEDLQSLSVKSFHHVYLAFNSICKASTKKVVMKFDPGILPSIRNPTGKFVVKDLAKRKNYAPVAMLQSAMTRTHNHRSCEEPVKDMLLAFPNDRAATIRSKDHHKHFRPIFTKVPRFNYVNHDFAYTTFEKQQKKLHENYYAMYLKYLRSVRLQKKQAERERMYSYDDTDIGLEPGSGLKSPSLSEAEIEEELSSAANSIRANRLLTTRGIASQEEESVRRKVLKGLKSEPSTPQEKHDCSLMLTPKQIHQVIVVRY

SEQ ID NO: 38554 - protein, 58 aa, Artificial Sequence
  Synthetic polypeptide
RAPKIHCRRKGLYFLVPLTQRVPEACLAFSDIRLLQHRQFLQYLALAVYSASRIQHSN

SEQ ID NO: 38555 - protein, 20 aa, Artificial Sequence
  Synthetic polypeptide
LLQCTVPAVSSIQTDVDQSG

SEQ ID NO: 38556 - protein, 916 aa, Artificial Sequence
  Synthetic polypeptide
APAAQAVSPVPSSCSVQCQPYPAFKLMLTSLDKELASGLQMTAMVEYHPDKDEDTFDRLLISIENKTTEIPLIGLIPSCQLEIESVVNFGTLVANSKVYSKEITITNHGKAPGIFKAEYHGQLPILIFPTSGIVDAKSSMVIKVDFCADQPRIVDEEAIVILQGQPEMLLSIKAHVVEQIIELLSMSSDRRLECIHFGPVFFGSSKIKHARVYNNSPEPINWVAIIQDDAVGEELGTDIQQRTDIALNNLTYIRKIKNIDTTIIISCLPNEGTLQPYQKTVITFCFTPKLMAVGKKDIGPSYRQDYALFLRFESVGSKDGFLRDDDYKTIKSERFQKVELALTGTGLPVLLQFDPGPVLNFKPCFMGERSEIQCIIKNQCELLPVTYHFKKTANFEIDPEKGKITGGGMVDVMCSFVPHQLGVFKVKQMIEIIGLVAEEDLQSLSVKSFHHVYLAFNSICKASTKKVVMKFDPGILPSIRNPTGKFVVKDLAKRKNYAPVAMLQSAMTRTHNHRSCEEPVKDMLLAFPNDRAATIRSKDHHKHFRPIFTKVPRFNYVNHDFAYTTFEKQQKKLHENYYAMYLKYLRSVRLQKKQAERERMYSYDDTDIGLEPGSGLKSPSLSEAEIEEELSSAANSIRANRLLTTRGIASQEEESVRRKVLKGLKSEPSTPQEKHDCSLMLTPKQIHQVIVGPSVLNFGNICVNSPNTHLLHVINMLPMHVLLQLDTDLEELQKTNQFSYVILPTSSTYISMVFDSPTIGKFWKSFTFTVNNVPSGHILVVAVVQPVTLELSSNELVLRPRGFFMKTCFRGTVRLYNRQNCCAQFQWQPVNTGRGIAFSICPAKGTVEAYSSLECEVTWQQGFSSPEEGEFILHVFQGNALKLKCVAHVIIFLEHGFCFEGYEFVGYTLVYIVTYI

SEQ ID NO: 38557 - protein, 694 aa, Artificial Sequence
  Synthetic polypeptide
APAAQAVSPVPSSCSVQCQPYPAFKLMLTSLDKELASGLQMTAMVEYHPDKDEDTFDRLLISIENKTTEIPLIGLIPSCQLEIESVVNFGTLVANSKVYSKEITITNHGKAPGIFKAEYHGQLPILIFPTSGIVDAKSSMVIKVDFCADQPRIVDEEAIVILQGQPEMLLSIKAHVVEQIIELLSMSSDRRLECIHFGPVFFGSSKIKHARVYNNSPEPINWVAIIQDDAVGEELGTDIQQRTDIALNNLTYIRKIKNIDTTIIISCLPNEGTLQPYQKTVITFCFTPKLMAVGKKDIGPSYRQDYALFLRFESVGSKDGFLRDDDYKTIKSERFQKVELALTGTGLPVLLQFDPGPVLNFKPCFMGERSEIQCIIKNQCELLPVTYHFKKTANFEIDPEKGKITGGGMVDVMCSFVPHQLGVFKVKQMIEIIGLVAEEDLQSLSVKSFHHVYLAFNSICKASTKKVVMKFDPGILPSIRNPTGKFVVKDLAKRKNYAPVAMLQSAMTRTHNHRSCEEPVKDMLLAFPNDRAATIRSKDHHKHFRPIFTKVPRFNYVNHDFAYTTFEKQQKKLHENYYAMYLKYLRSVRLQKKQAERERMYSYDDTDIGLEPGSGLKSPSLSEAEIEEELSSAANSIRANRLLTTRGIASQEEESVRRKVLKGLKSEPSTPQEKHDCSLMLTPKQIHQVIVVRY

SEQ ID NO: 38558 - protein, 65 aa, Artificial Sequence
  Synthetic polypeptide
SMDRTRSISITWELDRHANSQGPSQTYCVRIYTFNKISSKHSVALIFDTSPWWSWWVCSRLSLAG

SEQ ID NO: 38559 - protein, 48 aa, Artificial Sequence
  Synthetic polypeptide
STCDPWTGPEASASPGSLIDMPILRAPPRPTVSESTLLTKSPASTVWP

SEQ ID NO: 38560 - protein, 105 aa, Artificial Sequence
  Synthetic polypeptide
QNLQQAQCGLDLRHITVVELVGVFPTLIGRIGAKIMPPALALQLRLLLRIPLYSFSMVLVDKHGMDKERYVSLVMPVALFNLIDTFPLRKEEMVLQAEMSQTCNT

SEQ ID NO: 38561 - protein, 474 aa, Artificial Sequence
  Synthetic polypeptide
NPVTNENTKISQVACGGCHMVVFAAPHRGVAKEIEFDEINDTCLSVATFLPYSSLTSGNVLQRTLSARMRRRERERSPDSFSMRRTLPPIEGTLGLSACFLPNSVFPRCSERNLQESVLSEQDLMQPEEPDYLLDEMTKEAEIDNSSTVESLGETTDILNMTHIMSLNSNEKSLKLSPVQKQKKQQTIGELTQDTALTENDDSDEYEEMSEMKEGKACKQHVSQGIFMTQPATTIEAFSDEEVEIPEEKEGAEDSKGNGIEEQEVEANEENVKVHGGRKEKTEILSDDLTDKAEDHEFSKTEELKLEDVDEEINAENVESKKKTVGDDESVPTGYHSKTEGAERTNDDSSAETIEKKEKANLEERAICEYNENPKGYMLDDADSSSLEILENSETTPSKDMKKTKKIFLFKRVPSINQKIVKNNNEPLPEIKSIGDQIILKSDNKDADQNHMSQNHQNIPPTNTERRSKSCTIL

SEQ ID NO: 38562 - protein, 28 aa, Artificial Sequence
  Synthetic polypeptide
EQPGQHGETLSLMKIQKLARLLVVDVTW

SEQ ID NO: 38563 - protein, 23 aa, Artificial Sequence
  Synthetic polypeptide
PGCLWWMSHGSFCCSSSWCGKRN

SEQ ID NO: 38564 - protein, 139 aa, Artificial Sequence
  Synthetic polypeptide
NPVTNENTKISQVACGGCHMVVFAAPHRGVAKEIEFDEINDTCLSVATFLPYSSLTSGNVLQRTLSARMRRRERERSPDSFSMRRTLPPIEGTLGLSACFLPNSVFPRCSERNLQESVLSEQDLMQPEEPDTHHEPEFQ

SEQ ID NO: 38565 - protein, 679 aa, Artificial Sequence
  Synthetic polypeptide
NPVTNENTKISQVACGGCHMVVFAAPHRGVAKEIEFDEINDTCLSVATFLPYSSLTSGNVLQRTLSARMRRRERERSPDSFSMRRTLPPIEGTLGLSACFLPNSVFPRCSERNLQESVLSEQDLMQPEEPDYLLDEMTKEAEIDNSSTVESLGETTDILNMTHIMSLNSNEKSLKLSPVQKQKKQQTIGELTQDTALTENDDSDEYEEMSEMKEGKACKQHVSQGIFMTQPATTIEAFSDEEVGNDTGQVGPQADTDGEGLQKEVYRHENNNGVDQLDAKEIEKESDGGHSQKESEAEEIDSEKETKLAEIAGMKDLREREKSTKKMSPFFGNLPDRGMNTESEENKDFVKKRESCKQDVIFDSERESVEKPDSYMEGASESQQGIADGFQQPEAIEFSSGEKEDDEVETDQNIRYGRKLIEQGNEKETKPIISKSMAKYDFKCDRLSEIPEEKEGAEDSKGNGIEEQEVEANEENVKVHGGRKEKTEILSDDLTDKAEDHEFSKTEELKLEDVDEEINAENVESKKKTVGDDESVPTGYHSKTEGAERTNDDSSAETIEKKEKANLEERAICEYNENPKGYMLDDADSSSLEILENSETTPSKDMKKTKKIFLFKRVPSINQKIVKNNNEPLPEIKSIGDQIILKSDNKDADQNHMSQNHQNIPPTNTERRSKSCTIL

SEQ ID NO: 38566 - protein, 305 aa, Artificial Sequence
  Synthetic polypeptide
NPVTNENTKISQVACGGCHMVVFAAPHRGVAKEIEFDEINDTCLSVATFLPYSSLTSGNVLQRTLSARMRRRERERSPDSFSMRRTLPPIEGTLGLSACFLPNSVFPRCSERNLQESVLSEQDLMQPEEPDYLLDEMTKEAEIDNSSTVESLGETTDILNMTHIMSLNSNEKSLKLSPVQKQKKQQTIGELTQDTALTENDDSDEYEEMSEMKEGKACKQHVSQGIFMTQPATTIEAFSDEEVEIPEEKEGAEDSKGNGIEEQEVEANEENVKVHGGRKEKTEILSDDLTDKAEYSASHSQIVSV

SEQ ID NO: 38567 - protein, 811 aa, Artificial Sequence
  Synthetic polypeptide
NPVTNENTKISQVACGGCHMVVFAAPHRGVAKEIEFDEINDTCLSVATFLPYSSLTSGNVLQRTLSARMRRRERERSPDSFSMRRTLPPIEGTLGLSACFLPNSVFPRCSERNLQESVLSEQDLMQPEEPDYLLDEMTKEAEIDNSSTVESLGETTDILNMTHIMSLNSNEKSLKLSPVQKQKKQQTIGELTQDTALTENDDSDEYEEMSEMKEGKACKQHVSQGIFMTQPATTIEAFSDEEVEIPEEKEGAEDSKGNGIEEQEVEANEENVKVHGGRKEKTEILSDDLTDKAEVSEGKAKSVGEAEDGPEGRGDGTCEEGSSGAEHWQDEEREKGEKDKGRGEMERPGEGEKELAEKEEWKKRDGEEQEQKEREQGHQKERNQEMEEGGEEEHGEGEEEEGDREEEEEKEGEGKEEGEGEEVEGEREKEEGERKKEERAGKEEKGEEEGDQGEGEEEETEGRGEEKEEGGEVEGGEVEEGKGEREEEEEEGEGEEEEGEGEEEEGEGEEEEGEGKGEEEGEEGEGEEEGEEGEGEGEEEEGEGEGEEEGEGEGEEEEGEGEGEEEGEGEGEEEEGEGKGEEEGEEGEGEGEEEEGEGEGEDGEGEGEEEEGEWEGEEEEGEGEGEEEGEGEGEEGEGEGEEEEGEGEGEEEEGEEEGEEEGEGEEEGEGEGEEEEEGEVEGEVEGEEGEGEGEEEEGEEEGEEREKEGEGEENRRNREEEEEEEGKYQETGEEENERQDGEEYKKVSKIKGSVKYGKHKTYQKKSVTNTQGNGKEQRSKMPVQSKRLLKNGPSGSKKFWNNVLPHYLELK

SEQ ID NO: 38568 - protein, 99 aa, Artificial Sequence
  Synthetic polypeptide
NPVTNENTKISQVACGGCHMVVFAAPHRGVAKEIEFDEINDTCLSVATFLPYSSLTSGNVLQRTLSARMRRRERLSLMSSGSLYTINNEMGKQRNKDFN

SEQ ID NO: 38569 - protein, 460 aa, Artificial Sequence
  Synthetic polypeptide
IIAVVSNWFSCPYPYPCSIVCPTAARMILLGQKFVHDFRSKLCIGFPLIQGNLHAASSPSGALRAPSPASFVPTPPPSSHGISIGPGASFASPHGTLDPSSPYTMVSPSGRAGNWPGSPQVSGPSPAARMPGMSPANPSLHSPVPDASHSPRAGTSSQTMPTNMPPPRKLPQRSWAASIPTILTHSALNILLLPSPTPGLVPGLAGSYLCSPLERFLGSVIMRRHLQRIIQQETLQLINSNEPGVIMFKTDALKCRVALSPKTNQTLQLKVTPENAGQWKPDELQVLEKFFETRVAGPPFKANTLIAFTKLLGAPTHILRDCVHIMKLELFPDQATQLKWNVQFCLTIPPSAPPIAPPGTPAVVLKSKMLFFLQLTQKTSVPPQEPVSIIVPIIYDMASGTTQQADIPRQQNSSVAAPMMVSNILKRFAEMNPPRQGECTIFAAVRDLMANLTLPPGGRP

SEQ ID NO: 38570 - protein, 35 aa, Artificial Sequence
  Synthetic polypeptide
SFWDRSSSMISAPNSALDSHSFREICMLPAPPVGL

SEQ ID NO: 38571 - protein, 54 aa, Artificial Sequence
  Synthetic polypeptide
FPLQTLHWIPTHSGKSACCQLPQWGFESPITSVICSNSSPILAWNLNRTRGQFC

SEQ ID NO: 38572 - protein, 58 aa, Artificial Sequence
  Synthetic polypeptide
GWARWLTPVIPALWEAEAGGSLEVRSLSPAWPTCCPIWRFHIKECKWKVMASAMQFAY

SEQ ID NO: 38573 - protein, 21 aa, Artificial Sequence
  Synthetic polypeptide
VQPGQHVVQSGDSTSRSASGR

SEQ ID NO: 38574 - protein, 805 aa, Artificial Sequence
  Synthetic polypeptide
GQEFESSLANMLSNLEIPHQGVQVEGDGFSHAIRLLKIPPCKGITEETQKALDRSLLDCTFRLQGRNNRTWVAELVFANCPLNGTSTREQGPSRHVYLTYENLLSEPVGGRKVVEMFLNDWNSIARLYECVLEFARSLPDIPAHLNIFSEVRVYNYRKLILCYGTTKGSSISIQWNSIHQKFHISLGTVGPNSGCSNCHNTILHQLQEMFNKTPNVVQLLQVLFDTQAPLNAINKLPTVPMLGLTQRTNTAYQCFSILPQSSTHIRLAFRNMYCIDIYCRSRGVVAIRDGAYSLFDNSKLVEGFYPAPGLKTFLNMFVDSNQDARRRSVNEDDNPPSPIGGDMMDSLISQLQPPPQQQPFPKQPGTSGAYPLTSPPTSYHSTVNQSPSMMHTQSPGNLHAASSPSGALRAPSPASFVPTPPPSSHGISIGPGASFASPHGTLDPSSPYTMVSPSGRAGNWPGSPQVSGPSPAARMPGMSPANPSLHSPVPDASHSPRAGTSSQTMPTNMPPPRKLPQRSWAASIPTILTHSALNILLLPSPTPGLVPGLAGSYLCSPLERFLGSVIMRRHLQRIIQQETLQLINSNEPGVIMFKTDALKCRVALSPKTNQTLQLKVTPENAGQWKPDELQVLEKFFETRVAGPPFKANTLIAFTKLLGAPTHILRDCVHIMKLELFPDQATQLKWNVQFCLTIPPSAPPIAPPGTPAVVLKSKMLFFLQLTQKTSVPPQEPVSIIVPIIYDMASGTTQQADIPRQQNSSVAAPMMVSNILKRFAEMNPPRQGECTIFAAVRDLMANLTLPPGGRP

SEQ ID NO: 38575 - protein, 52 aa, Artificial Sequence
  Synthetic polypeptide
KILQWLAIVLTIRSKHLTAASKALSDRHIDVFDCWKPCRARICNHCTSLPCA

SEQ ID NO: 38576 - protein, 167 aa, Artificial Sequence
  Synthetic polypeptide
VIDILMSLTVGNLAEQEFVTIARHYRVPEGTCSDMDFLIALAHEKFKKNMFENFDTFIYSCVYEDREKKNVLPTKDIKRLCKSSRLPLSDDLLESLLSRFEDSEKQIDYKSFFSALNWRKNPVPELQPASYLKERCEDVWLGMPSPIPAKYIDYWTFLKDAFGLEEE

SEQ ID NO: 38577 - protein, 116 aa, Artificial Sequence
  Synthetic polypeptide
GRARWLTPVIPAFWEAEASGSRSQEIETILTNMNQEPLREEDSDFILTEGDLTLTYGDSTVTANGSSSSHTASTSLEGSRRTKSSSEEVLERDLGMGDQKVSSRGTRLVFPLEDNA

SEQ ID NO: 38578 - protein, 42 aa, Artificial Sequence
  Synthetic polypeptide
PGALAHACNPSILGGRGEWITKSRDRDHPDQHEPRATERGRL

SEQ ID NO: 38579 - protein, 21 aa, Artificial Sequence
  Synthetic polypeptide
SIQGAHRWGDPEVWYPCYQWP

SEQ ID NO: 38580 - protein, 635 aa, Artificial Sequence
  Synthetic polypeptide
GYAGECTHSLEMQAEVFRGLIVGVILRYGTPATSGRDKSLSCTQEDRAFSTLLVNVSGKFFEYTLKGEISPGKINSVEQNDMLRKVTFDPEVFFNILLPPIIFHAGYSLKKRHFFRNLGSILAYAFLGTAVSCFIIGNLMYGVVKLMKIMGQLSDKFYYTDCLFFGAIISATDPVTVLAIFNELHADVDLYALLFGESVLNDAVAIVLSSSIVAYQPAGLNTHAFDAAAFFKSVGIFLGIFSGSFTMGAVTGVNANVTKFTKLHCFPLLETALFFLMSWSTFLLAEACGFTGVVAVLFCGITQAHYTYNNLSVESRSRTKQLFEVLHFLAENFIFSYMGLALFTFQKHVFSPIFIIGAFVAIFLGRAAHIYPLSFFLNLGRRHKIGWNFQHMMMFSGLRGAMAFALAIRDTASYARQMMFTTTLLIVFFTVWIIGGGTTPMLSWLNIRVGVEEPSEEDQNEHHWQYFRVGVDPDQDPPPNNDSFQVLQGDGPDSARGNRTKQESAWIFRLWYSFDHNYLKPILTHSGPPLTTTLPAWCGLLARCLTSPQVYDNQEPLREEDSDFILTEGDLTLTYGDSTVTANGSSSSHTASTSLEGSRRTKSSSEEVLERDLGMGDQKVSSRGTRLVFPLEDNA

SEQ ID NO: 38581 - protein, 48 aa, Artificial Sequence
  Synthetic polypeptide
GYLNVDWVLDDIKELLLFFVGVIIEVMQENVLILWRCKLKYSGGSSLG

SEQ ID NO: 38582 - protein, 88 aa, Artificial Sequence
  Synthetic polypeptide
LPALLRTFIKIMPKKPAEDENDSKGVSEASGPQNDGKQLHPPGKANISEKINKRSGPKRGKHAWTHRLRERKQLVIYEEISDPEEDDE

SEQ ID NO: 38583 - protein, 69 aa, Artificial Sequence
  Synthetic polypeptide
EHSLRSCPRSQQRTKMIRRECQKHLAHKTMGNNCTPQEKQIFLRRLIRDLDPKGGNMPGPTDCVRESSW

SEQ ID NO: 38584 - protein, 59 aa, Artificial Sequence
  Synthetic polypeptide
GRAQWLTLVIPALWEAEAGGSLEGKSMPRETADTSWVTTSQCAWKPSQLACGDHSACGW

SEQ ID NO: 38585 - protein, 27 aa, Artificial Sequence
  Synthetic polypeptide
SQHFGRPRQVDHLRERVCQGRQPIHPG

SEQ ID NO: 38586 - protein, 680 aa, Artificial Sequence
  Synthetic polypeptide
CPALPRHSTERPHQQKALTRCDSLTMDFPASRTKCESFLPPEFRSFAVDPQITSLDVLQHILIRAFDLSGKKNFGISYLGRDRLGQEVYLSLLSDWDLSTAFATASKPYLQLRVDIRPSEDSPLLEDWDIISPKDVIGSDVLLAEKRSSLTTAALPFTQSILTQVGRTLSKVQQVLSWSYGEDVKPFKPPLSDAEFHTYLNHEGQLSRPEELRLRIYHGGVEPSLRKVVWRYLLNVYPDGLTGRERMDYMKRKSREYEQLKSEWAQRANPEDLEFIRSTVLKDVLRTDRAHPYYAGPEDGPHLRALHDLLTTYAVTHPQVSYCQGMSDLASPILAVMDHEGHAFVCFCGIMKRLAANFHPDGRAMATKFAHLKLLLRHADPDFYQYLQEAGADDLFFCYRWLLLELKREFAFDDALRMLEVTWSSLPPDPPEHEVELVGPPSQVADAGFGGHRGWPVRQRHMLRPAGGGGSTFEDAVDHLATASQGPGGGGRLLRQASLDGLQQLRDNMGSRRDPLVQLPHPAALISSKSLSEPLLNSPDPLLSSFSHPDSPSSSSPPSTQEASPTGDMAVGSPLMQEVGSPKDPGKSLPPVPPMGLPPPQEFGRGNPFMLFLCLAILLEHRDHIMRNGLDYNELAMHFDRLVRKHHLGRVLRRARALFADYLQSEVWDSEEGAEATAAS

SEQ ID NO: 38587 - protein, 23 aa, Artificial Sequence
  Synthetic polypeptide
PWTSQPPELNVRASCRQSSALLL

SEQ ID NO: 38588 - protein, 92 aa, Artificial Sequence
  Synthetic polypeptide
CPALPRHSTERPHQQKALTRCDSLTMDFPASRTKCESFLPPEFRSFAVDPQITSLDVLQHILIRAFDLSGPIARRLGHNQPQRCHWLRRVAG

SEQ ID NO: 38589 - protein, 206 aa, Artificial Sequence
  Synthetic polypeptide
CPALPRHSTERPHQQKALTRCDSLTMDFPASRTKCESFLPPEFRSFAVDPQITSLDVLQHILIRAFDLSGKKNFGISYLGRDRLGQEVYLSLLSDWDLSTAFATASKPYLQLRVDIRPSEDSPLLEDWDIISPKDVIGSDVLLAEKRSSLTTAALPFTQSILTQVGRTLSKVQQVLSWSYGEDVKPFKPPLSDAEFHTYLNHEGQL

SEQ ID NO: 38590 - protein, 22 aa, Artificial Sequence
  Synthetic polypeptide
WMDGPSSGSALPGAGDSGHPEP

SEQ ID NO: 38591 - protein, 33 aa, Artificial Sequence
  Synthetic polypeptide
GWMGPPVGPLSLGLATVDIQNPDITSSRYRGLP

SEQ ID NO: 38592 - protein, 33 aa, Artificial Sequence
  Synthetic polypeptide
DGWALQWVRSPWGWRQWTSRTLTSRVHDTVGSQ

SEQ ID NO: 38593 - protein, 319 aa, Artificial Sequence
  Synthetic polypeptide
GWMGPPVGPLSLGLATVDIQNPDITSSRYRGLPAPGPSPADKKRSGKKKISKADIGAPSGFKHVSHVGWDPQNGFDVNNLDPDLRSLFSRAGISEAQLTDAETSKLIYDFIEDQGGLEAVRQEMRRQEPLPPPPPPSRGGNQLPRPPIVGGNKGRSGPLPPVPLGIAPPPPTPRGPPPPGRGGPPPPPPPATGRSGPLPPPPPGAGGPPMPPPPPPPPPPPSSGNGPAPPPLPPALVPAGGLAPGGGRGALLDQIRQGIQLNKTPGAPESSALQPPPQSSEGLVGALMHVMQKRSRAIHSSDEGEDQAGDEDEDDEWDD

SEQ ID NO: 38594 - protein, 76 aa, Artificial Sequence
  Synthetic polypeptide
DGWALQWVRSPWGWRQWTSRTLTSRVHDTVGSQHLDLAQLIRNAQGRRRSAKLILVHPVDSSMSATWGGTPRMDLT

SEQ ID NO: 38595 - protein, 156 aa, Artificial Sequence
  Synthetic polypeptide
GWVQWLTPVIPALWEAESWRDSSQTPPPCLIRRLDHIVMTVKSIKDTTMFYSKILGMEVMTFKEDRKALCFGDQKFNLHEVGKEFEPKAAHPVPGSLDICLITEVPLEEMIQHLKACDVPIEEGPVPRTGAKGPIMSIYFRDPDRNLIEVSNYISS

SEQ ID NO: 38596 - protein, 28 aa, Artificial Sequence
  Synthetic polypeptide
SQHSGRPSHGGTAVRPLPHVLSVDLTTS

SEQ ID NO: 38597 - protein, 31 aa, Artificial Sequence
  Synthetic polypeptide
MGAVAHPCNPSTLGGRVMEGQQSDPSPMSYP

SEQ ID NO: 38598 - protein, 29 aa, Artificial Sequence
  Synthetic polypeptide
GWVRWLMPVIPALWEAECPLFLHPPLRAG

SEQ ID NO: 38599 - protein, 954 aa, Artificial Sequence
  Synthetic polypeptide
SQHFGRPSVLYFSIHRYEQGRFWPHLKASNWSTTGFGQGQGYTINVPWNQVGMRDADYIAAFLHVLLPVALEFQPQLVLVAAGFDALQGDPKGEMAATPAGFAQLTHLLMGLAGGKLILSLEGGYNLRALAEGVSASLHTLLGDPCPMLESPGAPCRSAQASVSCALEALEPFWEVLVRSTETVERDNMEEDNVEESEEEGPWEPPVLPILTWPVLQSRTGLVYDQNMMNHCNLWDSHHPEVPQRILRIMCRLEELGLAGRCLTLTPRPATEAELLTCHSAEYVGHLRATEKMKTRELHRESSNFDSIYICPSTFACAQLATGAACRLVEAVLSGEVLNGAAVVRPPGHHAEQDAACGFCFFNSVAVAARHAQTISGHALRILIVDWDVHHGNGTQHMFEDDPSVLYVSLHRYDHGTFFPMGDEGASSQIGRAAGTGFTVNVAWNGPRMGDADYLAAWHRLVLPIAYEFNPELVLVSAGFDAARGDPLGGCQVSPEGYAHLTHLLMGLASGRIILILEGGYNLTSISESMAACTRSLLGDPPPLLTLPRPPLSGALASITETIQVHRRYWRSLRVMKVEDREGPSSSKLVTKKAPQPAKPRLAERMTTREKKVLEAGMGKVTSASFGEESTPGQTNSETAVVALTQDQPSEAATGGATLAQTISEAAIGGAMLGQTTSEEAVGGATPDQTTSEETVGGAILDQTTSEDAVGGATLGQTTSEEAVGGATLAQTTSEAAMEGATLDQTTSEEAPGGTELIQTPLASSTDHQTPPTSPVQGTTPQISPSTLIGSLRTLELGSESQGASESQAPGEENLLGEAAGGQDMADSMLMQGSRGLTDQAIFYAVTPLPWCPHLVAVCPIPAAGLDVTQPCGDCGTIQENWVCLSCYQVYCGRYINGHMLQHHGNSGHPLVLSYIDLSAWCYYCQAYVHHQALLDVKNIAHQNKFGEDMPHPH

SEQ ID NO: 38600 - protein, 34 aa, Artificial Sequence
  Synthetic polypeptide
MGAVAHACNPSTLGGRVSSISPSTATSRVGSGPT

SEQ ID NO: 38601 - protein, 90 aa, Artificial Sequence
  Synthetic polypeptide
SQHFGRPSVLYFSIHRYEQGRFWPHLKASNWSTTGFGQGQGYTINVPWNQVGMRDADYIAAFLHVLLPVALEVLGIWGVLGGGVALKVRL

SEQ ID NO: 38602 - protein, 22 aa, Artificial Sequence
  Synthetic polypeptide
WINKDKNEKMCPLFLHPPLRAG

SEQ ID NO: 38603 - protein, 954 aa, Artificial Sequence
  Synthetic polypeptide
IKIRMKKCVLYFSIHRYEQGRFWPHLKASNWSTTGFGQGQGYTINVPWNQVGMRDADYIAAFLHVLLPVALEFQPQLVLVAAGFDALQGDPKGEMAATPAGFAQLTHLLMGLAGGKLILSLEGGYNLRALAEGVSASLHTLLGDPCPMLESPGAPCRSAQASVSCALEALEPFWEVLVRSTETVERDNMEEDNVEESEEEGPWEPPVLPILTWPVLQSRTGLVYDQNMMNHCNLWDSHHPEVPQRILRIMCRLEELGLAGRCLTLTPRPATEAELLTCHSAEYVGHLRATEKMKTRELHRESSNFDSIYICPSTFACAQLATGAACRLVEAVLSGEVLNGAAVVRPPGHHAEQDAACGFCFFNSVAVAARHAQTISGHALRILIVDWDVHHGNGTQHMFEDDPSVLYVSLHRYDHGTFFPMGDEGASSQIGRAAGTGFTVNVAWNGPRMGDADYLAAWHRLVLPIAYEFNPELVLVSAGFDAARGDPLGGCQVSPEGYAHLTHLLMGLASGRIILILEGGYNLTSISESMAACTRSLLGDPPPLLTLPRPPLSGALASITETIQVHRRYWRSLRVMKVEDREGPSSSKLVTKKAPQPAKPRLAERMTTREKKVLEAGMGKVTSASFGEESTPGQTNSETAVVALTQDQPSEAATGGATLAQTISEAAIGGAMLGQTTSEEAVGGATPDQTTSEETVGGAILDQTTSEDAVGGATLGQTTSEEAVGGATLAQTTSEAAMEGATLDQTTSEEAPGGTELIQTPLASSTDHQTPPTSPVQGTTPQISPSTLIGSLRTLELGSESQGASESQAPGEENLLGEAAGGQDMADSMLMQGSRGLTDQAIFYAVTPLPWCPHLVAVCPIPAAGLDVTQPCGDCGTIQENWVCLSCYQVYCGRYINGHMLQHHGNSGHPLVLSYIDLSAWCYYCQAYVHHQALLDVKNIAHQNKFGEDMPHPH

SEQ ID NO: 38604 - protein, 20 aa, Artificial Sequence
  Synthetic polypeptide
KNVSSISPSTATSRVGSGPT

SEQ ID NO: 38605 - protein, 90 aa, Artificial Sequence
  Synthetic polypeptide
IKIRMKKCVLYFSIHRYEQGRFWPHLKASNWSTTGFGQGQGYTINVPWNQVGMRDADYIAAFLHVLLPVALEVLGIWGVLGGGVALKVRL

SEQ ID NO: 38606 - protein, 30 aa, Artificial Sequence
  Synthetic polypeptide
EGREQTYLVHGCIPAYGMVLGTYSREFGTG

SEQ ID NO: 38607 - protein, 103 aa, Artificial Sequence
  Synthetic polypeptide
WNSPPWIFAQVCHPQGLSTDSPSFKRPFLTPQPQSYFFMAFPLQCRLLSEAPLFIYSCSRSVSPTVNVSSERAESRPTLFMAVSLHMAWCLAHIVGNSAPVER

SEQ ID NO: 38608 - protein, 39 aa, Artificial Sequence
  Synthetic polypeptide
GQVQWLTPIIPALWEAESGGSPEVRSSRPAWPTCLQSSL

SEQ ID NO: 38609 - protein, 43 aa, Artificial Sequence
  Synthetic polypeptide
SQHFGRPSRVDHLRSGVQGQPGQHVCRAVSDEECHKNIGGVMD

SEQ ID NO: 38610 - protein, 224 aa, Artificial Sequence
  Synthetic polypeptide
GQEFKASLANMFAEQSLMKNAIKTSEESWIEQQMLEDKKRATDWEATNEAIEEQVARESYLQWLRDQEKQARQVRGPSQPRKASATCSSATAAASSGLEEWTSRSPRQRSSASSPEHPELHAELGMKPPSPGTVLALAKPPSPCAPGTSSQFSAGADRATSPLVSLYPALECRALIQQMSPSAFGLNDWDDDEILASVLAVSQQEYLDSMKKNKVHRDPPPDKS

SEQ ID NO: 38611 - protein, 37 aa, Artificial Sequence
  Synthetic polypeptide
FISLSSLPSPVSYLVATCRSIGLKRPYETRRASSSSR

SEQ ID NO: 38612 - protein, 7 aa, Artificial Sequence
  Synthetic polypeptide
LPAGALV

SEQ ID NO: 38613 - protein, 395 aa, Artificial Sequence
  Synthetic polypeptide
AYQEWRLSLIHFTVLTAQPSILLSSYLQEHWFEKALRDKKGFIIKQMKEDGACLFRAVADQVYGDQDMHEVVRKHCMDYLMKNADYFSNYVTEDFTTYINRKRKNNCHGNHIEMQAMAEMYNRPVEVYQYSTEPINTFHGIHQNEDEPIRVSYHRNIHYNSVVNPNKATIGVGLGLPSFKPGFAEQSLMKNAIKTSEESWIEQQMLEDKKRATDWEATNEAIEEQVARESYLQWLRDQEKQARQVRGPSQPRKASATCSSATAAASSGLEEWTSRSPRQRSSASSPEHPELHAELGMKPPSPGTVLALAKPPSPCAPGTSSQFSAGADRATSPLVSLYPALECRALIQQMSPSAFGLNDWDDDEILASVLAVSQQEYLDSMKKNKVHRDPPPDKS

SEQ ID NO: 38614 - protein, 400 aa, Artificial Sequence
  Synthetic polypeptide
AYQEWRLSLIHFTVLTAQPSILLSSYLQEHWFEKALRDKKGFIIKQMKEDGACLFRAVADQVYGDQDMHEVVRKHCMDYLMKNADYFSNYVTEDFTTYINRKRKNNCHGNHIEMQAMAEMYNRPVEVYQYSTGTSAVEPINTFHGIHQNEDEPIRVSYHRNIHYNSVVNPNKATIGVGLGLPSFKPGFAEQSLMKNAIKTSEESWIEQQMLEDKKRATDWEATNEAIEEQVARESYLQWLRDQEKQARQVRGPSQPRKASATCSSATAAASSGLEEWTSRSPRQRSSASSPEHPELHAELGMKPPSPGTVLALAKPPSPCAPGTSSQFSAGADRATSPLVSLYPALECRALIQQMSPSAFGLNDWDDDEILASVLAVSQQEYLDSMKKNKVHRDPPPDKS

SEQ ID NO: 38615 - protein, 68 aa, Artificial Sequence
  Synthetic polypeptide
PWASYLTSLWPVFINGIPAAAAAGTRGSPQAVSGAARCRAEGQGGGATGCTGSARAGPGGAGLPPEDH

SEQ ID NO: 38616 - protein, 317 aa, Artificial Sequence
  Synthetic polypeptide
PLCGLFSSMESLQQQQQEQEEALKQCREQHAAELKGKEEELQDVRDQLEQAQEERDCHLKTISSLKQEVKDTVDGQRILEKKGSAALKDLKRQLHLERKRADKLQERLQDILTNSKSRSGLEELVLSEMNSPSRTQTGDSSSISSFSYREILREKESSAVPARSLSSSPQAQPPRPAELSDEEVAELFQRLAETQQEKWMLEEKVKHLEVSSASMAEDLCRKSAIIETYVMDSRIDVSVAAGHTDRSGLGSVLRDLVKPGDENLREMNKKLQNMLEEQLTKNMHLHKDMEVLSQEIVRLSKECVGPPDPDLEPGETS

SEQ ID NO: 38617 - protein, 50 aa, Artificial Sequence
  Synthetic polypeptide
ILAGPFPSCVTLGKLSDLSVACFHQWNPCSSSSRNKRKPSSSVGSSTLPS

SEQ ID NO: 38618 - protein, 470 aa, Artificial Sequence
  Synthetic polypeptide
QALLQSHSEADWSTHGQSMRKLIVGLIFLKFWTCTVRTSADLPQTENCSQSLSVKPQEAPKELVIPLIQNGHRRQPPARPPGPSTDTGALADGVVSQAVKELIAESKKSLEERENAGVDPTLAIPMIQKGCTPSGEGADSEPRAETVPEEANYEAVPVEAYGLAMLRGMGWKPGEGIGRTFNQVVKPRVNSLRPKGLGLGANLTEAQALTPTGPSRMPRPDEEQEKDKEDQPQGLVPGGAVVVLSGPHRGLYGKVEGLDPDNVRAMVRLAVGSRVVTVSEYYLRPVSQQEFDKNTLDLRQQNGTASSRKTLWNQELYIQQDNSERKRKHLPDRQDGPAAKSEKAAPRSQHWLHRDLRVRFVDNMYKGGQYYNTKMIIEDVLSPDTCVCRTDEGRVLEGLREDMLETLVPKAEGDRVMVVLGPQTGRVGHLLSRDRARSRALVQLPRENQVVELHYDAICQYMGPSDTDDD

SEQ ID NO: 38619 - protein, 105 aa, Artificial Sequence
  Synthetic polypeptide
ELFPVTKCEAPGGPQGTRHPFDPEWPSQAATSPAPWAIHRYWGLGGWGGVPGCEGAHCGIQEVSGRERECGCRPHARYPHDPERMHPQRGRGRQRTPGRDSARGG

SEQ ID NO: 38620 - protein, 16 aa, Artificial Sequence
  Synthetic polypeptide
TPGRNWHLESGHLEYV

SEQ ID NO: 38621 - protein, 138 aa, Artificial Sequence
  Synthetic polypeptide
AFALVEHLVRAVHGRPPQRINAAAEHQEGTGTWSLDIWNMCEAPGGPQGTRHPFDPEWPSQAATSPAPWAIHRYWGLGGWGGVPGCEGAHCGIQEVSGRERECGCRPHARYPHDPERMHPQRGRGRQRTPGRDSARGG

SEQ ID NO: 38622 - protein, 468 aa, Artificial Sequence
  Synthetic polypeptide
ATRILRALPGRHLPSWNTSSERCMAGPHRGSMQRLNTRKELALGVWTSGICVKPQEAPKELVIPLIQNGHRRQPPARPPGPSTDTGALADGVVSQAVKELIAESKKSLEERENAGVDPTLAIPMIQKGCTPSGEGADSEPRAETVPEEANYEAVPVEAYGLAMLRGMGWKPGEGIGRTFNQVVKPRVNSLRPKGLGLGANLTEAQALTPTGPSRMPRPDEEQEKDKEDQPQGLVPGGAVVVLSGPHRGLYGKVEGLDPDNVRAMVRLAVGSRVVTVSEYYLRPVSQQEFDKNTLDLRQQNGTASSRKTLWNQELYIQQDNSERKRKHLPDRQDGPAAKSEKAAPRSQHWLHRDLRVRFVDNMYKGGQYYNTKMIIEDVLSPDTCVCRTDEGRVLEGLREDMLETLVPKAEGDRVMVVLGPQTGRVGHLLSRDRARSRALVQLPRENQVVELHYDAICQYMGPSDTDDD

SEQ ID NO: 38623 - protein, 59 aa, Artificial Sequence
  Synthetic polypeptide
NSDLYIVTQLFSSGPLGAKFGTSWHCLGSRPTFALPSCSTSRARPSRSLSMPAGWSCQN

SEQ ID NO: 38624 - protein, 515 aa, Artificial Sequence
  Synthetic polypeptide
CLEQRPVHSDSAILLRAIGSQIRDQLALPWVPPHLRTPKLQHLQGSALQKPFHASRLVVPELSSRGEPREFQASPLLLPVPTQVPQPVGRVASLLEHHALQLCQQTGRDRPGDEDWVHRTSRLPPQEDTRAQRQRLQKQLTEHLRQSWGLLGAPIQARDLGELLQAWGAGAKTGAPKGSRFTHSEKFTFHLEPQAQATQVSDVPATSRRPEQVTWAAQEQELESLREQLEGVNRSIEEVEADMKTLGVSFVQAESECRHSKLSTAEREQALRLKSRAVELLPDGTANLAKLQLVVENSAQRVIHLAGQWEKHRVPLLAEYRHLRKLQDCRELESSRRLAEIQELHQSVRAAAEEARRKEEVYKQLMSELETLPRDVSRLAYTQRILEIVGNIRKQKEEITKILSDTKELQKEINSLSGKLDRTFAVTDELVFKDAKKDDAVRKAYKYLAALHENCSQLIQTIEDTGTIMREVRDLEEQIETELGKKTLSNLEKIREDYRALRQENAGLLGRVREA

SEQ ID NO: 38625 - protein, 8 aa, Artificial Sequence
  Synthetic polypeptide
SSEYRCHG

SEQ ID NO: 38626 - protein, 820 aa, Artificial Sequence
  Synthetic polypeptide
RRQNKVVSTGAMDNRGFQQGSFSSFQNSSSDEDLMDIPATAMDFSMRDDVPPLDREVGEDKSYNGGGIGSSNRIMDFLEEPIPGVGTYDDFNTIDWVREKSRDRDRHREITNKSKESTWALIHSVSDAFSGWLLMLLIGLLSGSLAGLIDISAHWMTDLKEGICTGGFWFNHEHCCWNSEHVTFEERDKCPEWNSWSQLIISTDEGAFAYIVNYFMYVLWALLFAFLAVSLVKVFAPYACGSGIPEIKTILSGFIIRGYLGKWTLVIKTITLVLAVSSGLSLGKEGPLVHVACCCGNILCHCFNKYRKNEAKRREVLSAAAAAGVSVAFGAPIGGVLFSLEEVSYYFPLKTLWRSFFAALVAAFTLRSINPFGNSRLVLFYVEFHTPWHLFELVPFILLGIFGGLWGALFIRTNIAWCRKRKTTQLGKYPVIEVLVVTAITAILAFPNEYTRMSTSELISELFNDCGLLDSSKLCDYENRFNTSKGGELPDRPAGVGVYSAMWQLALTLILKIVITIFTFGMKIPSGLFIPSMAVGAIAGRLLGVGMEQLAYYHQEWTVFNSWCSQGADCITPGLYAMVGAAACLGGVTRMTVSLVVIMFELTGGLEYIVPLMAAAMTSKWVADALGREGIYDAHIRLNGYPFLEAKEEFAHKTLAMDVMKPRRNDPLLTVLTQDSMTVEDVETIISETTYSGFPVVVSRESQRLVGFVLRRDLIISIENARKKQDGVVSTSIIYFTEHSPPLPPYTPPTLKLRNILDLSPFTVTDLTPMEIVVDIFRKLGLRQCLVTHNGRLLGIITKKDVLKHIAQMANQDPDSILFN

SEQ ID NO: 38627 - protein, 26 aa, Artificial Sequence
  Synthetic polypeptide
VQVPWITEAFSRGVLVASRTAPVMKT

SEQ ID NO: 38628 - protein, 68 aa, Artificial Sequence
  Synthetic polypeptide
RRQNKVVSTGAMDNRGFQQGSFSSFQNSSSDEDLMDIPATAMDFSMRDDVPPLDREVGGIIIGDDNLS

SEQ ID NO: 38629 - protein, 18 aa, Artificial Sequence
  Synthetic polypeptide
DWTWWGDSDDCFSCCHNV

SEQ ID NO: 38630 - protein, 238 aa, Artificial Sequence
  Synthetic polypeptide
TGHGGVTRMTVSLVVIMFELTGGLEYIVPLMAAAMTSKWVADALGREGIYDAHIRLNGYPFLEAKEEFAHKTLAMDVMKPRRNDPLLTVLTQDSMTVEDVETIISETTYSGFPVVVSRESQRLVGFVLRRDLIISIENARKKQDGVVSTSIIYFTEHSPPLPPYTPPTLKLRNILDLSPFTVTDLTPMEIVVDIFRKLGLRQCLVTHNGRLLGIITKKDVLKHIAQMANQDPDSILFN

SEQ ID NO: 38631 - protein, 5 aa, Artificial Sequence
  Synthetic polypeptide
MDMVG

SEQ ID NO: 38632 - protein, 1089 aa, Artificial Sequence
  Synthetic polypeptide
GRARWLTPVILALWEAEECKRPPEAFGFEQATREYTLQSFGEMADSFKADYFNMPVHMVPTELVEKEFWRLVNSIEEDVTVEYGADIHSKEFGSGFPVSDSKRHLTPEEEEYATSGWNLNVMPVLEQSVLCHINADISGMKVPWLYVGMVFSAFCWHIEDHWSYSINYLHWGEPKTWYGVPSLAAEHLEEVMKKLTPELFDSQPDLLHQLVTLMNPNTLMSHGVPVVRTNQCAGEFVITFPRAYHSGFNQGYNFAEAVNFCTADWLPAGRQCIEHYRRLRRYCVFSHEELICKMAACPEKLDLNLAAAVHKEMFIMVQEERRLRKALLEKGITEAEREAFELLPDDERQCIKCKTTCFLSALACYDCPDGLVCLSHINDLCKCSSSRQYLRYRYTLDELPAMLHKLKVRAESFDTWANKVRVALEVEDGRKRSLEELRALESEARERRFPNSELLQQLKNCLSEAEACVSRALGLVSGQEAGPHRVAGLQMTLTELRAFLDQMNNLPCAMHQIGDVKGVLEQVEAYQAEAREALASLPSSPGLLQSLLERGRQLGVEVPEAQQLQRQVEQARWLDEVKRTLAPSARRGTLAVMRGLLVAGASVAPSPAVDKAQAELQELLTIAERWEEKAHLCLEARQKHPPATLEAIIREAENIPVHLPNIQALKEALAKARAWIADVDEIQNGDHYPCLDDLEGLVAVGRDLPVGLEELRQLELQVLTAHSWREKASKTFLKKNSCYTLLEVLCPCADAGSDSTKRSRWMEKELGLYKSDTELLGLSAQDLRDPGSVIVAFKEGEQKEKEGILQLRRTNSAKPSPLASSSTASSTTSICVCGQVLAGAGALQCDLCQDWFHGRCVSVPRLLSSPRPNPTSSPLLAWWEWDTKFLCPLCMRSRRPRLETILALLVALQRLPVRLPEGEALQCLTERAISWQGRARQALASEDVTALLGRLAELRQRLQAEPRPEEPPNYPAAPASDPLREGSGKDMPKVQGLLENGDSVTSPEKVAPEEGSDLELLSSLLPQLTGPVLELPEATRAPLEELMMEGDLLEVTLDENHSIPESLDFCILTPRYCSDLSSWGPAPGVFPPW

SEQ ID NO: 38633 - protein, 60 aa, Artificial Sequence
  Synthetic polypeptide
HFGRLRSVSGPQKPLALSRLPGNTLCRALARWPTPLKLTTSTCPCIWCPQNLWRRSSGGW

SEQ ID NO: 38634 - protein, 1203 aa, Artificial Sequence
  Synthetic polypeptide
GRARWLTPVILALWEAEECKRPPEAFGFEQATREYTLQSFGEMADSFKADYFNMPVHMVPTELVEKEFWRLVNSIEEDVTVEYGADIHSKEFGSGFPVSDSKRHLTPEEEEYATSGWNLNVMPVLEQSVLCHINADISGMKVPWLYVGMVFSAFCWHIEDHWSYSINYLHWGEPKTWYGVPSLAAEHLEEVMKKLTPELFDSQPDLLHQLVTLMNPNTLMSHGVPVVRTNQCAGEFVITFPRAYHSGFNQGYNFAEAVNFCTADWLPAGRQCIEHYRRLRRYCVFSHEELICKMAACPEKLDLNLAAAVHKEMFIMVQEERRLRKALLEKGITEAEREAFELLPDDERQCIKCKTTCFLSALACYDCPDGLVCLSHINDLCKCSSSRQYLRYRYTLDELPAMLHKLKVRAESFDTWANKVRVALEVEDGRKRSLEELRALESEARERRFPNSELLQQLKNCLSEAEACVSRALGLVSGQEAGPHRVAGLQMTLTELRAFLDQMNNLPCAMHQIGDVKGVLEQVEAYQAEAREALASLPSSPGLLQSLLERGRQLGVEVPEAQQLQRQVEQARWLDEVKRTLAPSARRGTLAVMRGLLVAGASVAPSPAVDKAQAELQELLTIAERWEEKAHLCLEARQKHPPATLEAIIREAENIPVHLPNIQALKEALAKARAWIADVDEIQNGDHYPCLDDLEGLVAVGRDLPVGLEELRQLELQVLTAHSWREKASKTFLKKNSCYTLLEVLCPCADAGSDSTKRSRWMEKELGLYKSDTELLGLSAQDLRDPGSVIVAFKEGEQKEKEGILQLRRTNSAKPSPLASSSTASSTTSICVCGQVLAGAGALQCDLCQDWFHGRCVSVPRLLSSPRPNPTSSPLLAWWEWDTKFLCPLCMRSRRPRLETILALLVALQRLPVRLPEGEALQCLTERAISWQGRARQALASEDVTALLGRLAELRQRLQAEPRPEEPPNYPAAPASDPLREGSGKDMPKVQGLLENGDSVTSPEKVAPEEGSGKRDLELLSSLLPQLTGPVLELPEATRAPLEELMMEGDLLEVTLDENHSIWQLLQAGQPPDLERIRTLLELEKAERHGSRARGRALERRRRRKVDRGGEGDDPAREELEPKRVRSSGPEAEEVQEEEELEEETGGEGPPAPIPTTGSPSTQENQNGLEPAEGTTSGPSAPFSTLTPRLHLPCPQQPPQQQL

SEQ ID NO: 38635 - protein, 1200 aa, Artificial Sequence
  Synthetic polypeptide
GRARWLTPVILALWEAEECKRPPEAFGFEQATREYTLQSFGEMADSFKADYFNMPVHMVPTELVEKEFWRLVNSIEEDVTVEYGADIHSKEFGSGFPVSDSKRHLTPEEEEYATSGWNLNVMPVLEQSVLCHINADISGMKVPWLYVGMVFSAFCWHIEDHWSYSINYLHWGEPKTWYGVPSLAAEHLEEVMKKLTPELFDSQPDLLHQLVTLMNPNTLMSHGVPVVRTNQCAGEFVITFPRAYHSGFNQGYNFAEAVNFCTADWLPAGRQCIEHYRRLRRYCVFSHEELICKMAACPEKLDLNLAAAVHKEMFIMVQEERRLRKALLEKGITEAEREAFELLPDDERQCIKCKTTCFLSALACYDCPDGLVCLSHINDLCKCSSSRQYLRYRYTLDELPAMLHKLKVRAESFDTWANKVRVALEVEDGRKRSLEELRALESEARERRFPNSELLQQLKNCLSEAEACVSRALGLVSGQEAGPHRVAGLQMTLTELRAFLDQMNNLPCAMHQIGDVKGVLEQVEAYQAEAREALASLPSSPGLLQSLLERGRQLGVEVPEAQQLQRQVEQARWLDEVKRTLAPSARRGTLAVMRGLLVAGASVAPSPAVDKAQAELQELLTIAERWEEKAHLCLEARQKHPPATLEAIIREAENIPVHLPNIQALKEALAKARAWIADVDEIQNGDHYPCLDDLEGLVAVGRDLPVGLEELRQLELQVLTAHSWREKASKTFLKKNSCYTLLEVLCPCADAGSDSTKRSRWMEKELGLYKSDTELLGLSAQDLRDPGSVIVAFKEGEQKEKEGILQLRRTNSAKPSPLASSSTASSTTSICVCGQVLAGAGALQCDLCQDWFHGRCVSVPRLLSSPRPNPTSSPLLAWWEWDTKFLCPLCMRSRRPRLETILALLVALQRLPVRLPEGEALQCLTERAISWQGRARQALASEDVTALLGRLAELRQRLQAEPRPEEPPNYPAAPASDPLREGSGKDMPKVQGLLENGDSVTSPEKVAPEEGSDLELLSSLLPQLTGPVLELPEATRAPLEELMMEGDLLEVTLDENHSIWQLLQAGQPPDLERIRTLLELEKAERHGSRARGRALERRRRRKVDRGGEGDDPAREELEPKRVRSSGPEAEEVQEEEELEEETGGEGPPAPIPTTGSPSTQENQNGLEPAEGTTSGPSAPFSTLTPRLHLPCPQQPPQQQL

SEQ ID NO: 38636 - protein, 111 aa, Artificial Sequence
  Synthetic polypeptide
TPCRLSHMSAGCVLEGMRMTSSCCVMAVMTTTTSSACCLLCLRSPRVSGGAQSVSWRSVSGPQKPLALSRLPGNTLCRALARWPTPLKLTTSTCPCIWCPQNLWRRSSGGW

SEQ ID NO: 38637 - protein, 21 aa, Artificial Sequence
  Synthetic polypeptide
PHPPALPTSLLCYSHTELLVD

SEQ ID NO: 38638 - protein, 11 aa, Artificial Sequence
  Synthetic polypeptide
SCLEDSVQLYR

SEQ ID NO: 38639 - protein, 28 aa, Artificial Sequence
  Synthetic polypeptide
NGEKIKWRENPFRAVWKTRCNYTGKVSG

SEQ ID NO: 38640 - protein, 1039 aa, Artificial Sequence
  Synthetic polypeptide
NGEKTLLELFGRLGATIQVKSLAESIDEALNCHPSGPMSEEPGSAQLEKRESKEQQEDSSATSFSDLPLYLDDTVPQQSPERLPSTEPPPQGRPEFWAPAPLPPVPPPVPSGTREDGSREEGTRRGPGCLECRDFRLRAAHLPLLTIEPPSDSSVDLSDRSDRGSVHRQLVYEADGCSPHGTLKHKGPPGRAPIPHRHYPAPEGPAPAPPGPLPPAPNSGTGPSGVAGGRRLGKCEAAGENSDGGDNESLESSSNSNETINCSSGSSSRDSLREPPATGLCKQTYQRETRHSWDSPAFNNDVVQRRHYRIGLNLFNKKPEKGIQYLIERGFLSDTPVGVAHFILERKGLSRQMIGEFLGNRQKQFNRDVLDCVVDEMDFSSMDLDDALRKFQSHIRVQGEAQKVERLIEAFSQRYCVCNPALVRQFRNPDTIFILAFAIILLNTDMYSPSVKAERKMKLDDFIKNLRGVDNGEDIPRDLLVGIYQRIQGRELRTNDDHVSQVQAVERMIVGKKPVLSLPHRRLVCCCQLYEVPDPNRPQRLGLHQREVFLFNDLLVVTKIFQKKKILVTYSFRQSFPLVEMHMQLFQNSYYQFGIKLLSAVPGGERKVLIIFNAPSLQDRLRFTSDLRESIAEVQEMEKYRVESELEKQKGMMRPNASQPGGAKDSVNGTMARSSLEDTYGAGDGLKRGALSSSLRDLSDAGKRGRRNSVGSLDSTIEGSVISSPRPHQRMPPPPPPPPPEEYKSQRPVSNSSSFLGSLFGSKRGKGPFQMPPPPTGQASASSSSASSTHHHHHHHHHGHSHGGLGVLPDGQSKLQALHAQYCQGPGPAPPPYLPPQQPSLPPPPQQPPPLPQLGSIPPPPASAPPVGPHRHFHAHGPVPGPQHYTLGRPGRAPRRGAGGHPQFAPHGRHPLHQPTSPLPLYSPAPQHPPAHKQGPKHFIFSHHPQMMPAAGAAGGPGSRPPGGSYSHPHHPQSPLSPHSPIPPHPSYPPLPPPSPHTPHSPLPPTSPHGPLHASGPPGTANPPSANPKAKPSRISTVV

SEQ ID NO: 38641 - protein, 705 aa, Artificial Sequence
  Synthetic polypeptide
NGEKTLLELFGRLGATIQVKSLAESIDEALNCHPSGPMSEEPGSAQLEKRESKEQQEDSSATSFSDLPLYLDDTVPQQSPERLPSTEPPPQGRPEFWAPAPLPPVPPPVPSGTREDGSREEGTRRGPGCLECRDFRLRAAHLPLLTIEPPSDSSVDLSDRSDRGSVHRQLVYEADGCSPHGTLKHKGPPGRAPIPHRHYPAPEGPAPAPPGPLPPAPNSGTGPSGVAGGRRLGKCEAAGENSDGGDNESLESSSNSNETINCSSGSSSRDSLREPPATGLCKQTYQRETRHSWDSPAFNNDVVQRRHYRIGLNLFNKKPEKGIQYLIERGFLSDTPVGVAHFILERKGLSRQMIGEFLGNRQKQFNRDVLDCVVDEMDFSSMDLDDALRKFQSHIRVQGEAQKVERLIEAFSQRYCVCNPALVRQFRNPDTIFILAFAIILLNTDMYSPSVKAERKMKLDDFIKNLRGVDNGEDIPRDLLVGIYQRIQGRELRTNDDHVSQVQAVERMIVGKKPVLSLPHRRLVCCCQLYEVPDPNRPQRLGLHQREVFLFNDLLVVTKIFQKKKILVTYSFRQSFPLVEMHMQLFQNSYYQFGIKLLSAVPGGERKVLIIFNAPSLQDRLRFTSDLRESIAEVQEMEKYRVESELEKQKGMMRPNASQPGGAKDSVNGTMARSSLEDTYGAGDGLKRGALSSSLRDLSDAGVCY

SEQ ID NO: 38642 - protein, 24 aa, Artificial Sequence
  Synthetic polypeptide
GHYLISVIMNDTEGVMISAWYQSP

SEQ ID NO: 38643 - protein, 1417 aa, Artificial Sequence
  Synthetic polypeptide
YLRGISLPEGVDPSFLAALPDDIRREVLQNQLGIRPPTRTAPSTNSSAPAVVGNPGVTEVSPEFLAALPPAIQEEVLAQQRAEQQRRELAQNASSDTPMDPVTFIQTLPSDLRRSVLEDMEDSVLAVMPPDIAAEAQALRREQEARQRQLMHERLFGHSSTSALSAILRSPAFTSRLSGNRGVQYTRLAVQRGGTFQMGGSSSHNRPSGSNVDTLLRLRGRLLLDHEALSCLLVLLFVDEPKLNTSRLHRVLRNLCYHAQTRHWVIRSLLSILQRSSESELCIETPKLTTSEEKGKKSSKSCGSSSHENRPLDLLHKMESKSSNQLSWLSVSMDAALGCRTNIFQIQRSGGRKHTEKHASGGSTVHIHPQAAPVVCRHVLDTLIQLAKVFPSHFTQQRTKETNCESDRERGNKACSPCSSQSSSSGICTDFWDLLVKLDNMNVSRKGKNSVKSVPVSAGGEGETSPYSLEASPLGQLMNMLSHPVIRRSSLLTEKLLRLLSLISIALPENKVSEAQANSGSGASSTTTATSTTSTTTTTAASTTPTPPTAPTPVTSAPALVAATAISTIVVAASTTVTTPTTATTTVSISPTTKGSKSPAKVSDGGSSSTDFKMVSSGLTENQLQLSVEVLTSHSCSEEGLEDAANVLLQLSRGDSGTRDTVLKLLLNGARHLGYTLCKQIGTLLAELREYNLEQQRRAQCETLSPDGLPEEQPQTTKLKGKMQSRFDMAENVVIVASQKRPLGGRELQLPSMSMLTSKTSTQKFFLRVLQVIIQLRDDTRRANKKAKQTGRLGSSGLGSASSIQAAVRQLEAEADAIIQMVREGQRARRQQQAATSESSQSEASVRREESPMDVDQPSPSAQDTQSIASDGTPQGEKEKEERPPELPLLSEQLSLDELWDMLGECLKELEESHDQHAVLVLQPAVEAFFLVHATERESKPPVRDTRESQLAHIKDEPPPLSPAPLTPATPSSLDPFFSREPSSMHISSSLPPDTQKFLRFAETHRTVLNQILRQSTTHLADGPFAVLVDYIRVLDFDVKRKYFRQELERLDEGLRKEDMAVHVRRDHVFEDSYRELHRKSPEEMKNRLYIVFEGEEGQDAGGLLREWYMIISREMFNPMYALFRTSPGDRVTYTINPSSHCNPNHLSYFKFVGRIVAKAVYDNRLLECYFTRSFYKHILGKSVRYTDMESEDYHFYQGLVYLLENDVSTLGYDLTFSTEVQEFGVCEVRDLKPNGANILVTEENKKEYVHLVCQMRMTGAIRKQLAAFLEGFYEIIPKRLISIFTEQELELLISGLPTIDIDDLKSNTEYHKYQSNSIQIQWFWRALRSFDQADRAKFLQFVTGTSKVPLQGFAALEGMNGIQKFQIHRDDRSTDRLPSAHTCFNQLDLPAYESFEKLRHMLLLAIQECSEGFGLA

SEQ ID NO: 38644 - protein, 37 aa, Artificial Sequence
  Synthetic polypeptide
YRGGDDICVVSVSLKVWTPLFWLPCLMTSVGKFYRTS

SEQ ID NO: 38645 - protein, 2293 aa, Artificial Sequence
  Synthetic polypeptide
GRVRWLTPVIPALWEAEAGGSPEDCSVLAFVLDHLLPHTQNAEDKDTPALARLFLASLAAAGSGTDAQVALVNEVKAALGRALAMAESTEKHARLQAVMCIISTIMESCPSTSSFYSSATAKTQHNGMNNIIRLFLKKGLVNDLARVPHSLDLSSPNMANTVNAALKPLETLSRIVNQPSSLFGSKSASSKNKSEQDAQGASQDSSSNQQDPGEPGEAEVQEEDHDVTQTEVADGDIMDGEAETDSVVIAGQPEVLSSQEMQVENELEDLIDELLERDGGSGNSTIIVSRSGEDESQEDVLMDEAPSNLSQASTLQANREDSMNILDPEDEEEHTQEEDSSGSNEDEDDSQDEEEEEEEDEEDDQEDDEGEEGDEDDDDDGSEMELDEDYPDMNASPLVRFERFDREDDLIIEFDNMFSSATDIPPSPGNIPTTHPLMVRHADHSSLTLGSGSSTTRLTQGIGRSQRTLRQLTANTGHTIHVHYPGNRQPNPPLILQRLLGPSAAADILQLSSSLPLQSRGRARLLVGNDDVHIIARSDDELLDDFFHDQSTATSQAGTLSSIPTALTRWTEECKVLDAESMHDCVSVVKVSIVNHLEFLRDEELEERREKRRKQLAEEETKITDKGKEDKENRDQSAQCTASKSNDSTEQNLSDGTPMPDSYPTTPSSTDAATSESKETLGTLQSSQQQPTLPTPPALGEVPQELQSPAGEGGSSTQLLMPVEPEELGPTRPSGEAETTQMELSPAPTITSLSPERAEDSDALTAVSSQLEGSPMDTSSLASCTLEEAVGDTSAAGSSEQPRAGSSTPGDAPPAVAEVQGRSDGSGESAQPPEDSSPPASSESSSTRDSAVAISGADSRGILEEPLPSTSSEEEDPLAGISLPEGVDPSFLAALPDDIRREVLQNQLGIRPPTRTAPSTNSSAPAVVGNPGVTEVSPEFLAALPPAIQEEVLAQQRAEQQRRELAQNASSDTPMDPVTFIQTLPSDLRRSVLEDMEDSVLAVMPPDIAAEAQALRREQEARQRQLMHERLFGHSSTSALSAILRSPAFTSRLSGNRGVQYTRLAVQRGGTFQMGGSSSHNRPSGSNVDTLLRLRGRLLLDHEALSCLLVLLFVDEPKLNTSRLHRVLRNLCYHAQTRHWVIRSLLSILQRSSESELCIETPKLTTSEEKGKKSSKSCGSSSHENRPLDLLHKMESKSSNQLSWLSVSMDAALGCRTNIFQIQRSGGRKHTEKHASGGSTVHIHPQAAPVVCRHVLDTLIQLAKVFPSHFTQQRTKETNCESDRERGNKACSPCSSQSSSSGICTDFWDLLVKLDNMNVSRKGKNSVKSVPVSAGGEGETSPYSLEASPLGQLMNMLSHPVIRRSSLLTEKLLRLLSLISIALPENKVSEAQANSGSGASSTTTATSTTSTTTTTAASTTPTPPTAPTPVTSAPALVAATAISTIVVAASTTVTTPTTATTTVSISPTTKGSKSPAKVSDGGSSSTDFKMVSSGLTENQLQLSVEVLTSHSCSEEGLEDAANVLLQLSRGDSGTRDTVLKLLLNGARHLGYTLCKQIGTLLAELREYNLEQQRRAQCETLSPDGLPEEQPQTTKLKGKMQSRFDMAENVVIVASQKRPLGGRELQLPSMSMLTSKTSTQKFFLRVLQVIIQLRDDTRRANKKAKQTGRLGSSGLGSASSIQAAVRQLEAEADAIIQMVREGQRARRQQQAATSESSQSEASVRREESPMDVDQPSPSAQDTQSIASDGTPQGEKEKEERPPELPLLSEQLSLDELWDMLGECLKELEESHDQHAVLVLQPAVEAFFLVHATERESKPPVRDTRESQLAHIKDEPPPLSPAPLTPATPSSLDPFFSREPSSMHISSSLPPDTQKFLRFAETHRTVLNQILRQSTTHLADGPFAVLVDYIRVLDFDVKRKYFRQELERLDEGLRKEDMAVHVRRDHVFEDSYRELHRKSPEEMKNRLYIVFEGEEGQDAGGLLREWYMIISREMFNPMYALFRTSPGDRVTYTINPSSHCNPNHLSYFKFVGRIVAKAVYDNRLLECYFTRSFYKHILGKSVRYTDMESEDYHFYQGLVYLLENDVSTLGYDLTFSTEVQEFGVCEVRDLKPNGANILVTEENKKEYVHLVCQMRMTGAIRKQLAAFLEGFYEIIPKRLISIFTEQELELLISGLPTIDIDDLKSNTEYHKYQSNSIQIQWFWRALRSFDQADRAKFLQFVTGTSKVPLQGFAALEGMNGIQKFQIHRDDRSTDRLPSAHTCFNQLDLPAYESFEKLRHMLLLAIQECSEGFGLA

SEQ ID NO: 38646 - protein, 18 aa, Artificial Sequence
  Synthetic polypeptide
SQHFGRLKQADHLRTAVC

SEQ ID NO: 38647 - protein, 4268 aa, Artificial Sequence
  Synthetic polypeptide
AGHDGLCLLLLALGEAEAGKSLEPRSLRPAWATWRNPVSAKSTKIRQVWWHTPVVPVTWEAESWGGKENGFGLAECCRDLHMMKYPPSATTLHFEFYADPGAEVKIEKRTTSNTLHYIHIEQLDKISESPSEIMESLTKMYSIPKDKQMLLFTHIRLAHGFSNHRKRLQAVQARLHAISILVYSNALQESANSILYNGLIEELVDVLQITDKQLMEIKAASLRTLTSIVHLERTPKLSSIIDCTGTASYHGFLPVLVRNCIQAMIDPSMDPYPHQFATALFSFLYHLASYDAGGEALVSCGMMEALLKVIKFLGDEQDQITFVTRAVRVVDLITNLDMAAFQSHSGLSIFIYRLEHEVDLCRKECPFVIKPKIQRPNTTQEGEEMETDMDGVQCIPQRAALLKSMLNFLKKAIQDPAFSDGIRHVMDGSLPTSLKHIISNAEYYGPSLFLLATEVVTVFVFQEPSLLSSLQDNGLTDVMLHALLIKDVPATREVLGSLPNVFSALCLNARGLQSFVQCQPFERLFKVLLSPDYLPAMRRRRSSDPLGDTASNLGSAVDELMRHQPTLKTDATTAIIKLLEEICNLGRDPKYICQKPSIQKADGTATAPPPRSNHAAEEASSEDEEEEEVQAMQSFNSTQQNETEPNQQVVGTEERIPIPLMDYILNVMKFVESILSNNTTDDHCQEFVNQKGLLPLVTILGLPNLPIDFPTSAACQAVAGVCKSILTLSHEPKVLQEGLLQLDSILSSLEPLHRPIESPGGSVLLRELACAGNVADATLSAQATPLLHALTAAHAYIMMFVHTCRVGQSEIRSISVNQWGSQLGLSVLSKLSQLYCSLVWESTVLLSLCTPNSLPSGCEFGQADMQKLVPKDEKAGTTQGGKRSDGEQDGAAGSMDASTQGLLEGIGLDGDTLAPMETDEPTASDSKGKSKITPAMAARIKQIKPLLSASSRLGRALAELFGLLVKLCVGSPVRQRRSHHAASTTTAPTPAARSTASALTKLLTKGLSWQPPPYTPTPRFRLTFFICSVGFTSPMLFDERKYPYHLMLQKFLCSGGHNALFETFNWALSMGGKVPVSEGLEHSDLPDGTGEFLDAWLMLVEKMVNPTTVLESPHSLPAKLPGGVQNFPQFSALRFLVVTQKAAFTCIKNLWNRKPLKVYGGRMAESMLAILCHILRGEPVIRERLSKEKEGSRGEEDTGQEEGGSRREPQVNQQQLQQLMDMGFTREHAMEALLNTSTMEQATEYLLTHPPPIMGGVVRDLSMSEEDQMMRAIAMSLGQDIPMDQRAESPEEVACRKEEEERKAREKQEEEEAKCLEKFQDADPLEQDELHTFTDTMLPGCFHLLDELPDTVYRVCDLIMTAIKRNGADYRDMILKQVVNQVWEAADVLIKAALPLTTSDTKTVSEWISQMATLPQASNLATRILLLTLLFEELKLPCAWVVESSGILNVLIKLLEVVQPCLQAAKEQKEVQTPKWITPVLLLIDFYEKTAISSKRRAQMTKYLQSNSNNWRWFDDRSGRWCSYSASNNSTIDSAWKSGETSVRFTAGRRRYTVQFTTMVQVNEETGNRRPVMLTLLRVPRLNKNSKNSNGQELEKTLEESKEMDIKRKENKGNDTPLALESTNTEKETSLEETKIGEILIQGLTEDMVTVLIRACVSMLGVPVDPDTLHATLRLCLRLTRDHKYAMMFAELKSTRMILNLTQSSGFNGFTPLVTLLLRHIIEDPCTLRHTMEKVVRSAATSGAGSTTSGVVSGSLGSREINYILRVLGPAACRNPDIFTEVANCCIRIALPAPRGSGTASDDEFENLRIKGPNAVQLVKTTPLKPSPLPVIPDTIKEVIYDMLNALAAYHAPEEADKSDPKPGVMTQEVGQLLQDMGDDVYQQYRSLTRQSSDFDTQSGFSINSQVFAADGASTETSASGTSQGEASTPEESRDGKKDKEGDRASEEGKQKGKGSKPLMPTSTILRLLAELVRSYVGIATLIANYSYTVGQSELIKEDCSVLAFVLDHLLPHTQNAEDKDTPALARLFLASLAAAGSGTDAQVALVNEVKAALGRALAMAESTEKHARLQAVMCIISTIMESCPSTSSFYSSATAKTQHNGMNNIIRLFLKKGLVNDLARVPHSLDLSSPNMANTVNAALKPLETLSRIVNQPSSLFGSKSASSKNKSEQDAQGASQDSSSNQQDPGEPGEAEVQEEDHDVTQTEVADGDIMDGEAETDSVVIAGQPEVLSSQEMQVENELEDLIDELLERDGGSGNSTIIVSRSGEDESQEDVLMDEAPSNLSQASTLQANREDSMNILDPEDEEEHTQEEDSSGSNEDEDDSQDEEEEEEEDEEDDQEDDEGEEGDEDDDDDGSEMELDEDYPDMNASPLVRFERFDREDDLIIEFDNMFSSATDIPPSPGNIPTTHPLMVRHADHSSLTLGSGSSTTRLTQGIGRSQRTLRQLTANTGHTIHVHYPGNRQPNPPLILQRLLGPSAAADILQLSSSLPLQSRGRARLLVGNDDVHIIARSDDELLDDFFHDQSTATSQAGTLSSIPTALTRWTEECKVLDAESMHDCVSVVKVSIVNHLEFLRDEELEERREKRRKQLAEEETKITDKGKEDKENRDQSAQCTASKSNDSTEQNLSDGTPMPDSYPTTPSSTDAATSESKETLGTLQSSQQQPTLPTPPALGEVPQELQSPAGEGGSSTQLLMPVEPEELGPTRPSGEAETTQMELSPAPTITSLSPERAEDSDALTAVSSQLEGSPMDTSSLASCTLEEAVGDTSAAGSSEQPRAGSSTPGDAPPAVAEVQGRSDGSGESAQPPEDSSPPASSESSSTRDSAVAISGADSRGILEEPLPSTSSEEEDPLAGISLPEGVDPSFLAALPDDIRREVLQNQLGIRPPTRTAPSTNSSAPAVVGNPGVTEVSPEFLAALPPAIQEEVLAQQRAEQQRRELAQNASSDTPMDPVTFIQTLPSDLRRSVLEDMEDSVLAVMPPDIAAEAQALRREQEARQRQLMHERLFGHSSTSALSAILRSPAFTSRLSGNRGVQYTRLAVQRGGTFQMGGSSSHNRPSGSNVDTLLRLRGRLLLDHEALSCLLVLLFVDEPKLNTSRLHRVLRNLCYHAQTRHWVIRSLLSILQRSSESELCIETPKLTTSEEKGKKSSKSCGSSSHENRPLDLLHKMESKSSNQLSWLSVSMDAALGCRTNIFQIQRSGGRKHTEKHASGGSTVHIHPQAAPVVCRHVLDTLIQLAKVFPSHFTQQRTKETNCESDRERGNKACSPCSSQSSSSGICTDFWDLLVKLDNMNVSRKGKNSVKSVPVSAGGEGETSPYSLEASPLGQLMNMLSHPVIRRSSLLTEKLLRLLSLISIALPENKVSEAQANSGSGASSTTTATSTTSTTTTTAASTTPTPPTAPTPVTSAPALVAATAISTIVVAASTTVTTPTTATTTVSISPTTKGSKSPAKVSDGGSSSTDFKMVSSGLTENQLQLSVEVLTSHSCSEEGLEDAANVLLQLSRGDSGTRDTVLKLLLNGARHLGYTLCKQIGTLLAELREYNLEQQRRAQCETLSPDGLPEEQPQTTKLKGKMQSRFDMAENVVIVASQKRPLGGRELQLPSMSMLTSKTSTQKFFLRVLQVIIQLRDDTRRANKKAKQTGRLGSSGLGSASSIQAAVRQLEAEADAIIQMVREGQRARRQQQAATSESSQSEASVRREESPMDVDQPSPSAQDTQSIASDGTPQGEKEKEERPPELPLLSEQLSLDELWDMLGECLKELEESHDQHAVLVLQPAVEAFFLVHATERESKPPVRDTRESQLAHIKDEPPPLSPAPLTPATPSSLDPFFSREPSSMHISSSLPPDTQKFLRFAETHRTVLNQILRQSTTHLADGPFAVLVDYIRVLDFDVKRKYFRQELERLDEGLRKEDMAVHVRRDHVFEDSYRELHRKSPEEMKNRLYIVFEGEEGQDAGGLLREWYMIISREMFNPMYALFRTSPGDRVTYTINPSSHCNPNHLSYFKFVGRIVAKAVYDNRLLECYFTRSFYKHILGKSVRYTDMESEDYHFYQGLVYLLENDVSTLGYDLTFSTEVQEFGVCEVRDLKPNGANILVTEENKKEYVHLVCQMRMTGAIRKQLAAFLEGFYEIIPKRLISIFTEQELELLISGLPTIDIDDLKSNTEYHKYQSNSIQIQWFWRALRSFDQADRAKFLQFVTGTSKVPLQGFAALEGMNGIQKFQIHRDDRSTDRLPSAHTCFNQLDLPAYESFEKLRHMLLLAIQECSEGFGLA

SEQ ID NO: 38648 - protein, 54 aa, Artificial Sequence
  Synthetic polypeptide
DQPGQHGEIPSLQKVQKSARCGGTPLWSQLLGRLRAGVERRMALDLQNVAETCI

SEQ ID NO: 38649 - protein, 1566 aa, Artificial Sequence
  Synthetic polypeptide
AGHDGLCLLLLALGEAEAGKSLEPRSLRPAWATWRNPVSAKSTKIRQVWWHTPVVPVTWEAESWGGKENGFGLAECCRDLHMMKYPPSATTLHFEFYADPGAEVKIEKRTTSNTLHYIHIEQLDKISESPSEIMESLTKMYSIPKDKQMLLFTHIRLAHGFSNHRKRLQAVQARLHAISILVYSNALQESANSILYNGLIEELVDVLQITDKQLMEIKAASLRTLTSIVHLERTPKLSSIIDCTGTASYHGFLPVLVRNCIQAMIDPSMDPYPHQFATALFSFLYHLASYDAGGEALVSCGMMEALLKVIKFLGDEQDQITFVTRAVRVVDLITNLDMAAFQSHSGLSIFIYRLEHEVDLCRKECPFVIKPKIQRPNTTQEGEEMETDMDGVQCIPQRAALLKSMLNFLKKAIQDPAFSDGIRHVMDGSLPTSLKHIISNAEYYGPSLFLLATEVVTVFVFQEPSLLSSLQDNGLTDVMLHALLIKDVPATREVLGSLPNVFSALCLNARGLQSFVQCQPFERLFKVLLSPDYLPAMRRRRSSDPLGDTASNLGSAVDELMRHQPTLKTDATTAIIKLLEEICNLGRDPKYICQKPSIQKADGTATAPPPRSNHAAEEASSEDEEEEEVQAMQSFNSTQQNETEPNQQVVGTEERIPIPLMDYILNVMKFVESILSNNTTDDHCQEFVNQKGLLPLVTILGLPNLPIDFPTSAACQAVAGVCKSILTLSHEPKVLQEGLLQLDSILSSLEPLHRPIESPGGSVLLRELACAGNVADATLSAQATPLLHALTAAHAYIMMFVHTCRVGQSEIRSISVNQWGSQLGLSVLSKLSQLYCSLVWESTVLLSLCTPNSLPSGCEFGQADMQKLVPKDEKAGTTQGGKRSDGEQDGAAGSMDASTQGLLEGIGLDGDTLAPMETDEPTASDSKGKSKITPAMAARIKQIKPLLSASSRLGRALAELFGLLVKLCVGSPVRQRRSHHAASTTTAPTPAARSTASALTKLLTKGLSWQPPPYTPTPRFRLTFFICSVGFTSPMLFDERKYPYHLMLQKFLCSGGHNALFETFNWALSMGGKVPVSEGLEHSDLPDGTGEFLDAWLMLVEKMVNPTTVLESPHSLPAKLPGGVQNFPQFSALRFLVVTQKAAFTCIKNLWNRKPLKVYGGRMAESMLAILCHILRGEPVIRERLSKEKEGSRGEEDTGQEEGGSRREPQVNQQQLQQLMDMGFTREHAMEALLNTSTMEQATEYLLTHPPPIMGGVVRDLSMSEEDQMMRAIAMSLGQDIPMDQRAESPEEVACRKEEEERKAREKQEEEEAKCLEKFQDADPLEQDELHTFTDTMLPGCFHLLDELPDTVYRVCDLIMTAIKRNGADYRDMILKQVVNQVWEAADVLIKAALPLTTSDTKTVSEWISQMATLPQASNLATRILLLTLLFEELKLPCAWVVESSGILNVLIKLLEVVQPCLQAAKEQKEVQTPKWITPVLLLIDFYEKTAISSKRRAQMTKYLQSNSNNWRWFDDRSGRWCSYSASNNSTIDSAWKSGETSVRFTAGRRRYTVQFTTMVQGTSAE

SEQ ID NO: 38650 - protein, 35 aa, Artificial Sequence
  Synthetic polypeptide
GRSQDGRIGTAPVYSSQRERRRRRVISAFPSEFLQ

SEQ ID NO: 38651 - protein, 12 aa, Artificial Sequence
  Synthetic polypeptide
FLHFHLSSFSDP

SEQ ID NO: 38652 - protein, 58 aa, Artificial Sequence
  Synthetic polypeptide
WHAPVVPATREAEAQESLEPRRRRCGDPKLHHCTPAQGPLSTHWRHPAETGPLPQDVW

SEQ ID NO: 38653 - protein, 546 aa, Artificial Sequence
  Synthetic polypeptide
SQLLGRLRHKNRLNPGGGGVVTRNCTIALQPRDRYPRIGDILQKLAPFLKMYGEYVKNFDRAVELVNTWTERSTQFKVIIHEVQKEEACGNLTLQHHMLEPVQRIPRYELLLKDYLLKLPHGSPDSKDAQKSLELIATAAEHSNAAIRKMERMHKLLKVYELLGGEEDIVSPTKELIKEGHILKLSAKNGTTQDRYLILFNDRLLYCVPRLRLLGQKFSVRARIDVDGMELKESSNLNLPRTFLVSGKQRSLELQARTEEEKKDWVQAINSTLLKHEQTLETFKLLNSTNREDEDTPPNSPNVDLGKRAPTPIREKEVTMCMRCQEPFNSITKRRHHCKACGHVVCGKCSEFRARLVYDNNRSNRVCTDCYVALHGVPGSSPACSQHTPQRRRSILEKQASVAAENSVICSFLHYMEKGGKGWHKAWFVVPENEPLVLYIYGAPQDVKAQRSLPLIGFEVGPPEAGERPDRRHVFKITQSHLSWYFSPETEELQRRWMAVLGRAGRGDTFCPGPTLSEDREMEEAPVAALGATAEPPESPQTRDKT

SEQ ID NO: 38654 - protein, 34 aa, Artificial Sequence
  Synthetic polypeptide
PEIAPLHSSPGTAIHALETSCRNWPPSSRCMVSM

SEQ ID NO: 38655 - protein, 1044 aa, Artificial Sequence
  Synthetic polypeptide
GRSQDGRIGTAPVYSSQRERRIRRVISAFPSETKTAMNVILSDLQANDYFNIISFSDTVNVWKAGGSIQATIQNVHSAKDYLHCMEADGWTDVNSALLAAASVLNHSNQEPGRGPSVGRIPLIIFLTDGEPTAGVTTPSVILSNVRQALGHRVSLFSLAFGDDADFTLLRRLSLENRGIARRIYEDTDAALQLKGLYEEISMPLLADVRLNYLGGLVGASPWAVFPNYFGGSELVVAGQVQPGKQELGIHLAARGPKDQLLVAHHSEGATNNSQKAFGCPGEPAPNVAHFIRRLWAYVTIGELLDAHFQARDTTTRHLLAAKVLNLSLEYNFVTPLTSLVMVQPKQASEETRRQTSTSAGPDTIMPSSSSRHGLGVSTAQPALVPKVISPKSRPVKPKFYLSSTTTASTKKMLSSKELEPLGESPHTLSMPTYPKAKIPAQQDSGTLAQPTLRTKPTILVPSNSGTLLPLKPGSLSHQNPDILPTNSRTQVPPVKPGIPASPKADTVKCVTPLHSKPGAPSHPQLGALTSQAPKGLPQSRPGVSTLQVPKYPLHTRPRVPAPKTRNNMPHLGPGILLSKTPKILLSLKPSAPPHQISTSISLSKPETPNPHMPQTPLPPRPDRPRPPLPESLSTFPNTISSSTGPSSTTTTSVLGEPLPMPFTPTLPPGRFWHQYDLLPGPQRTRQVLGPSRPGVPTMSLLNSSRPTPEGSPPNLPILLPSSILPEAISLLLLPEELELLSESMVESKFVESLNPPAFYTFLTPDEDGSPNWDGNSEEILGGAGGSMESQGSSVGLAKGTLPSIFTFSSSVDGDPHFVIQIPHSEEKICFTLNGHPGDLLQLIEDPKAGLHVSGKLLGAPPRPGHKDQTRTYFQIITVTTDKPRAYTITISRSSISLRGEGTLRLSWDQPALLKRPQLELYVAAAARLTLRLGPYLEFLVLRHRYRHPSTLQLPHLGFYVANGSGLSPSARGLIGQFQHADIRLVTGPMGPCLRRHHGPDVPVILGKRLLKDSPRLLPRWASCWLVKRSHVELLLGHPYLSYVL

SEQ ID NO: 38656 - protein, 11 aa, Artificial Sequence
  Synthetic polypeptide
FLHFHLRLKRP

SEQ ID NO: 38657 - protein, 11 aa, Artificial Sequence
  Synthetic polypeptide
FLHFHLRLKRP

SEQ ID NO: 38658 - protein, 1024 aa, Artificial Sequence
  Synthetic polypeptide
NRRWVISAFPSETKTAMNVILSDLQANDYFNIISFSDTVNVWKAGGSIQATIQNVHSAKDYLHCMEADGWTDVNSALLAAASVLNHSNQEPGRGPSVGRIPLIIFLTDGEPTAGVTTPSVILSNVRQALGHRVSLFSLAFGDDADFTLLRRLSLENRGIARRIYEDTDAALQLKGLYEEISMPLLADVRLNYLGGLVGASPWAVFPNYFGGSELVVAGQVQPGKQELGIHLAARGPKDQLLVAHHSEGATNNSQKAFGCPGEPAPNVAHFIRRLWAYVTIGELLDAHFQARDTTTRHLLAAKVLNLSLEYNFVTPLTSLVMVQPKQASEETRRQTSTSAGPDTIMPSSSSRHGLGVSTAQPALVPKVISPKSRPVKPKFYLSSTTTASTKKMLSSKELEPLGESPHTLSMPTYPKAKIPAQQDSGTLAQPTLRTKPTILVPSNSGTLLPLKPGSLSHQNPDILPTNSRTQVPPVKPGIPASPKADTVKCVTPLHSKPGAPSHPQLGALTSQAPKGLPQSRPGVSTLQVPKYPLHTRPRVPAPKTRNNMPHLGPGILLSKTPKILLSLKPSAPPHQISTSISLSKPETPNPHMPQTPLPPRPDRPRPPLPESLSTFPNTISSSTGPSSTTTTSVLGEPLPMPFTPTLPPGRFWHQYDLLPGPQRTRQVLGPSRPGVPTMSLLNSSRPTPEGSPPNLPILLPSSILPEAISLLLLPEELELLSESMVESKFVESLNPPAFYTFLTPDEDGSPNWDGNSEEILGGAGGSMESQGSSVGLAKGTLPSIFTFSSSVDGDPHFVIQIPHSEEKICFTLNGHPGDLLQLIEDPKAGLHVSGKLLGAPPRPGHKDQTRTYFQIITVTTDKPRAYTITISRSSISLRGEGTLRLSWDQPALLKRPQLELYVAAAARLTLRLGPYLEFLVLRHRYRHPSTLQLPHLGFYVANGSGLSPSARGLIGQFQHADIRLVTGPMGPCLRRHHGPDVPVILGKRLLKDSPRLLPRWASCWLVKRSHVELLLGHPYLSYVL

SEQ ID NO: 38659 - protein, 6 aa, Artificial Sequence
  Synthetic polypeptide
PRRGDF

SEQ ID NO: 38660 - protein, 186 aa, Artificial Sequence
  Synthetic polypeptide
GAPLLGRDPVGEIFKEREEDLRRLSRPLECSCFRTSIWDETLYKAWSSIVYQLIPNVQQLEMNLRNFAEIIEADEVLLFERATFLVISHYQCKEQRDAHRFEKISNIIKQFKLSCSKLAASFQSMEVRNSNFAAFIDIFTSNTYVMVVMSDPSIPSAATLINIRNARKHFEKLERVDGPKQCLLMR

SEQ ID NO: 38661 - protein, 35 aa, Artificial Sequence
  Synthetic polypeptide
DVGSASAPPPRLGCEERLCWAVTPSGRFLKSEKKI

SEQ ID NO: 38662 - protein, 72 aa, Artificial Sequence
  Synthetic polypeptide
GAPLLGRDPVGEIFKEREEDLRRLSRPLECSCFRTSIWDETLYKAWSSIVYQLIPNVQQLEMNLRNFAEIIE

SEQ ID NO: 38663 - protein, 175 aa, Artificial Sequence
  Synthetic polypeptide
EIFKEREEDLRRLSRPLECSCFRTSIWDETLYKAWSSIVYQLIPNVQQLEMNLRNFAEIIEADEVLLFERATFLVISHYQCKEQRDAHRFEKISNIIKQFKLSCSKLAASFQSMEVRNSNFAAFIDIFTSNTYVMVVMSDPSIPSAATLINIRNARKHFEKLERVDGPKQCLLMR

SEQ ID NO: 38664 - protein, 46 aa, Artificial Sequence
  Synthetic polypeptide
GAPLLGRDPVGEVRSVSAQPPSLRSEETLRLATAPPEKFLKSEKKI

SEQ ID NO: 38665 - protein, 16 aa, Artificial Sequence
  Synthetic polypeptide
EVRRPSAWQPPRLRNF

SEQ ID NO: 38666 - protein, 61 aa, Artificial Sequence
  Synthetic polypeptide
EIFKEREEDLRRLSRPLECSCFRTSIWDETLYKAWSSIVYQLIPNVQQLEMNLRNFAEIIE

SEQ ID NO: 38667 - protein, 196 aa, Artificial Sequence
  Synthetic polypeptide
FLRDLELEIPFDPAIPLLGIYPKGYKSCYYKDTCTRMFIAALFTIAKTWNQPKCPTMIDWIKKMWHICTMEYYAAIRNDEFMSFVGTWMKLETIILSKLSQGQKTKRRTFSLIGFEISENQKRQAAMTVRKVPKQKGVNSARSVPPSYPPPQDPLNHGQYLVPDGIAQSQVFEFTEPKRSQSPFWQNFSRLTPFKK

SEQ ID NO: 38668 - protein, 35 aa, Artificial Sequence
  Synthetic polypeptide
VHVLCRNMDEAGNHHSQQTISRTKNQTPHVLAHRL

SEQ ID NO: 38669 - protein, 160 aa, Artificial Sequence
  Synthetic polypeptide
FLRDLELEIPFDPAIPLLGIYPKGYKSCYYKDTCTRMFIAALFTIAKTWNQPKCPTMIDWIKKMWHICTMEYYAAIRNDEFMSFVGTWMKLETIILSKLSQGQKTKRRTFSLIGFEISENQKRQAAMTVRKLPFPQLSEARICSPKGFASVFNGTCCGES

SEQ ID NO: 38670 - protein, 15 aa, Artificial Sequence
  Synthetic polypeptide
KQDPPPAKKDLFRST

SEQ ID NO: 38671 - protein, 257 aa, Artificial Sequence
  Synthetic polypeptide
SISSHQHRSKTLHQQKRIYLGPPEESAAPPVPPPRVTARRHKPITISKRLLRERTVFYTSSLDESEDEIQHQTPNGTITSSIEPPKPPQHPKLPIQRSGETDPGRKSPSRPILDGKLEPCPEVDVGKLVSRLQDGGTKITPKATNGPMPGSGPTKTPSFHIKRPAPRPLAHHKEGDADSFSKVRPPGEKPTIIRPPVRPPDPPCRAATPQKPEPKPDIVAGNAGEITSSVVASRTRFFETASRKTGSSQGRLPGDES

SEQ ID NO: 38672 - protein, 34 aa, Artificial Sequence
  Synthetic polypeptide
EIAIATPAFSKHHPDQSAVINIEARPSTSKKGSI

SEQ ID NO: 38673 - protein, 149 aa, Artificial Sequence
  Synthetic polypeptide
SISSHQHRSKTLHQQKRIYLGPPEESAAPPVPPPRVTARRHKPITISKRLLRERTVFYTSSLDESEGDADSFSKVRPPGEKPTIIRPPVRPPDPPCRAATPQKPEPKPDIVAGNAGEITSSVVASRTRFFETASRKTGSSQGRLPGDES

SEQ ID NO: 38674 - protein, 46 aa, Artificial Sequence
  Synthetic polypeptide
VWSGQPGVWCFPLLQVKKNAEAEAKRACEWLQATGFPQYVQLFEGG

SEQ ID NO: 38675 - protein, 15 aa, Artificial Sequence
  Synthetic polypeptide
YGVGSQESGASHCCR

SEQ ID NO: 38676 - protein, 19 aa, Artificial Sequence
  Synthetic polypeptide
MEWAARSLVLPIAAGEEER

SEQ ID NO: 38677 - protein, 1097 aa, Artificial Sequence
  Synthetic polypeptide
VWSGQPGVWCFPLLQVKKNAEAEAKRACEWLQATGFPQYVQLFEEGSFPLDIGSVKKNHGFLDEDSLGALCRRLMTLNNCASMKLEVHFQSKQNEDSEEEEQCTISSHWAFQQESKCWSPMGSSDLLAPPSPGLPATSSCESVLTELSATSLPVITVSLPPEPADLPLPGRAPSSSDRPLLSPTQGQEGPQDKAKKRHRNRSFLKHLESLRRKEKSGSQQAEPKHSPATSEKVSKASSFRSCRGFLSAGFYRAKNWAATSAGGSGANTRKAWEAWPVASFRHPQWTHRGDCLVHVPGDHKPGTFPRSLSIESLCPEDGHRLADWQPGRRWGCEGRRGSCGSTGSHASTYDNLPELYPAEPVMVGAEAEDEDDEESGGSYAHLDDILQHVWGLQQRVELWSRAMYPDLGPGDEEEEEATSSVEIATVEVKCQAEALSQMEVPAHGESPAWAQAEVQPAVLAPAQAPAEAEPVAQEEAEAPAPAPAPAPAQDSEQEAHSGGEPTFASSLSVEEGHSISDTVASSSELDSSGNSMNEAEAAGPLAGLQASMPRERRDSGVGASLTRPCRKLRWHSFQNSHRPSLNSESLEINRQFAGQINLLHKGSLLRLTAFMEKYTVPHKQGWVWSMPKFMRRNKTPDYRGQHVFGVPPLIHVQRTGQPLPQSIQQAMRYLRSQCLDQVGIFRKSGVKSRIQNLRQMNETSPDNVCYEGQSAYDVADLLKQYFRDLPEPIFTSKLTTTFLQIYQLLPKDQWLAAAQAATLLLPDENREVLQTLLYFLSDIASAEENQMTAGNLAVCLAPSIFHLNVSKKDSPSPRIKSKRSLIGRPGPRDLSDNMAATQGLSHMISDCKKLFQVPQDMVLQLCSSYSAAELSPPGPALAELRQAQAAGVSLSLYMEENIQDLLRDAAERFKGWMSVPGPQHTELACRKAPDGHPLRLWKASTEVAAPPAVVLHRVLRERALWDEDLLRAQVLEALMPGVELYHYVTDSMAPHPCRDFVVLRMWRSDLPRGGCLLVSQSLDPEQPVPESGVRALMLTSQYLMEPCGLGRSRLTHICRADLRGRSPDWYNKVFGHLCAMEVAKIRDSFPTLQAAGPETKL

SEQ ID NO: 38678 - protein, 151 aa, Artificial Sequence
  Synthetic polypeptide
WFDKGKHVLLGSHSFSCLPPCEMCLSPSTMTVRPPQPRGTAQLKTRKRERKQDLLDPMALQDPQDLQDPRDPQEFQGFLEFQEQLLWDHLVLQVLLVLKDPLASRDLLVLLIKLELEKTSQLWCIYRAKGQQFKSRMIFQVECSMTGLASL

SEQ ID NO: 38679 - protein, 10 aa, Artificial Sequence
  Synthetic polypeptide
GLPSHVELPS

SEQ ID NO: 38680 - protein, 242 aa, Artificial Sequence
  Synthetic polypeptide
DVPFTFHHDCEASPATWNCPVKNKKKGKKAGPPGPNGPPGPPGPPGPQGPPGIPGIPGIPGTTVMGPPGPPGPPGPQGPPGLQGPSGAADKAGTRENQPAVVHLQGQGSAIQVKNDLSGGVLNDWSRITMNPKVFKLHPRSGELEVLVDGTYFIYSQVEVYYINFTDFASYEVVVDEKPFLQCTRSIETGKTNYNTCYTAGVCLLKARQKIAVKMVHADISINMSKHTTFFGAIRLGEAPAS

SEQ ID NO: 38681 - protein, 240 aa, Artificial Sequence
  Synthetic polypeptide
DVPFTFHHDCEASPATWNCPVKNKKKGKKAGPPGPNGPPGPPGPPGPQGPPGIPGIPGIPGTTVMGPPGPPGPPGPQGPPGLQGPSGAADKAGTRENQPAVVHLQGQGSAIQVKNDLSGGVLNDWSRITMNPKVFKLHPRSGELEVLVDGTYFIYSQVYYINFTDFASYEVVVDEKPFLQCTRSIETGKTNYNTCYTAGVCLLKARQKIAVKMVHADISINMSKHTTFFGAIRLGEAPAS

SEQ ID NO: 38682 - protein, 148 aa, Artificial Sequence
  Synthetic polypeptide
WFDKGKHVLLGSHSFSCLPPCEMCLSPSTMTVRPPQPRGTAQLKTRKRERKQDLLDPMALQDPQDLQDPRDPQEFQGFLEFQEQLLWDHLVLQVLLVLKDPLASRDLLVLLIKLELEKTSQLWCIYRAKGQQFKSRMVECSMTGLASL

SEQ ID NO: 38683 - protein, 237 aa, Artificial Sequence
  Synthetic polypeptide
DVPFTFHHDCEASPATWNCPVKNKKKGKKAGPPGPNGPPGPPGPPGPQGPPGIPGIPGIPGTTVMGPPGPPGPPGPQGPPGLQGPSGAADKAGTRENQPAVVHLQGQGSAIQVKNGGVLNDWSRITMNPKVFKLHPRSGELEVLVDGTYFIYSQVYYINFTDFASYEVVVDEKPFLQCTRSIETGKTNYNTCYTAGVCLLKARQKIAVKMVHADISINMSKHTTFFGAIRLGEAPAS

SEQ ID NO: 38684 - protein, 141 aa, Artificial Sequence
  Synthetic polypeptide
WFDKGKHVLLGSHSFSCLPPCEMCLSPSTMTVRPPQPRGTAQLKTRKRERKQDLLDPMALQDPQDLQDPRDPQEFQGFLEFQEQLLWDHLVLQVLLVLKDPLASRDLLVLLIKLELEKTSQLWCIYRAKGQQFKSRMIFQV

SEQ ID NO: 38685 - protein, 119 aa, Artificial Sequence
  Synthetic polypeptide
DVPFTFHHDCEASPATWNCPVKNKKKGKKAGPPGPNGPPGPPGPPGPQGPPGIPGIPGIPGTTVMGPPGPPGPPGPQGPPGLQGPSGAADKAGTRENQPAVVHLQGQGSAIQVKNDLSG

SEQ ID NO: 38686 - protein, 55 aa, Artificial Sequence
  Synthetic polypeptide
LITVICEEFRKAAQQQEEQEEKEEEDDEQTLHRAREWDDWKDTHPRGYGNRQNMG

SEQ ID NO: 38687 - protein, 51 aa, Artificial Sequence
  Synthetic polypeptide
FVRNSEKQLSNRKNKKKRRKRMMNKHSTEPGSGMTGRTPILGAMGTDRTWA

SEQ ID NO: 38688 - protein, 787 aa, Artificial Sequence
  Synthetic polypeptide
GQEQWLTCVSPALWEDEVQQLQVLLLQAHGGTLPGSITVEPSENLQSLMEKNQSLVEENEKLSRGLSEAAGQTAQMLERIILTEQANEKMNAKLEELRQHAACKLDLQKLVETLEDQELKENVEIICNLQQLITQLSDETVACMAAAIDTAVEQEAQVETSPETSRSSDAFTTQHALRQAQMSKELVELNKALALKEALARKMTQNDSQLQPIQYQYQDNIKELELEVINLQKEKEELVLELQTAKKDANQAKLSERRRKRLQELEGQIADLKKKLNEQSKLLKLKESTERTVSKLNQEIRMMKNQRVQLMRQMKEDAEKFRQWKQKKDKEVIQLKERDRKRQYELLKLERNFQKQSNVLRRKTEEAAAANKRLKDALQKQREVADKRKETQSRGMEGTAARVKNWLGNEIEVMVSTEEAKRHLNDLLEDRKILAQDVAQLKEKKESGENPPPKLRRRTFSLTEVRGQVSESEDSITKQIESLETEMEFRSAQIADLQQKLLDAESEDRPKQRWENIATILEAKCALKYLIGELVSSKIQVSKLESSLKQSKTSCADMQKMLFEERNHFAEIETELQAELVRMEQQHQEKVLYLLSQLQQSQMAEKQLEESVSEKEQQLLSTLKCQDEELEKMREVCEQNQQLLRENEIIKQKLTLLQVASRQKHLPKDTLLSPDSSFEYVPPKPKPSRVKEKFLEQSMDIEDLKYCSEHSVNEHEDGDGDDDEGDDEEWKPTKLVKVSRKNIQGVLLLTPVISALWEAEARGLLEARSSRPAWATWRDPVSTKPKN

SEQ ID NO: 38689 - protein, 27 aa, Artificial Sequence
  Synthetic polypeptide
APHFGRTRYNSYKSCCYRPMEVPCLDL

SEQ ID NO: 38690 - protein, 58 aa, Artificial Sequence
  Synthetic polypeptide
PGAVAYMCKPRTLGGRGTTATSLVATGPWRYPAWIYNCGTIRESTIPDGEESVPGRGE

SEQ ID NO: 38691 - protein, 892 aa, Artificial Sequence
  Synthetic polypeptide
GQEQWLTCVSPALWEDEVQQLQVLLLQAHGGTLPGSITVEPSENLQSLMEKNQSLVEENEKLSRGLSEAAGQTAQMLERIILTEQANEKMNAKLEELRQHAACKLDLQKLVETLEDQELKENVEIICNLQQLITQLSDETVACMAAAIDTAVEQEAQVETSPETSRSSDAFTTQHALRQAQMSKELVELNKALALKEALARKMTQNDSQLQPIQYQYQDNIKELELEVINLQKEKEELVLELQTAKKDANQAKLSERRRKRLQELEGQIADLKKKLNEQSKLLKLKESTERTVSKLNQEIRMMKNQRVQLMRQMKEDAEKFRQWKQKKDKEVIQLKERDRKRQYELLKLERNFQKQSNVLRRKTEEAAAANKRLKDALQKQREVADKRKETQSRGMEGTAARVKNWLGNEIEVMVSTEEAKRHLNDLLEDRKILAQDVAQLKEKKESGENPPPKLRRRTFSLTEVRGQVSESEDSITKQIESLETEMEFRSAQIADLQQKLLDAESEDRPKQRWENIATILEAKCALKYLIGELVSSKIQVSKLESSLKQSKTSCADMQKMLFEERNHFAEIETELQAELVRMEQQHQEKVLYLLSQLQQSQMAEKQLEESVSEKEQQLLSTLKCQDEELEKMREVCEQNQQLLRENEIIKQKLTLLQVASRQKHLPKDTLLSPDSSFEYVPPKPKPSRVKEKFLEQSMDIEDLKYCSEHSVNEHEDGDGDDDEGDDEEWKPTKLVKVSRKNIQGCSCKGWCGNKQCGCRKQKSDCGVDCCCDPTKCRNRQQGKDSLGTVERTQDSEGSFKLEDPTEVTPGLSFFNPVCATPNSKILKEMCDVEQVLSKKTPPAPSPFDLPELKHVATEYQENKAPGKKKKRALASNTSFFSGCSPIEEEAH

SEQ ID NO: 38692 - protein, 34 aa, Artificial Sequence
  Synthetic polypeptide
PQHFGRPRWADHKCGTIRESTIPDGEESVPGRGE

SEQ ID NO: 38693 - protein, 771 aa, Artificial Sequence
  Synthetic polypeptide
PGAVAHACNPSTLGGRGGRITSVEPSENLQSLMEKNQSLVEENEKLSRGLSEAAGQTAQMLERIILTEQANEKMNAKLEELRQHAACKLDLQKLVETLEDQELKENVEIICNLQQLITQLSDETVACMAAAIDTAVEQEAQVETSPETSRSSDAFTTQHALRQAQMSKELVELNKALALKEALARKMTQNDSQLQPIQYQYQDNIKELELEVINLQKEKEELVLELQTAKKDANQAKLSERRRKRLQELEGQIADLKKKLNEQSKLLKLKESTERTVSKLNQEIRMMKNQRVQLMRQMKEDAEKFRQWKQKKDKEVIQLKERDRKRQYELLKLERNFQKQSNVLRRKTEEAAAANKRLKDALQKQREVADKRKETQSRGMEGTAARVKNWLGNEIEVMVSTEEAKRHLNDLLEDRKILAQDVAQLKEKKESGENPPPKLRRRTFSLTEVRGQVSESEDSITKQIESLETEMEFRSAQIADLQQKLLDAESEDRPKQRWENIATILEAKCALKYLIGELVSSKIQVSKLESSLKQSKTSCADMQKMLFEERNHFAEIETELQAELVRMEQQHQEKVLYLLSQLQQSQMAEKQLEESVSEKEQQLLSTLKCQDEELEKMREVCEQNQQLLRENEIIKQKLTLLQVASRQKHLPKDTLLSPDSSFEYVPPKPKPSRVKEKFLEQSMDIEDLKYCSEHSVNEHEDGDGDDDEGDDEEWKPTKLVKVSRKNIQGVLLLTPVISALWEAEARGLLEARSSRPAWATWRDPVSTKPKN

SEQ ID NO: 38694 - protein, 31 aa, Artificial Sequence
  Synthetic polypeptide
RARWLMPVTPALWEAEVGGSQVWNHQRIYNP

SEQ ID NO: 38695 - protein, 876 aa, Artificial Sequence
  Synthetic polypeptide
PGAVAHACNPSTLGGRGGRITSVEPSENLQSLMEKNQSLVEENEKLSRGLSEAAGQTAQMLERIILTEQANEKMNAKLEELRQHAACKLDLQKLVETLEDQELKENVEIICNLQQLITQLSDETVACMAAAIDTAVEQEAQVETSPETSRSSDAFTTQHALRQAQMSKELVELNKALALKEALARKMTQNDSQLQPIQYQYQDNIKELELEVINLQKEKEELVLELQTAKKDANQAKLSERRRKRLQELEGQIADLKKKLNEQSKLLKLKESTERTVSKLNQEIRMMKNQRVQLMRQMKEDAEKFRQWKQKKDKEVIQLKERDRKRQYELLKLERNFQKQSNVLRRKTEEAAAANKRLKDALQKQREVADKRKETQSRGMEGTAARVKNWLGNEIEVMVSTEEAKRHLNDLLEDRKILAQDVAQLKEKKESGENPPPKLRRRTFSLTEVRGQVSESEDSITKQIESLETEMEFRSAQIADLQQKLLDAESEDRPKQRWENIATILEAKCALKYLIGELVSSKIQVSKLESSLKQSKTSCADMQKMLFEERNHFAEIETELQAELVRMEQQHQEKVLYLLSQLQQSQMAEKQLEESVSEKEQQLLSTLKCQDEELEKMREVCEQNQQLLRENEIIKQKLTLLQVASRQKHLPKDTLLSPDSSFEYVPPKPKPSRVKEKFLEQSMDIEDLKYCSEHSVNEHEDGDGDDDEGDDEEWKPTKLVKVSRKNIQGCSCKGWCGNKQCGCRKQKSDCGVDCCCDPTKCRNRQQGKDSLGTVERTQDSEGSFKLEDPTEVTPGLSFFNPVCATPNSKILKEMCDVEQVLSKKTPPAPSPFDLPELKHVATEYQENKAPGKKKKRALASNTSFFSGCSPIEEEAH

SEQ ID NO: 38696 - protein, 65 aa, Artificial Sequence
  Synthetic polypeptide
LMCVPARAGVETSSVGAGSKSQTVVWTVAVTPQSVGTASKARIAWALLNGPRIPKAPSNWRILPR

SEQ ID NO: 38697 - protein, 28 aa, Artificial Sequence
  Synthetic polypeptide
CVFLQGLVWKQAVWVQEAKVRLWCGLLL

SEQ ID NO: 38698 - protein, 149 aa, Artificial Sequence
  Synthetic polypeptide
NVCSCKGWCGNKQCGCRKQKSDCGVDCCCDPTKCRNRQQGKDSLGTVERTQDSEGSFKLEDPTEVTPGLSFFNPVCATPNSKILKEMCDVEQVLSKKTPPAPSPFDLPELKHVATEYQENKAPGKKKKRALASNTSFFSGCSPIEEEAH

SEQ ID NO: 38699 - protein, 419 aa, Artificial Sequence
  Synthetic polypeptide
SPASIPLLSCVPYILYPYIMLFLLSGMLSSPAPFPWTQLKCHFLRETFVELHPLPTEYSRFESKIHDLREQMMNSSMSSGSGSLRTSEKRSLYVRALFDYDRTRDSCLPSQGLSFSYGDILHVINASDDEWWQARLVTPHGESEQIGVIPSKKRVEKKERARLKTVKFHARTGMIESNRDFPGLSDDYYGAKNLKGVTSNTSDSESSSKGQEDAILSYEPVTRQEIHYARPVIILGPMKDRVNDDLISEFPHKFGSCVPHTTRPRRDNEVDGQDYHFVVSREQMEKDIQDNKFIEAGQFNDNLYGTSIQSVRAVAERGKHCILDVSGNAIKRLQQAQLYPIAIFIKPKSIEALMEMNRRQTYEQANKIYDKAMKLEQEFGEYFTAIVQGDSLEEIYNKIKQIIEDQSGHYIWVPSPEKL

SEQ ID NO: 38700 - protein, 52 aa, Artificial Sequence
  Synthetic polypeptide
CCSFCLECFLHQRPFPGLSLNVTSSGKPLLNSTPFPQNTVALNRRYMTYENK

SEQ ID NO: 38701 - protein, 11 aa, Artificial Sequence
  Synthetic polypeptide
TPPPSHRIQSL

SEQ ID NO: 38702 - protein, 405 aa, Artificial Sequence
  Synthetic polypeptide
SPASIPLLSCVPYILYPYIMLFLLSGMLSSPAPFPWTQLKCHFLRETFVELHPLPTEYSRFESKIHDLREQMMNSSMSSGSGSLRTSEKRSLYVRALFDYDRTRDSCLPSQGLSFSYGDILHVINASDDEWWQARLVTPHGESEQIGVIPSKKRVEKKERARLKTVKFHARTGMIESNRDFPGLSDDYYGAKNLKGQEDAILSYEPVTRQEIHYARPVIILGPMKDRVNDDLISEFPHKFGSCVPHTTRPRRDNEVDGQDYHFVVSREQMEKDIQDNKFIEAGQFNDNLYGTSIQSVRAVAERGKHCILDVSGNAIKRLQQAQLYPIAIFIKPKSIEALMEMNRRQTYEQANKIYDKAMKLEQEFGEYFTAIVQGDSLEEIYNKIKQIIEDQSGHYIWVPSPEKL

SEQ ID NO: 38703 - protein, 437 aa, Artificial Sequence
  Synthetic polypeptide
SPASIPLLSCVPYILYPYIMLFLLSGMLSSPAPFPWTQLKCHFLRETFVELHPLPTEYSRFESKIHDLREQMMNSSMSSGSGSLRTSEKRSLYVRALFDYDRTRDSCLPSQGLSFSYGDILHVINASDDEWWQARLVTPHGESEQIGVIPSKKRVEKKERARLKTVKFHARTGMIESNRSIKTKRKKSFRLSRKFPFYKSKENMAQESSIQEQGVTSNTSDSESSSKGQEDAILSYEPVTRQEIHYARPVIILGPMKDRVNDDLISEFPHKFGSCVPHTTRPRRDNEVDGQDYHFVVSREQMEKDIQDNKFIEAGQFNDNLYGTSIQSVRAVAERGKHCILDVSGNAIKRLQQAQLYPIAIFIKPKSIEALMEMNRRQTYEQANKIYDKAMKLEQEFGEYFTAIVQGDSLEEIYNKIKQIIEDQSGHYIWVPSPEKL

SEQ ID NO: 38704 - protein, 411 aa, Artificial Sequence
  Synthetic polypeptide
CKDGGRDWNDVSTSQGAPRIDGSHQKLEERHGTTSSSAPPEGTNPGHTDFGLLGSRTLPLLGVGLNTTILTPNGNEDTTADFFLTTMPTDSLSVSTLPLPEVQCFVFNVEYMNCTWNSSSEPQPTNLTLHYWYKNSDNDKVQKCSHYLFSEEITSGCQLQKKEIHLYQTFVVQLQDPREPRRQATQMLKLQNLVIPWAPENLTLHKLSESQLELNWNNRFLNHCLEHLVQYRTDWDHSWTEQSVDYRHKFSLPSVDGQKRYTFRVRSRFNPLCGSAQHWSEWSHPIHWGSNTSKENPFLFALEAVVISVGSMGLIISLLCVYFWLERTMPRIPTLKNLEDLVTEYHGNFSAWSGVSKGLAESLQPDYSERLCLVSEIPPKGGALGEGPGASPCNQHSPYWAPPCYTLKPET

SEQ ID NO: 38705 - protein, 37 aa, Artificial Sequence
  Synthetic polypeptide
KRGMEQLLPQRLQKGPTLATLISDFWAPELCPCWEWG

SEQ ID NO: 38706 - protein, 26 aa, Artificial Sequence
  Synthetic polypeptide
FRTSGLQNSAPAGSGAEHDNSDAQWE

SEQ ID NO: 38707 - protein, 9 aa, Artificial Sequence
  Synthetic polypeptide
GLPSHVELY

SEQ ID NO: 38708 - protein, 226 aa, Artificial Sequence
  Synthetic polypeptide
DVPFIFCHDCEASPATWNYTERLYSVVFQEICNRYDKKYSWDVKSLVMGKKALEAAQIIIDVLQLPMSKEELVEESQTKLKEVFPTAALMPGAEKLIIHLRKHGIPFALATSSGSASFDMKTSRHKEFFSLFSHIVLGDDPEVQHGKPDPDIFLACAKRFSPPPAMEKCLVFEDAPNGVEAALAAGMQVVMVPDGNLSRDLTTKATLVLNSLQDFQPELFGLPSYE

SEQ ID NO: 38709 - protein, 83 aa, Artificial Sequence
  Synthetic polypeptide
IMGAGLSRAVLVIVNKSHEIWWFYEKEFSCTSSLSRLPPSEMCLSSSAMIVRPPQPRGTILNGCIQWCFKKYVIAMTRNTAGM

SEQ ID NO: 38710 - protein, 183 aa, Artificial Sequence
  Synthetic polypeptide
DVPFIFCHDCEASPATWNYTERLYSVVFQEICNRYDKKYSWDVKSLVMGAEKLIIHLRKHGIPFALATSSGSASFDMKTSRHKEFFSLFSHIVLGDDPEVQHGKPDPDIFLACAKRFSPPPAMEKCLVFEDAPNGVEAALAAGMQVVMVPDGNLSRDLTTKATLVLNSLQDFQPELFGLPSYE

SEQ ID NO: 38711 - protein, 206 aa, Artificial Sequence
  Synthetic polypeptide
DVPFIFCHDCEASPATWNYTERLYSVVFQEICNRYDKKYSWDVKSLVMGKKALEAAQIIIDVLQLPMSKEELVEESQTKLKEVFPTAALMPGAEKLIIHLRKHGIPFALATSSGSASFDMKTSRHKEFFSLFSHIVLGDDPEVQHGKPDPDIFLACAKRFSPPPAMEKSSIHRPRLLTAQKCQGCRDPFSALLLLCNQLLLCSDDT

SEQ ID NO: 38712 - protein, 189 aa, Artificial Sequence
  Synthetic polypeptide
DVPFIFCHDCEASPATWNYTERLYSVVFQEICNRYDKKYSWDVKSLVMGKKALEAAQIIIDVLQLPMSKEELVEESQTKLKEVFPTAALMPGAEKLIIHLRKHGIPFALATSSGSASFDMKTSRHKEFFSLFSHIVLGDDPEVQHGKPDPDIFLACAKRFSPPPAMEKSSIHRPRLLTAQKCQGCRDPF

SEQ ID NO: 38713 - protein, 36 aa, Artificial Sequence
  Synthetic polypeptide
SHSSHCPLEHHKGLHCCHEGQVSARGDWGGRSHGVW

SEQ ID NO: 38714 - protein, 958 aa, Artificial Sequence
  Synthetic polypeptide
LLSSRGTDHIVRTAPWNTTRAFIAAMKGKCLLEVTGVADPTGCGEGFSYVKIPNKPTQQKDDKEPQPVKKTVTGTDADLRRLSLKNAKQLLRKFGVPEEEIKKLSRWEVIDVVRTMSTEQARSGEGPMSKFARGSRFSVAEHQERYKEECQRIFDLQNKVLSSTEVLSTDTDSSSAEDSDFEEMGKNIENMLQNKKTSSQLSREREEQERKELQRMLLAAGSAASGNNHRDDDTASVTSLNSSATGRCLKIYRTFRDEEGKEYVRCETVRKPAVIDAYVRIRTTKDEEFIRKFALFDEQHREEMRKERRRIQEQLRRLKRNQEKEKLKGPPEKKPKKMKERPDLKLKCGACGAIGHMRTNKFCPLYYQTNAPPSNPVAMTEEQEEELEKTVIHNDNEELIKVEGTKIVLGKQLIESADEVRRKSLVLKFPKQQLPPKKKRRVGTTVHCDYLNRPHKSIHRRRTDPMVTLSSILESIINDMRDLPNTYPFHTPVNAKVVKDYYKIITRPMDLQTLRENVRKRLYPSREEFREHLELIVKNSATYNGPKHSLTQISQSMLDLCDEKLKEKEDKLARLEKAINPLLDDDDQVAFSFILDNIVTQKMMAVPDSWPFHHPVNKKFVPDYYKVIVNPMDLETIRKNISKHKYQSRESFLDDVNLILANSVKYNGPESQYTKTAQEIVNVCYQTLTEYDEHLTQLEKDICTAKEAALEEAELESLDPMTPGPYTPQAKPPDLYDTNTSLSMSRDASVFQDESNMSVLDIPSATPEKQVTQEGEDGDGDLADEEEGTVQQPQASVLYEDLLMSEGEDDEEDAGSDEEGDNPFSAIQLSESGSDSDVGSGGIRPKQPRMLQENTRMDMENEESMMSYEGDGGEASHGLEDSNISYGSYEEPDPKSNTQDTSFSSIGGYEVSEEEEDEEEEEQRSGPSVLSQVHLSEDEEDSEDFHSIAGDSDLDSDE

SEQ ID NO: 38715 - protein, 990 aa, Artificial Sequence
  Synthetic polypeptide
LLSSRGTDHIVRTAPWNTTRAFIAAMKGKCLLEVTGVADPTGCGEGFSYVKIPNKPTQQKDDKEPQPVKKTVTGTDADLRRLSLKNAKQLLRKFGVPEEEIKKLSRWEVIDVVRTMSTEQARSGEGPMSKFARGSRFSVAEHQERYKEECQRIFDLQNKVLSSTEVLSTDTDSSSAEDSDFEEMGKNIENMLQNKKTSSQLSREREEQERKELQRMLLAAGSAASGNNHRDDDTASVTSLNSSATGRCLKIYRTFRDEEGKEYVRCETVRKPAVIDAYVRIRTTKDEEFIRKFALFDEQHREEMRKERRRIQEQLRRLKRNQEKEKLKGPPEKKPKKMKERPDLKLKCGACGAIGHMRTNKFCPLYYQTNAPPSNPVAMTEEQEEELEKTVIHNDNEELIKVEGTKIVLGKQLIESADEVRRKSLVLKFPKQQLPPKKKRRVGTTVHCDYLNRPHKSIHRRRTDPMVTLSSILESIINDMRDLPNTYPFHTPVNAKVVKDYYKIITRPMDLQTLRENVRKRLYPSREEFREHLELIVKNSATYNGPKHSLTQISQSMLDLCDEKLKEKEDKLARLEKAINPLLDDDDQVAFSFILDNIVTQKMMAVPDSWPFHHPVNKKFVPDYYKVIVNPMDLETIRKNISKHKYQSRESFLDDVNLILANSVKYNGPESQYTKTAQEIVNVCYQTLTEYDEHLTQLEKDICTAKEAALEEAELESLDPMTPGPYTPQPPDLYDTNTSLSMSRDASVFQDESNMSVLDIPSATPEKQVTQMRQGRGRLGEEDSDVDIEGYDDEEEDGKPKTPAPEGEDGDGDLADEEEGTVQQPQASVLYEDLLMSEGEDDEEDAGSDEEGDNPFSAIQLSESGSDSDVGSGGIRPKQPRMLQENTRMDMENEESMMSYEGDGGEASHGLEDSNISYGSYEEPDPKSNTQDTSFSSIGGYEVSEEEEDEEEEEQRSGPSVLSQVHLSEDEEDSEDFHSIAGDSDLDSDE

SEQ ID NO: 38716 - protein, 956 aa, Artificial Sequence
  Synthetic polypeptide
LLSSRGTDHIVRTAPWNTTRAFIAAMKGKCLLEVTGVADPTGCGEGFSYVKIPNKPTQQKDDKEPQPVKKTVTGTDADLRRLSLKNAKQLLRKFGVPEEEIKKLSRWEVIDVVRTMSTEQARSGEGPMSKFARGSRFSVAEHQERYKEECQRIFDLQNKVLSSTEVLSTDTDSSSAEDSDFEEMGKNIENMLQNKKTSSQLSREREEQERKELQRMLLAAGSAASGNNHRDDDTASVTSLNSSATGRCLKIYRTFRDEEGKEYVRCETVRKPAVIDAYVRIRTTKDEEFIRKFALFDEQHREEMRKERRRIQEQLRRLKRNQEKEKLKGPPEKKPKKMKERPDLKLKCGACGAIGHMRTNKFCPLYYQTNAPPSNPVAMTEEQEEELEKTVIHNDNEELIKVEGTKIVLGKQLIESADEVRRKSLVLKFPKQQLPPKKKRRVGTTVHCDYLNRPHKSIHRRRTDPMVTLSSILESIINDMRDLPNTYPFHTPVNAKVVKDYYKIITRPMDLQTLRENVRKRLYPSREEFREHLELIVKNSATYNGPKHSLTQISQSMLDLCDEKLKEKEDKLARLEKAINPLLDDDDQVAFSFILDNIVTQKMMAVPDSWPFHHPVNKKFVPDYYKVIVNPMDLETIRKNISKHKYQSRESFLDDVNLILANSVKYNGPESQYTKTAQEIVNVCYQTLTEYDEHLTQLEKDICTAKEAALEEAELESLDPMTPGPYTPQPPDLYDTNTSLSMSRDASVFQDESNMSVLDIPSATPEKQVTQEGEDGDGDLADEEEGTVQQPQASVLYEDLLMSEGEDDEEDAGSDEEGDNPFSAIQLSESGSDSDVGSGGIRPKQPRMLQENTRMDMENEESMMSYEGDGGEASHGLEDSNISYGSYEEPDPKSNTQDTSFSSIGGYEVSEEEEDEEEEEQRSGPSVLSQVHLSEDEEDSEDFHSIAGDSDLDSDE

SEQ ID NO: 38717 - protein, 10 aa, Artificial Sequence
  Synthetic polypeptide
IQVLFLPFNS

SEQ ID NO: 38718 - protein, 41 aa, Artificial Sequence
  Synthetic polypeptide
RQLWYSGKSHELGNGRSEFRFCFCHLIAEMWGMWCHWTHED

SEQ ID NO: 38719 - protein, 52 aa, Artificial Sequence
  Synthetic polypeptide
AGRRWLMPVLLALWEAKACGSPEVKSPRSAWPTWSDTFYVKNMAKSWKPWKS

SEQ ID NO: 38720 - protein, 39 aa, Artificial Sequence
  Synthetic polypeptide
PGAGGSCLYSWHFGRPRLADHLRSRVQDQPGQHGQTHSM

SEQ ID NO: 38721 - protein, 58 aa, Artificial Sequence
  Synthetic polypeptide
GQESKISLANMVRHILCEKHGKIMEAMEKLKSGMRFNEVAAQYSEDKARQGVCCSYYL

SEQ ID NO: 38722 - protein, 80 aa, Artificial Sequence
  Synthetic polypeptide
GQESKISLANMVRHILCEKHGKIMEAMEKLKSGMRFNEVAAQYSEDKARQGIPSLQQHAGHHRDLRSTLISLVSYLQTTP

SEQ ID NO: 38723 - protein, 103 aa, Artificial Sequence
  Synthetic polypeptide
GQESKISLANMVRHILCEKHGKIMEAMEKLKSGMRFNEVAAQYSEDKARQGGDLGWMTRGSMVGPFQEAAFALPVSGMDKPVFTDPPVKTKFGYHIIMVEGRK

SEQ ID NO: 38724 - protein, 56 aa, Artificial Sequence
  Synthetic polypeptide
GQESKISLANMVRHILCEKHGKIMEAMEKLKSGMRFNEVAAQYSEDKARQGAFRLR

SEQ ID NO: 38725 - protein, 13 aa, Artificial Sequence
  Synthetic polypeptide
TSFSSQSQAFRLR

SEQ ID NO: 38726 - protein, 55 aa, Artificial Sequence
  Synthetic polypeptide
ICLTRSDGFIRGFRFCIFLIFPLPPAMILRPPQPCGTLSPIKPLFLPSLRPSDSD

SEQ ID NO: 38727 - protein, 17 aa, Artificial Sequence
  Synthetic polypeptide
VQLNLFFFPVSGLQTPM

SEQ ID NO: 38728 - protein, 213 aa, Artificial Sequence
  Synthetic polypeptide
INNRIRVIFSPIRLDAVLFHNTIYYNLLYGNISASPEEVYAVAKLAGLHDAILRMPHGYDTQVGERGLKLSGGEKQRVAIARAILKDPPVILYDEATSSLDSITEETILGAMKDVVKHRTSIFIAHRLSTVVDADEIIVLDQGKVAERGTHHGLLANPHSIYSEMWHTQSSRVQNHDNPKWEAKKENISKEEERKKLQEEIVNSVKGCGNCSC

SEQ ID NO: 38729 - protein, 46 aa, Artificial Sequence
  Synthetic polypeptide
IKSTTGYVSFFHLSDWMLSSSIILFITTSYMETSVLHLRKCMQWQN

SEQ ID NO: 38730 - protein, 24 aa, Artificial Sequence
  Synthetic polypeptide
QYKLNQQQDTCHFFTYQIGCCPLP

SEQ ID NO: 38731 - protein, 189 aa, Artificial Sequence
  Synthetic polypeptide
INNRIRVIFSPIRLDAVLFHNTIYYNLLYGNISASPEEVYAVAKLAGLHDAILRMPHGYDTQVGERGLKLSGGEKQRVAIARAILKDPPVILYDEATSSLDSITEETILGAMKDVVKHRTSIFIAHRLSTVVDADEIIVLDQGKVAERGTHHGLLANPHSIYSEMWHTQSSRVQNHDNPKWEAKKENIS

SEQ ID NO: 38732 - protein, 518 aa, Artificial Sequence
  Synthetic polypeptide
PDIRRELISLNGKATSSSNPSSPAPDWYKDFVTDADAEVLEHSGKMVLLFEILRMAEEIGDKVLVFSQSLISLDLIEDFLELASREKTEDKDKPLIYKGEGKWLRNIDYYRLDGSTTAQSRKKWAEEFNDETNVRGRLFIISTKAGSLGINLVAANRVIIFDASWNPSYDIQSIFRVYRFGQTKPVYVYRFLAQGTMEDKIYDRQVTKQSLSFRVVDQQQVERHFTMNELTELYTFEPDLLDDPNSEKKKKRDTPMLPKDTILAELLQIHKEHIVGYHEHDSLLDHKEEEELTEEERKAAWAEYEAEKKGLTMRFNIPTGTNLPPVSFNSQTPYIPFNLGALSAMSNQQLEDLINQGREKVVEATNSVTAVRIQPLEDIISAVWKENMNLSEAQVQALALSRQASQELDVKRREAIYNDVLTKQQMLISCVQRILMNRRLQQQYNQQQQQQMTYQQATLGHLMMPKPPNLIMNPSNYQQIDMRGMYQPVAGGMQPPPLQRAPPPMRSKNPGPSQGKSM

SEQ ID NO: 38733 - protein, 29 aa, Artificial Sequence
  Synthetic polypeptide
MVKLLLLLIQAAQLQTGTKILLQMLMLRF

SEQ ID NO: 38734 - protein, 11 aa, Artificial Sequence
  Synthetic polypeptide
RHKEGTDKPKW

SEQ ID NO: 38735 - protein, 15 aa, Artificial Sequence
  Synthetic polypeptide
LDVMAHPCYPSYLRG

SEQ ID NO: 38736 - protein, 22 aa, Artificial Sequence
  Synthetic polypeptide
EAKHEFSSNFHQLSCKRETQTG

SEQ ID NO: 38737 - protein, 226 aa, Artificial Sequence
  Synthetic polypeptide
KYKNKVAGCHGASLLSQLLERLNMNSAPTFINFPAKGKPKRGDTYELQVRGFSAEQIARWIADRTDVNIRVIRPPNYAGPLMLGLLLAVIGGLVYLRRSNMEFLFNKTGWAFAALCFVLAMTSGQMWNHIRGPPYAHKNPHTGHVNYIHGSSQAQFVAETHIVLLFNGGVTLGMVLLCEAATSDMDIGKRKIMCVAGIGLVVLFFSWMLSIFRSKYHGYPYSFLMS

SEQ ID NO: 38738 - protein, 23 aa, Artificial Sequence
  Synthetic polypeptide
LASPLPSATIVNFLRPLQPCGTS

SEQ ID NO: 38739 - protein, 211 aa, Artificial Sequence
  Synthetic polypeptide
GLSSHAELAKVADKIQLINNMLDKVNEMIIGGGMAFTFLKVLNNMEIGTSLFDEEGAKIVKDLMSKAEKNGVKITLPVDFVTADKFDENAKTGQATVASGIPAGWMGLDCGPESSKKYAEAVTRAKQIVWNGPVGVFEWEAFARGTKALMDEVVKATSRGCITIIGGGDTATCCAKWNTEDKVSHVSTGGGASLELLEGKVLPGVDALSNI

SEQ ID NO: 38740 - protein, 19 aa, Artificial Sequence
  Synthetic polypeptide
LRFFLLERRPVLMLGSSMQ

SEQ ID NO: 38741 - protein, 672 aa, Artificial Sequence
  Synthetic polypeptide
SLAFFSNKAYLIKVFLVRKKTGPDAGQLYAMKVLKKASLKVRDRVRTKMERDILVEVNHPFIVKLHYAFQTEGKLYLILDFLRGGDVFTRLSKEVLFTEEDVKFYLAELALALDHLHQLGIVYRDLKPENILLDEIGHIKLTDFGLSKESVDQEKKAYSFCGTVEYMAPEVVNRRGHSQSADWWSYGVLMFEMLTGTLPFQGKDRNETMNMILKAKLGMPQFLSAEAQSLLRMLFKRNPANRLGSEGVEEIKRHLFFANIDWDKLYKREVQPPFKPASGKPDDTFCFDPEFTAKTPKDSPGLPASANAHQLFKGFSFVATSIAEEYKITPITSANVLPIVQINGNAAQFGEVYELKEDIGVGSYSVCKRCIHATTNMEFAVKIIDKSKRDPSEEIEILMRYGQHPNIITLKDVFDDGRYVYLVTDLMKGGELLDRILKQKCFSEREASDILYVISKTVDYLHCQGVVHRDLKPSNILYMDESASADSIRICDFGFAKQLRGENGLLLTPCYTANFVAPEVLMQQGYDAACDIWSLGVLFYTMLAGYTPFANGPNDTPEEILLRIGNGKFSLSGGNWDNISDGAKDLLSHMLHMDPHQRYTAEQILKHSWITHRDQLPNDQPKRNDVSHVVKGAMVATYSALTHKTFQPVLEPVAASSLAQRRSMKKRTSTGL

SEQ ID NO: 38742 - protein, 22 aa, Artificial Sequence
  Synthetic polypeptide
PYMDESTFCIYCRTTKDFTALL

SEQ ID NO: 38743 - protein, 695 aa, Artificial Sequence
  Synthetic polypeptide
SDHIWMNLRSVFTVEQQRILQRYYENGMTNQSKNCFQLILQCAQETKLDFSVVRTWVGNKRRKMSSKNSESGTATTGTSLSAPDITVRNVVNIARPSSQQSSWTSANNDVIVTGIYSPASSSSRQGTNKHTDTQITEAHKIPIQKTATKNDTEFQLHIPVQRQVAHCKNASLLLGEKTIILSRQTSVLNAGNSVFNHAKKNYGNSSVQASEMTVPQKPSVCHRPCKIEPVGIQRSYKPEHTGPALHNLCGQKPTIRDPYCRTQNLEIREVFSLAVSDYPQRILGGNAPQKPSSAEGNCLSIAMETGDAEDEYAREEELASMRAQIPSYSRFYESGSSLRAENQSTTLPGPGRNMPNSQMVNIRDMSDNVLYQNRNYHLTPRTSLHTASSTMYSNTNPLRSNFSPHFASSNQLRLSQNQNNYQISGNLTVPWITGCSRKRALQDRTQFSDRDLATLKKYWDNGMTSLGSVCREKIEAVATELNVDCEIVRTWIGNRRRKYRLMGIEVPPPRGGPADFSEQPESGSLSALTPGEEAGPEVGEDNDRNDEVSICLSEGSSQEEPNEVVPNDARAHKEEDHHAVTTDNVKIEIIDDEESDMISNSEVEQVNSFLDYKNEEVKFIENELEIQKQKYFKLQTFVRSLILAMKADDKEQQQALLSDLPPELEEMDFNHASLEPDDTSFSVSSLSEKNVSESL

SEQ ID NO: 38744 - protein, 12 aa, Artificial Sequence
  Synthetic polypeptide
GWQSEYEVTIYG

SEQ ID NO: 38745 - protein, 8 aa, Artificial Sequence
  Synthetic polypeptide
GLPSHVEL

SEQ ID NO: 38746 - protein, 369 aa, Artificial Sequence
  Synthetic polypeptide
DMAWSSLSPTMIVRPPKPCGTVIIQDDGPEKLDPRYFGELLADLSRKNTDLYHCLLEHLQRIGGSKQDFESTDESEDIESLIPKGLSEFTKQQIRYILQMRGMSDKSLRLVLSTFSNIREELGHLQNDMTSLENDKMRLEKDLSFKDTQLKEYEELLASVRANNHQQQQGLQDSSSKCQALEENNLSLRHTLSDMEYRLKELEYCKRNLEQENQNLRMQVSETCTGPMLQAKMDEIGNHYTEMVKNLRMEKDREICRLRSQLNQYHKDVSKREGSCSDFQFKLHELTSLLEEKDSLIKRQSEELSKLRQEIYSSHNQPSTGGRTTITTKKYRTQYPILGLLYDDYEYIPPGSETQTIVIEKTEDKYTCP

SEQ ID NO: 38747 - protein, 82 aa, Artificial Sequence
  Synthetic polypeptide
MIMCCGRDPVGGNCIMGTGLSHAILVIVSKSHEIWWFYKREFPRTSSLFLPAAIHVRHGLVFPISHHDCEASQAMWNCDNSG

SEQ ID NO: 38748 - protein, 375 aa, Artificial Sequence
  Synthetic polypeptide
DMAWSSLSPTMIVRPPKPCGTVIIQDDGPEKLDPRYFGELLADLSRKNTDLYHCLLEHLQRIGGSKQDFESTDESEDIESLIPKGLSEFTKQQIRYILQMRGMSDKSLRLVLSTFSNIREELGHLQNDMTSLENDKMRLEKDLSFKDTQLKEYEELLASVRANNHQQQQGLQDSSSKCQALEENNLSLRHTLSDMEYRLKELEYCKRNLEQENQNLRMQVSETCTGPMLQAKMDEIGNHYTEMVKNLRMEKDREICRLRSQLNQYHKDVSKREGSCSDFQFKLHELTSLLEEKDSLIKRQSEELSKLRQEIYSSHNQPSTGGRTTITTKKYRTQYPILGLLYDDYEYIPPGSETQTIVIEKTEDKYTCVSSLGHF

SEQ ID NO: 38749 - protein, 239 aa, Artificial Sequence
  Synthetic polypeptide
QGSTQCSPQDKSGVLPFLCERGLDHAIPHYVTMYLPLLLVLVANPILFQKTVTAVASLLKGRQGIYTENERRMGAVIKIRFFKIMLVLIICWLSNIINESLLFYLEMQTDINGGSLKPVRTAAKTTWFIMGILNPAQGFLLSLAFYGWTGCSLGFQSPRKEIQWESLTTSAAEGAHPSPLMPHENPASGKVSQVGGQTSDEALSMLSEGSDASTIEIHTASESCNKNEGDPALPTHGDL

SEQ ID NO: 38750 - protein, 51 aa, Artificial Sequence
  Synthetic polypeptide
RDQHSVALRTNPAFFRFCVSGAWTTPSPTMSPCTCPCCWFSWRTPSCSKRQ

SEQ ID NO: 38751 - protein, 12 aa, Artificial Sequence
  Synthetic polypeptide
PSGQIRRSSVFV

SEQ ID NO: 38752 - protein, 186 aa, Artificial Sequence
  Synthetic polypeptide
QGSTQCSPQDKSGVLPFLCERGLDHAIPHYVTMYLPLLLVLVANPILFQKTVTAVASLLKGRQGIYTENERRMGAVIKIRFFKIMLVLIICWLSNIINESLLFYLEMQTDINGGSLKPVRTAAKTTWFIMGILNPAQGFLLSLAFYGWTGCSLGFQSPRKEIQWESLTTSAAEGAHPSPLMPHENP

SEQ ID NO: 38753 - protein, 90 aa, Artificial Sequence
  Synthetic polypeptide
QGSTQCSPQDKSGVLPFLCERGLDHAIPHYVTMYLPLLLVLVANPILFQKTVTAVASLLKGRQGIYTENERRMGAVIKIRFFKIMLVLII

SEQ ID NO: 38754 - protein, 725 aa, Artificial Sequence
  Synthetic polypeptide
RNLLCRKLQILYVATVPLRRWSIAPPLPAQCGLPTVSSLQRVQCGKGDRGEEHHSGETGVYQLHQAIRANVDRQADAQCREGSPGSQQHPPSQKAPNPPTFSELSHCRGAPELPREGRGRAGTLPRDYRYSEESTPADLGPRAQSPGSPLHARGQDSWPVSSALLSKRPAPQRPPPPKREPRRYRATDGAPADAPVGVLGRPFPTPSPASLDVYVARLSLSHSPSVFSSAQPQDTPKATVCERGSQHVSGDASRPLPEALLPPKQQHLRLQTATMETSRSPSPQFAPQKLTDKPPLLIQDEDSTRIERVMDNNTTVKMVPIKIVHSESQPEKESRQSLACPAEPPALPHGLEKDQIKTLSTSEQFYSRFCLYTRQGAEPEAPHRAQPAEPQPLGTQVPPEKDRCTSPPGLSYMKAKEKTVEDLKSEELAREIVGKDKSLADILDPSVKIKTTMDLMEGIFPKDEHLLEEAQQRRKLLPKIPSPRSTEERKEEPSVPAAVSLATNSTYYSTSAPKAELLIKMKDLQEQQEHEEDSGSDLDHDLSVKKQELIESISRKLQVLREARESLLEDVQANTVLGAEVEAIVKGVCKPSEFDKFRMFIGDLDKVVNLLLSLSGRLARVENALNNLDDGASPGDRQSLLEKQRVLIQQHEDAKELKENLDRRERIVFDILANYLSEESLADYEHFVKMKSALIIEQRELEDKIHLGEEQLKCLLDSLQPERGK

SEQ ID NO: 38755 - protein, 123 aa, Artificial Sequence
  Synthetic polypeptide
APSKEYSVAKGTEERNITVEKLVYTNFTRRSGPTLTDKQMPSVGKAAQDHSSTHRVRRHRTHPHSLNYLTAGEPQSCPGRAGAEREPYLEIIDTRRRAPQQTWDPEPRALAHPCMLEDKTRGQ

SEQ ID NO: 38756 - protein, 30 aa, Artificial Sequence
  Synthetic polypeptide
QTSRCPVSGRQPRITAAPTESEGTEPTHIL

SEQ ID NO: 38757 - protein, 18 aa, Artificial Sequence
  Synthetic polypeptide
ELHNLPTKKIYKPTYMDQ

SEQ ID NO: 38758 - protein, 64 aa, Artificial Sequence
  Synthetic polypeptide
NFIIFPPKKSTNLPIWISNGEVVDWMDSTGEEVSLWQKMRQYPGSWAEGTLQLRSSMAKQKLGL

SEQ ID NO: 38759 - protein, 29 aa, Artificial Sequence
  Synthetic polypeptide
SSHQKNLQTYLYGSVMGKWWTGWTRLGKK

SEQ ID NO: 38760 - protein, 9 aa, Artificial Sequence
  Synthetic polypeptide
RLLHLESFL

SEQ ID NO: 38761 - protein, 9 aa, Artificial Sequence
  Synthetic polypeptide
TLMNLVQVL

SEQ ID NO: 38762 - protein, 9 aa, Artificial Sequence
  Synthetic polypeptide
ILHSLVTGV

SEQ ID NO: 38763 - protein, 9 aa, Artificial Sequence
  Synthetic polypeptide
FMMEQVGLA

SEQ ID NO: 38764 - protein, 9 aa, Artificial Sequence
  Synthetic polypeptide
AMDGKELSL

SEQ ID NO: 38765 - protein, 9 aa, Artificial Sequence
  Synthetic polypeptide
TLAYGKYYI

SEQ ID NO: 38766 - protein, 9 aa, Artificial Sequence
  Synthetic polypeptide
GLIQLIWLA

SEQ ID NO: 38767 - protein, 9 aa, Artificial Sequence
  Synthetic polypeptide
GMVDGGSNI

SEQ ID NO: 38768 - protein, 9 aa, Artificial Sequence
  Synthetic polypeptide
YLWTTFFPL

SEQ ID NO: 38769 - protein, 9 aa, Artificial Sequence
  Synthetic polypeptide
ALWEAKMII

SEQ ID NO: 38770 - protein, 9 aa, Artificial Sequence
  Synthetic polypeptide
WLSSRVTQL

SEQ ID NO: 38771 - protein, 9 aa, Artificial Sequence
  Synthetic polypeptide
AILPKANTV

SEQ ID NO: 38772 - protein, 9 aa, Artificial Sequence
  Synthetic polypeptide
VLLFEVELV

SEQ ID NO: 38773 - protein, 9 aa, Artificial Sequence
  Synthetic polypeptide
GLDTGLQGM

SEQ ID NO: 38774 - protein, 9 aa, Artificial Sequence
  Synthetic polypeptide
SLLDGTQLF

SEQ ID NO: 38775 - protein, 9 aa, Artificial Sequence
  Synthetic polypeptide
GLPTGYLFV

SEQ ID NO: 38776 - protein, 9 aa, Artificial Sequence
  Synthetic polypeptide
LLDRFGYHV

SEQ ID NO: 38777 - protein, 9 aa, Artificial Sequence
  Synthetic polypeptide
SLLEETQAI

SEQ ID NO: 38778 - protein, 9 aa, Artificial Sequence
  Synthetic polypeptide
MLLVQPAEL

SEQ ID NO: 38779 - protein, 9 aa, Artificial Sequence
  Synthetic polypeptide
GLLNISHTA

SEQ ID NO: 38780 - protein, 9 aa, Artificial Sequence
  Synthetic polypeptide
HLYEPWFPV

SEQ ID NO: 38781 - protein, 9 aa, Artificial Sequence
  Synthetic polypeptide
YLQGLPLPL

SEQ ID NO: 38782 - protein, 9 aa, Artificial Sequence
  Synthetic polypeptide
KAVEGILAV

SEQ ID NO: 38783 - protein, 9 aa, Artificial Sequence
  Synthetic polypeptide
MIYEENNRL

SEQ ID NO: 38784 - protein, 9 aa, Artificial Sequence
  Synthetic polypeptide
YLPYFLKSL

SEQ ID NO: 38785 - protein, 9 aa, Artificial Sequence
  Synthetic polypeptide
GLYSLSSVV

SEQ ID NO: 38786 - protein, 9 aa, Artificial Sequence
  Synthetic polypeptide
LMISRTPEV

SEQ ID NO: 38787 - protein, 9 aa, Artificial Sequence
  Synthetic polypeptide
LLGGPSVFL

SEQ ID NO: 38788 - protein, 9 aa, Artificial Sequence
  Synthetic polypeptide
ILSGYGPCV

SEQ ID NO: 38789 - protein, 9 aa, Artificial Sequence
  Synthetic polypeptide
FLPDLDRPL

SEQ ID NO: 38790 - protein, 9 aa, Artificial Sequence
  Synthetic polypeptide
AMDGKELSL

SEQ ID NO: 38791 - protein, 9 aa, Artificial Sequence
  Synthetic polypeptide
RMDFEDLGL

SEQ ID NO: 38792 - protein, 9 aa, Artificial Sequence
  Synthetic polypeptide
TLIFNPTEI

SEQ ID NO: 38793 - protein, 9 aa, Artificial Sequence
  Synthetic polypeptide
LLPGLLLLL

SEQ ID NO: 38794 - protein, 9 aa, Artificial Sequence
  Synthetic polypeptide
LLLVHQHAV

SEQ ID NO: 38795 - protein, 9 aa, Artificial Sequence
  Synthetic polypeptide
FLDDAPPGT

SEQ ID NO: 38796 - protein, 9 aa, Artificial Sequence
  Synthetic polypeptide
VLIRYVWTL

SEQ ID NO: 38797 - protein, 9 aa, Artificial Sequence
  Synthetic polypeptide
YLCGHLHTL

SEQ ID NO: 38798 - protein, 9 aa, Artificial Sequence
  Synthetic polypeptide
VLSQLTILI

SEQ ID NO: 38799 - protein, 9 aa, Artificial Sequence
  Synthetic polypeptide
TLGGLMPVL

SEQ ID NO: 38800 - protein, 9 aa, Artificial Sequence
  Synthetic polypeptide
FLQGSITFI

SEQ ID NO: 38801 - protein, 9 aa, Artificial Sequence
  Synthetic polypeptide
MLLLYIWQV

SEQ ID NO: 38802 - protein, 9 aa, Artificial Sequence
  Synthetic polypeptide
YLKIMPVHL

SEQ ID NO: 38803 - protein, 9 aa, Artificial Sequence
  Synthetic polypeptide
HTLGGLMPV

SEQ ID NO: 38804 - protein, 9 aa, Artificial Sequence
  Synthetic polypeptide
YIMARVLFV

SEQ ID NO: 38805 - protein, 9 aa, Artificial Sequence
  Synthetic polypeptide
FILRTDHYI

SEQ ID NO: 38806 - protein, 9 aa, Artificial Sequence
  Synthetic polypeptide
IMSSAIAYL

SEQ ID NO: 38807 - protein, 9 aa, Artificial Sequence
  Synthetic polypeptide
FIIGILQLA

SEQ ID NO: 38808 - protein, 9 aa, Artificial Sequence
  Synthetic polypeptide
YLLQEIYGI

SEQ ID NO: 38809 - protein, 9 aa, Artificial Sequence
  Synthetic polypeptide
GVFPVVIQA

SEQ ID NO: 38810 - protein, 9 aa, Artificial Sequence
  Synthetic polypeptide
ALVHLPSQL

SEQ ID NO: 38811 - protein, 9 aa, Artificial Sequence
  Synthetic polypeptide
GLHPAKPQV

SEQ ID NO: 38812 - protein, 9 aa, Artificial Sequence
  Synthetic polypeptide
MLVTWELAL

SEQ ID NO: 38813 - protein, 9 aa, Artificial Sequence
  Synthetic polypeptide
VLLTNTIWL

SEQ ID NO: 38814 - protein, 9 aa, Artificial Sequence
  Synthetic polypeptide
ALVHLPSQL

SEQ ID NO: 38815 - protein, 9 aa, Artificial Sequence
  Synthetic polypeptide
CLIDEMPEA

SEQ ID NO: 38816 - protein, 9 aa, Artificial Sequence
  Synthetic polypeptide
ALMGGFMKT

SEQ ID NO: 38817 - protein, 9 aa, Artificial Sequence
  Synthetic polypeptide
  misc_feature (8)..(8): Xaa can be any naturally occurring amino acid
LLLHLPLXL

SEQ ID NO: 38818 - protein, 9 aa, Artificial Sequence
  Synthetic polypeptide
TLQDKNLGL

SEQ ID NO: 38819 - protein, 9 aa, Artificial Sequence
  Synthetic polypeptide
ILANLPPAL

SEQ ID NO: 38820 - protein, 9 aa, Artificial Sequence
  Synthetic polypeptide
PLWDGMAGL

SEQ ID NO: 38821 - protein, 9 aa, Artificial Sequence
  Synthetic polypeptide
GLDHQTHPL

SEQ ID NO: 38822 - protein, 9 aa, Artificial Sequence
  Synthetic polypeptide
GMFLLPPQL

SEQ ID NO: 38823 - protein, 9 aa, Artificial Sequence
  Synthetic polypeptide
RLADHLSFC

SEQ ID NO: 38824 - protein, 9 aa, Artificial Sequence
  Synthetic polypeptide
RMRDQLPAL

SEQ ID NO: 38825 - protein, 9 aa, Artificial Sequence
  Synthetic polypeptide
GLLHAEVAL

SEQ ID NO: 38826 - protein, 9 aa, Artificial Sequence
  Synthetic polypeptide
SLQNCQVSV

SEQ ID NO: 38827 - protein, 9 aa, Artificial Sequence
  Synthetic polypeptide
VISAFPSEV

SEQ ID NO: 38828 - protein, 9 aa, Artificial Sequence
  Synthetic polypeptide
ALAIAALEL

SEQ ID NO: 38829 - protein, 9 aa, Artificial Sequence
  Synthetic polypeptide
VLDGLDVLL

SEQ ID NO: 38830 - protein, 9 aa, Artificial Sequence
  Synthetic polypeptide
ELFPPLFMA

SEQ ID NO: 38831 - protein, 9 aa, Artificial Sequence
  Synthetic polypeptide
FLIVAEILI

SEQ ID NO: 38832 - protein, 9 aa, Artificial Sequence
  Synthetic polypeptide
IVAEILISL

SEQ ID NO: 38833 - protein, 9 aa, Artificial Sequence
  Synthetic polypeptide
KAVEGILAV

SEQ ID NO: 38834 - protein, 9 aa, Artificial Sequence
  Synthetic polypeptide
YLPHLPQVL

SEQ ID NO: 38835 - protein, 9 aa, Artificial Sequence
  Synthetic polypeptide
MLLDPMGGI

SEQ ID NO: 38836 - protein, 9 aa, Artificial Sequence
  Synthetic polypeptide
RLLHLESFL

SEQ ID NO: 38837 - protein, 9 aa, Artificial Sequence
  Synthetic polypeptide
YLAYILYFV

SEQ ID NO: 38838 - protein, 9 aa, Artificial Sequence
  Synthetic polypeptide
LMTSSIMSV

SEQ ID NO: 38839 - protein, 9 aa, Artificial Sequence
  Synthetic polypeptide
MLMKTVWQA

SEQ ID NO: 38840 - protein, 9 aa, Artificial Sequence
  Synthetic polypeptide
SLQPEDMAL

SEQ ID NO: 38841 - protein, 9 aa, Artificial Sequence
  Synthetic polypeptide
KILTYFPMV

SEQ ID NO: 38842 - protein, 9 aa, Artificial Sequence
  Synthetic polypeptide
FLGTRVTRV

SEQ ID NO: 38843 - protein, 9 aa, Artificial Sequence
  Synthetic polypeptide
SLMQSGSPV

SEQ ID NO: 38844 - protein, 9 aa, Artificial Sequence
  Synthetic polypeptide
VLMWTMAHL

SEQ ID NO: 38845 - protein, 9 aa, Artificial Sequence
  Synthetic polypeptide
LLGETKVYV

SEQ ID NO: 38846 - protein, 9 aa, Artificial Sequence
  Synthetic polypeptide
KILTYFPMV

SEQ ID NO: 38847 - protein, 9 aa, Artificial Sequence
  Synthetic polypeptide
SLLERGLEA

SEQ ID NO: 38848 - protein, 9 aa, Artificial Sequence
  Synthetic polypeptide
VLSSLNVPL

SEQ ID NO: 38849 - protein, 9 aa, Artificial Sequence
  Synthetic polypeptide
FLERKSIRV

SEQ ID NO: 38850 - protein, 9 aa, Artificial Sequence
  Synthetic polypeptide
FVGSSTFYL

SEQ ID NO: 38851 - protein, 9 aa, Artificial Sequence
  Synthetic polypeptide
FLYTGDFFL

SEQ ID NO: 38852 - protein, 9 aa, Artificial Sequence
  Synthetic polypeptide
SVGPFALTV

SEQ ID NO: 38853 - protein, 9 aa, Artificial Sequence
  Synthetic polypeptide
NLALPLPKV

SEQ ID NO: 38854 - protein, 9 aa, Artificial Sequence
  Synthetic polypeptide
VLESGLYQV

SEQ ID NO: 38855 - protein, 9 aa, Artificial Sequence
  Synthetic polypeptide
MLVAITVLI

SEQ ID NO: 38856 - protein, 9 aa, Artificial Sequence
  Synthetic polypeptide
FMDDAKILF

SEQ ID NO: 38857 - protein, 9 aa, Artificial Sequence
  Synthetic polypeptide
ALVHLPSQL

SEQ ID NO: 38858 - protein, 9 aa, Artificial Sequence
  Synthetic polypeptide
ILTASITSI

SEQ ID NO: 38859 - protein, 9 aa, Artificial Sequence
  Synthetic polypeptide
AMDGKELSL

SEQ ID NO: 38860 - protein, 9 aa, Artificial Sequence
  Synthetic polypeptide
SLGWNISGV

SEQ ID NO: 38861 - protein, 9 aa, Artificial Sequence
  Synthetic polypeptide
MISAFPNEV

SEQ ID NO: 38862 - protein, 9 aa, Artificial Sequence
  Synthetic polypeptide
RLTHELPGI

SEQ ID NO: 38863 - protein, 9 aa, Artificial Sequence
  Synthetic polypeptide
LLFSDGEKV

SEQ ID NO: 38864 - protein, 9 aa, Artificial Sequence
  Synthetic polypeptide
RLNESTTFV

SEQ ID NO: 38865 - protein, 9 aa, Artificial Sequence
  Synthetic polypeptide
KLEELKSFV

SEQ ID NO: 38866 - protein, 9 aa, Artificial Sequence
  Synthetic polypeptide
SINEEIQTV

SEQ ID NO: 38867 - protein, 9 aa, Artificial Sequence
  Synthetic polypeptide
RLHDGPLRA

SEQ ID NO: 38868 - protein, 9 aa, Artificial Sequence
  Synthetic polypeptide
MISAFPNEV

SEQ ID NO: 38869 - protein, 9 aa, Artificial Sequence
  Synthetic polypeptide
ILHTSVPFL

SEQ ID NO: 38870 - protein, 9 aa, Artificial Sequence
  Synthetic polypeptide
YLENMVSGV

SEQ ID NO: 38871 - protein, 9 aa, Artificial Sequence
  Synthetic polypeptide
QLLGRLESL

SEQ ID NO: 38872 - protein, 9 aa, Artificial Sequence
  Synthetic polypeptide
RLLHLESFL

SEQ ID NO: 38873 - protein, 9 aa, Artificial Sequence
  Synthetic polypeptide
ALLRQMEGI

SEQ ID NO: 38874 - protein, 9 aa, Artificial Sequence
  Synthetic polypeptide
TLNKDFQEV

SEQ ID NO: 38875 - protein, 9 aa, Artificial Sequence
  Synthetic polypeptide
IMEQGDLSV

SEQ ID NO: 38876 - protein, 9 aa, Artificial Sequence
  Synthetic polypeptide
RLLHLESFL

SEQ ID NO: 38877 - protein, 9 aa, Artificial Sequence
  Synthetic polypeptide
RQAPGFHHA

SEQ ID NO: 38878 - protein, 9 aa, Artificial Sequence
  Synthetic polypeptide
GLPSHVELA

SEQ ID NO: 38879 - protein, 9 aa, Artificial Sequence
  Synthetic polypeptide
LLTSWHLYL

SEQ ID NO: 38880 - protein, 9 aa, Artificial Sequence
  Synthetic polypeptide
ILPKANTVV

SEQ ID NO: 38881 - protein, 9 aa, Artificial Sequence
  Synthetic polypeptide
ELLGQTPCV

SEQ ID NO: 38882 - protein, 9 aa, Artificial Sequence
  Synthetic polypeptide
LLTSWHLYL

SEQ ID NO: 38883 - protein, 10 aa, Artificial Sequence
  Synthetic polypeptide
ALLSMTDPLK

SEQ ID NO: 38884 - protein, 10 aa, Artificial Sequence
  Synthetic polypeptide
AVMTEVVLSK

SEQ ID NO: 38885 - protein, 9 aa, Artificial Sequence
  Synthetic polypeptide
DIFQQQISR

SEQ ID NO: 38886 - protein, 8 aa, Artificial Sequence
  Synthetic polypeptide
DLLQNNTR

SEQ ID NO: 38887 - protein, 10 aa, Artificial Sequence
  Synthetic polypeptide
GAALLDLHAL

SEQ ID NO: 38888 - protein, 10 aa, Artificial Sequence
  Synthetic polypeptide
GGGYNDFGNY

SEQ ID NO: 38889 - protein, 12 aa, Artificial Sequence
  Synthetic polypeptide
GSGKRTSSQLKP

SEQ ID NO: 38890 - protein, 9 aa, Artificial Sequence
  Synthetic polypeptide
ILQLTTVNR

SEQ ID NO: 38891 - protein, 10 aa, Artificial Sequence
  Synthetic polypeptide
ITSWFVPRPW

SEQ ID NO: 38892 - protein, 10 aa, Artificial Sequence
  Synthetic polypeptide
MRATKPTVQK

SEQ ID NO: 38893 - protein, 9 aa, Artificial Sequence
  Synthetic polypeptide
NELDKFIVF

SEQ ID NO: 38894 - protein, 12 aa, Artificial Sequence
  Synthetic polypeptide
NPQFLISMILQR

SEQ ID NO: 38895 - protein, 9 aa, Artificial Sequence
  Synthetic polypeptide
QISGVPSRF

SEQ ID NO: 38896 - protein, 9 aa, Artificial Sequence
  Synthetic polypeptide
RATKPTVQK

SEQ ID NO: 38897 - protein, 9 aa, Artificial Sequence
  Synthetic polypeptide
RLNTNMKYK

SEQ ID NO: 38898 - protein, 9 aa, Artificial Sequence
  Synthetic polypeptide
RRQQLITRF

SEQ ID NO: 38899 - protein, 9 aa, Artificial Sequence
  Synthetic polypeptide
RTQPSWKEK

SEQ ID NO: 38900 - protein, 9 aa, Artificial Sequence
  Synthetic polypeptide
SAAAGIVGR

SEQ ID NO: 38901 - protein, 8 aa, Artificial Sequence
  Synthetic polypeptide
SGFTFRSY

SEQ ID NO: 38902 - protein, 9 aa, Artificial Sequence
  Synthetic polypeptide
TEATVDTSF

SEQ ID NO: 38903 - protein, 9 aa, Artificial Sequence
  Synthetic polypeptide
TLISKAGIL

SEQ ID NO: 38904 - protein, 9 aa, Artificial Sequence
  Synthetic polypeptide
TVVQLQENR

SEQ ID NO: 38905 - protein, 10 aa, Artificial Sequence
  Synthetic polypeptide
VWMRSPLSTF

SEQ ID NO: 38906 - protein, 9 aa, Artificial Sequence
  Synthetic polypeptide
SLASVQRFL

SEQ ID NO: 38907 - protein, 9 aa, Artificial Sequence
  Synthetic polypeptide
YLQGELQQC

SEQ ID NO: 38908 - protein, 13 aa, Artificial Sequence
  Synthetic polypeptide
CAVLLDNTDKLIF

SEQ ID NO: 38909 - protein, 14 aa, Artificial Sequence
  Synthetic polypeptide
CAVNTRGTASKLTF

SEQ ID NO: 38910 - protein, 11 aa, Artificial Sequence
  Synthetic polypeptide
CAVFTGNQFYF

SEQ ID NO: 38911 - protein, 13 aa, Artificial Sequence
  Synthetic polypeptide
CAGQLAGAQKLVF

SEQ ID NO: 38912 - protein, 14 aa, Artificial Sequence
  Synthetic polypeptide
CASSRLQGALELFF

SEQ ID NO: 38913 - protein, 14 aa, Artificial Sequence
  Synthetic polypeptide
CASSLGGGTDTQYF

SEQ ID NO: 38914 - protein, 13 aa, Artificial Sequence
  Synthetic polypeptide
CASLSGESYEQYF

SEQ ID NO: 38915 - protein, 15 aa, Artificial Sequence
  Synthetic polypeptide
CASSPSRDGQETQYF

SEQ ID NO: 38916 - protein, 9 aa, Artificial Sequence
  Synthetic polypeptide
SSTGPADLK

SEQ ID NO: 38917 - protein, 8 aa, Artificial Sequence
  Synthetic polypeptide
MLLGLLAK

SEQ ID NO: 38918 - protein, 7 aa, Artificial Sequence
  Synthetic polypeptide
MGISIVK

SEQ ID NO: 38919 - protein, 14 aa, Artificial Sequence
  Synthetic polypeptide
IQSFTNISFSMPHR

SEQ ID NO: 38920 - protein, 10 aa, Artificial Sequence
  Synthetic polypeptide
TQEVEVAVNR

SEQ ID NO: 38921 - protein, 9 aa, Artificial Sequence
  Synthetic polypeptide
MASASPTIK

SEQ ID NO: 38922 - protein, 16 aa, Artificial Sequence
  Synthetic polypeptide
ETDLITVTGSSFLTHR

SEQ ID NO: 38923 - protein, 10 aa, Artificial Sequence
  Synthetic polypeptide
EAENEVQTAK

SEQ ID NO: 38924 - protein, 23 aa, Artificial Sequence
  Synthetic polypeptide
LNIHLLMVTSSVTSSSILINLDR

SEQ ID NO: 38925 - protein, 22 aa, Artificial Sequence
  Synthetic polypeptide
DLELEIPFGPAIPLLGSCSQCR

SEQ ID NO: 38926 - protein, 16 aa, Artificial Sequence
  Synthetic polypeptide
MILESTYHNTLHIAMK

SEQ ID NO: 38927 - protein, 16 aa, Artificial Sequence
  Synthetic polypeptide
MLAPENSDIGLAAWGR

SEQ ID NO: 38928 - protein, 13 aa, Artificial Sequence
  Synthetic polypeptide
TQEAELAGVATVR

SEQ ID NO: 38929 - protein, 13 aa, Artificial Sequence
  Synthetic polypeptide
TSLHSIPVTVGRR

SEQ ID NO: 38930 - protein, 13 aa, Artificial Sequence
  Synthetic polypeptide
AEIAPLHSSLGDK

SEQ ID NO: 38931 - protein, 15 aa, Artificial Sequence
  Synthetic polypeptide
MLGAVAHNCDPSTLR

SEQ ID NO: 38932 - protein, 10 aa, Artificial Sequence
  Synthetic polypeptide
GPAPEPPSMR

SEQ ID NO: 38933 - protein, 12 aa, Artificial Sequence
  Synthetic polypeptide
MACNMGLEKGEK

SEQ ID NO: 38934 - protein, 9 aa, Artificial Sequence
  Synthetic polypeptide
MASICPFLK

SEQ ID NO: 38935 - protein, 12 aa, Artificial Sequence
  Synthetic polypeptide
EIETILANPENK

SEQ ID NO: 38936 - protein, 19 aa, Artificial Sequence
  Synthetic polypeptide
QAQCSTDSTLWYFMHGVCR

SEQ ID NO: 38937 - protein, 15 aa, Artificial Sequence
  Synthetic polypeptide
LASTTSVSEEDVSSR

SEQ ID NO: 38938 - protein, 10 aa, Artificial Sequence
  Synthetic polypeptide
AIAQGIQELR

SEQ ID NO: 38939 - protein, 12 aa, Artificial Sequence
  Synthetic polypeptide
TCPSAMIVSFLK

SEQ ID NO: 38940 - protein, 16 aa, Artificial Sequence
  Synthetic polypeptide
VQLAGNTLPSTPCWTR

SEQ ID NO: 38941 - protein, 24 aa, Artificial Sequence
  Synthetic polypeptide
GLEFETSLANVVQLPNSIVFSVTR

SEQ ID NO: 38942 - protein, 11 aa, Artificial Sequence
  Synthetic polypeptide
KESLEASMMLK

SEQ ID NO: 38943 - protein, 13 aa, Artificial Sequence
  Synthetic polypeptide
VETLCATLWGFGK

SEQ ID NO: 38944 - protein, 13 aa, Artificial Sequence
  Synthetic polypeptide
MMAHLCIFGLQSR

SEQ ID NO: 38945 - protein, 12 aa, Artificial Sequence
  Synthetic polypeptide
VSTSHVGPWVSP

SEQ ID NO: 38946 - protein, 16 aa, Artificial Sequence
  Synthetic polypeptide
NLLDIDAPVTGWQELK

SEQ ID NO: 38947 - protein, 14 aa, Artificial Sequence
  Synthetic polypeptide
AKIAPAEGPDVSER

SEQ ID NO: 38948 - protein, 16 aa, Artificial Sequence
  Synthetic polypeptide
EAEEPSDNGPLFTELK

SEQ ID NO: 38949 - protein, 10 aa, Artificial Sequence
  Synthetic polypeptide
MAGLVFQWLR

SEQ ID NO: 38950 - protein, 14 aa, Artificial Sequence
  Synthetic polypeptide
ISQLQIWDTAGQER

SEQ ID NO: 38951 - protein, 15 aa, Artificial Sequence
  Synthetic polypeptide
VISAFPSELQSQCTK

SEQ ID NO: 38952 - protein, 14 aa, Artificial Sequence
  Synthetic polypeptide
TAQLPEQLMTWHSR

SEQ ID NO: 38953 - protein, 15 aa, Artificial Sequence
  Synthetic polypeptide
LLNITAGLGSDGTIR

SEQ ID NO: 38954 - protein, 16 aa, Artificial Sequence
  Synthetic polypeptide
MGTVAHAYNPSTLGGR

SEQ ID NO: 38955 - protein, 17 aa, Artificial Sequence
  Synthetic polypeptide
MLPPFVLAVTMGLSVVK

SEQ ID NO: 38956 - protein, 19 aa, Artificial Sequence
  Synthetic polypeptide
QADHLMPGVQDQPNMTSVP

SEQ ID NO: 38957 - protein, 13 aa, Artificial Sequence
  Synthetic polypeptide
WAGHSASCSSLRK

SEQ ID NO: 38958 - protein, 16 aa, Artificial Sequence
  Synthetic polypeptide
TFMMIHCHLMNNMSCR

SEQ ID NO: 38959 - protein, 18 aa, Artificial Sequence
  Synthetic polypeptide
GQIGILLWNSMGTMQQPR

SEQ ID NO: 38960 - protein, 12 aa, Artificial Sequence
  Synthetic polypeptide
APTDSTLCTLCK

SEQ ID NO: 38961 - protein, 13 aa, Artificial Sequence
  Synthetic polypeptide
LREPIDNLTPEER

SEQ ID NO: 38962 - protein, 22 aa, Artificial Sequence
  Synthetic polypeptide
EWSGIQKATLMDLQLSDSNFRR

SEQ ID NO: 38963 - protein, 13 aa, Artificial Sequence
  Synthetic polypeptide
TSLANMVVFPLMK

SEQ ID NO: 38964 - protein, 17 aa, Artificial Sequence
  Synthetic polypeptide
IWLTEDATALLQRPGWR

SEQ ID NO: 38965 - protein, 20 aa, Artificial Sequence
  Synthetic polypeptide
METGIISLLPPWGGRPSAVR

SEQ ID NO: 38966 - protein, 11 aa, Artificial Sequence
  Synthetic polypeptide
GNLLIISLDAK

SEQ ID NO: 38967 - protein, 15 aa, Artificial Sequence
  Synthetic polypeptide
TSSGLPLILHCVYAK

SEQ ID NO: 38968 - protein, 17 aa, Artificial Sequence
  Synthetic polypeptide
SGVQDQPGQQGPVTLHK

SEQ ID NO: 38969 - protein, 10 aa, Artificial Sequence
  Synthetic polypeptide
WADHLTSGVR

SEQ ID NO: 38970 - protein, 21 aa, Artificial Sequence
  Synthetic polypeptide
MNDSCIFRPETDSDIMELTDR

SEQ ID NO: 38971 - protein, 7 aa, Artificial Sequence
  Synthetic polypeptide
IVEQTLK

SEQ ID NO: 38972 - protein, 10 aa, Artificial Sequence
  Synthetic polypeptide
MELTIPGEGK

SEQ ID NO: 38973 - protein, 9 aa, Artificial Sequence
  Synthetic polypeptide
HFIAMMYFK

SEQ ID NO: 38974 - protein, 13 aa, Artificial Sequence
  Synthetic polypeptide
ETFFLQQQGNDAK

SEQ ID NO: 38975 - protein, 20 aa, Artificial Sequence
  Synthetic polypeptide
QLQVCVLQIMGSCVPSCPTP

SEQ ID NO: 38976 - protein, 16 aa, Artificial Sequence
  Synthetic polypeptide
EAEASQAAQEAEINAR

SEQ ID NO: 38977 - protein, 13 aa, Artificial Sequence
  Synthetic polypeptide
YSNVLEMAWLQYA

SEQ ID NO: 38978 - protein, 28 aa, Artificial Sequence
  Synthetic polypeptide
MATVAHTSLATVEDFQIRPHTLYVHSYK

SEQ ID NO: 38979 - protein, 16 aa, Artificial Sequence
  Synthetic polypeptide
LPIFFFGTHETLLGGR

SEQ ID NO: 38980 - protein, 19 aa, Artificial Sequence
  Synthetic polypeptide
QASRALPPCPWNTQTSGSR

SEQ ID NO: 38981 - protein, 12 aa, Artificial Sequence
  Synthetic polypeptide
LDIGFPSLQNYR

SEQ ID NO: 38982 - protein, 9 aa, Artificial Sequence
  Synthetic polypeptide
TLPSLDDLR

SEQ ID NO: 38983 - protein, 11 aa, Artificial Sequence
  Synthetic polypeptide
LLVNDPETAVK

SEQ ID NO: 38984 - protein, 12 aa, Artificial Sequence
  Synthetic polypeptide
LQEMGPLGVPQR

SEQ ID NO: 38985 - protein, 10 aa, Artificial Sequence
  Synthetic polypeptide
TSLANMDMFK

SEQ ID NO: 38986 - protein, 16 aa, Artificial Sequence
  Synthetic polypeptide
MGAVVHACKPSTLGGR

SEQ ID NO: 38987 - protein, 14 aa, Artificial Sequence
  Synthetic polypeptide
KQAQKDCPTHSGVS

SEQ ID NO: 38988 - protein, 12 aa, Artificial Sequence
  Synthetic polypeptide
SEGIRIMEMLLK

SEQ ID NO: 38989 - protein, 12 aa, Artificial Sequence
  Synthetic polypeptide
GFGPSTMLGTQK

SEQ ID NO: 38990 - protein, 9 aa, Artificial Sequence
  Synthetic polypeptide
MTKLLSPIR

SEQ ID NO: 38991 - protein, 14 aa, Artificial Sequence
  Synthetic polypeptide
WLTPVIPALWEAER

SEQ ID NO: 38992 - protein, 7 aa, Artificial Sequence
  Synthetic polypeptide
ETTLAFK

SEQ ID NO: 38993 - protein, 8 aa, Artificial Sequence
  Synthetic polypeptide
ATALQPGR

SEQ ID NO: 38994 - protein, 13 aa, Artificial Sequence
  Synthetic polypeptide
ITSVVMVDEAHER

SEQ ID NO: 38995 - protein, 13 aa, Artificial Sequence
  Synthetic polypeptide
SQYCTPALEAETK

SEQ ID NO: 38996 - protein, 11 aa, Artificial Sequence
  Synthetic polypeptide
TLTFLGPLQFR

SEQ ID NO: 38997 - protein, 12 aa, Artificial Sequence
  Synthetic polypeptide
TPEVEATVPLQK

SEQ ID NO: 38998 - protein, 12 aa, Artificial Sequence
  Synthetic polypeptide
VILIFFPECYAK

SEQ ID NO: 38999 - protein, 21 aa, Artificial Sequence
  Synthetic polypeptide
DGDHPSQHDGVLLCCPGWSTM

SEQ ID NO: 39000 - protein, 14 aa, Artificial Sequence
  Synthetic polypeptide
GGSHLQSQHFGRPR

SEQ ID NO: 39001 - protein, 11 aa, Artificial Sequence
  Synthetic polypeptide
SVSTIFLTCSR

SEQ ID NO: 39002 - protein, 15 aa, Artificial Sequence
  Synthetic polypeptide
MGTVAHACNPCTLGG

SEQ ID NO: 39003 - protein, 14 aa, Artificial Sequence
  Synthetic polypeptide
TPGRNGHLESGHLK

SEQ ID NO: 39004 - protein, 12 aa, Artificial Sequence
  Synthetic polypeptide
SGFSFLLGIVGF

SEQ ID NO: 39005 - protein, 18 aa, Artificial Sequence
  Synthetic polypeptide
EIETLHHPSTGVILADHK

SEQ ID NO: 39006 - protein, 17 aa, Artificial Sequence
  Synthetic polypeptide
TIAQMIDSTVALPLEAT

SEQ ID NO: 39007 - protein, 15 aa, Artificial Sequence
  Synthetic polypeptide
NQSQSHLNVGLLASR

SEQ ID NO: 39008 - protein, 16 aa, Artificial Sequence
  Synthetic polypeptide
SVERFLQEDQMFHQEK

SEQ ID NO: 39009 - protein, 19 aa, Artificial Sequence
  Synthetic polypeptide
MELTIPGVGHSSGSLNEGK

SEQ ID NO: 39010 - protein, 10 aa, Artificial Sequence
  Synthetic polypeptide
ESLEASMMLK

SEQ ID NO: 39011 - protein, 14 aa, Artificial Sequence
  Synthetic polypeptide
LLITAEDQSMWIQS

SEQ ID NO: 39012 - protein, 16 aa, Artificial Sequence
  Synthetic polypeptide
QAWWIMPIIPALWEAK

SEQ ID NO: 39013 - protein, 12 aa, Artificial Sequence
  Synthetic polypeptide
MESQMVEQLCSR

SEQ ID NO: 39014 - protein, 10 aa, Artificial Sequence
  Synthetic polypeptide
GLTGEFSITR

SEQ ID NO: 39015 - protein, 12 aa, Artificial Sequence
  Synthetic polypeptide
GGEFAPSWDCKP

SEQ ID NO: 39016 - protein, 10 aa, Artificial Sequence
  Synthetic polypeptide
CLTTLFGSFR

SEQ ID NO: 39017 - protein, 18 aa, Artificial Sequence
  Synthetic polypeptide
SQHFGRPSCVPLPATGVK

SEQ ID NO: 39018 - protein, 12 aa, Artificial Sequence
  Synthetic polypeptide
EQLSQAEAVALK

SEQ ID NO: 39019 - protein, 10 aa, Artificial Sequence
  Synthetic polypeptide
GQVLGPWPSR

SEQ ID NO: 39020 - protein, 18 aa, Artificial Sequence
  Synthetic polypeptide
TGAQPPATMPLNVSFTNR

SEQ ID NO: 39021 - protein, 10 aa, Artificial Sequence
  Synthetic polypeptide
TGIPSATLIR

SEQ ID NO: 39022 - protein, 12 aa, Artificial Sequence
  Synthetic polypeptide
EQTDVMHQNIYD

SEQ ID NO: 39023 - protein, 15 aa, Artificial Sequence
  Synthetic polypeptide
FVDVTECQACSANSR

SEQ ID NO: 39024 - protein, 10 aa, Artificial Sequence
  Synthetic polypeptide
IRDSEELIGR

SEQ ID NO: 39025 - protein, 10 aa, Artificial Sequence
  Synthetic polypeptide
DHIMFSLFEK

SEQ ID NO: 39026 - protein, 12 aa, Artificial Sequence
  Synthetic polypeptide
DSGSTTWCFIQK

SEQ ID NO: 39027 - protein, 18 aa, Artificial Sequence
  Synthetic polypeptide
GFPSHMSLGYHFQCPIPR

SEQ ID NO: 39028 - protein, 12 aa, Artificial Sequence
  Synthetic polypeptide
CPEMLPTSQTLR

SEQ ID NO: 39029 - protein, 16 aa, Artificial Sequence
  Synthetic polypeptide
FLQQCLLLLVSLEVFR

SEQ ID NO: 39030 - protein, 15 aa, Artificial Sequence
  Synthetic polypeptide
TAGGQQQALPLGSPR

SEQ ID NO: 39031 - protein, 16 aa, Artificial Sequence
  Synthetic polypeptide
SVTVSHNPQLGPSGCR

SEQ ID NO: 39032 - protein, 13 aa, Artificial Sequence
  Synthetic polypeptide
AVTANGYQMLDGK

SEQ ID NO: 39033 - protein, 13 aa, Artificial Sequence
  Synthetic polypeptide
FPSGILCVIMPGR

SEQ ID NO: 39034 - protein, 24 aa, Artificial Sequence
  Synthetic polypeptide
HDYDEDLVQEASSEDVLGVHMVDK

SEQ ID NO: 39035 - protein, 12 aa, Artificial Sequence
  Synthetic polypeptide
CNPSTLGDQAEK

SEQ ID NO: 39036 - protein, 13 aa, Artificial Sequence
  Synthetic polypeptide
AEISCQQPAPGPR

SEQ ID NO: 39037 - protein, 24 aa, Artificial Sequence
  Synthetic polypeptide
GQEMETIPANTLIQEDILDTGNDK

SEQ ID NO: 39038 - protein, 8 aa, Artificial Sequence
  Synthetic polypeptide
GGFHHDCK

SEQ ID NO: 39039 - protein, 12 aa, Artificial Sequence
  Synthetic polypeptide
LWTSLPAPMFSR

SEQ ID NO: 39040 - protein, 17 aa, Artificial Sequence
  Synthetic polypeptide
CMCLEYPAVVEFAPFQK

SEQ ID NO: 39041 - protein, 12 aa, Artificial Sequence
  Synthetic polypeptide
LIISIFLVHSPK

SEQ ID NO: 39042 - protein, 17 aa, Artificial Sequence
  Synthetic polypeptide
GATWTGSSPQGSWDFTR

SEQ ID NO: 39043 - protein, 10 aa, Artificial Sequence
  Synthetic polypeptide
TVTVPAQELK

SEQ ID NO: 39044 - protein, 11 aa, Artificial Sequence
  Synthetic polypeptide
ENTMAENELQV

SEQ ID NO: 39045 - protein, 23 aa, Artificial Sequence
  Synthetic polypeptide
TPMELELPPASHFEFIGSSANCR

SEQ ID NO: 39046 - protein, 18 aa, Artificial Sequence
  Synthetic polypeptide
GLLWSGMALTGSLRVTQR

SEQ ID NO: 39047 - protein, 21 aa, Artificial Sequence
  Synthetic polypeptide
GLSDHVQLSQSHSTSFHVSPK

SEQ ID NO: 39048 - protein, 21 aa, Artificial Sequence
  Synthetic polypeptide
MILESTYHNTLHIAMKAPELK

SEQ ID NO: 39049 - protein, 12 aa, Artificial Sequence
  Synthetic polypeptide
CPETFLDGTLGR

SEQ ID NO: 39050 - protein, 17 aa, Artificial Sequence
  Synthetic polypeptide
SYQLRPGTMIEWGNYWR

SEQ ID NO: 39051 - protein, 10 aa, Artificial Sequence
  Synthetic polypeptide
TILANTVMAR

SEQ ID NO: 39052 - protein, 10 aa, Artificial Sequence
  Synthetic polypeptide
MELTIPGVGK

SEQ ID NO: 39053 - protein, 32 aa, Artificial Sequence
  Synthetic polypeptide
SSPQAIQMVATLGTTTCCSFDNLLEVGPICNK

SEQ ID NO: 39054 - protein, 8 aa, Artificial Sequence
  Synthetic polypeptide
GDPGIDAR

SEQ ID NO: 39055 - protein, 16 aa, Artificial Sequence
  Synthetic polypeptide
MAFSGSQAPYLSPDPK

SEQ ID NO: 39056 - protein, 22 aa, Artificial Sequence
  Synthetic polypeptide
TIAQGNLSNTDVQAAKRSCSYL

SEQ ID NO: 39057 - protein, 21 aa, Artificial Sequence
  Synthetic polypeptide
MQENTLRAPTDSTLWHPPHYK

SEQ ID NO: 39058 - protein, 17 aa, Artificial Sequence
  Synthetic polypeptide
DQPGQHGPGMRPPLGLR

SEQ ID NO: 39059 - protein, 12 aa, Artificial Sequence
  Synthetic polypeptide
EAPTYITWTIRR

SEQ ID NO: 39060 - protein, 13 aa, Artificial Sequence
  Synthetic polypeptide
DLVGGYTPGTPYK

SEQ ID NO: 39061 - protein, 18 aa, Artificial Sequence
  Synthetic polypeptide
GLNEAIFMIPTNPPPTFR

SEQ ID NO: 39062 - protein, 12 aa, Artificial Sequence
  Synthetic polypeptide
DAAALLLANEAR

SEQ ID NO: 39063 - protein, 13 aa, Artificial Sequence
  Synthetic polypeptide
ATSLWYFMAAQAK

SEQ ID NO: 39064 - protein, 18 aa, Artificial Sequence
  Synthetic polypeptide
MDLVQVSGSLGSPVLSCK

SEQ ID NO: 39065 - protein, 11 aa, Artificial Sequence
  Synthetic polypeptide
QHQEVTLYGLK

SEQ ID NO: 39066 - protein, 10 aa, Artificial Sequence
  Synthetic polypeptide
LVSLSQYWEK

SEQ ID NO: 39067 - protein, 15 aa, Artificial Sequence
  Synthetic polypeptide
TGTTPVYSSQHEQHR

SEQ ID NO: 39068 - protein, 18 aa, Artificial Sequence
  Synthetic polypeptide
QATGMDLEVIILSDITQK

SEQ ID NO: 39069 - protein, 9 aa, Artificial Sequence
  Synthetic polypeptide
LLALLDVLK

SEQ ID NO: 39070 - protein, 10 aa, Artificial Sequence
  Synthetic polypeptide
GIGYPAWAMK

SEQ ID NO: 39071 - protein, 14 aa, Artificial Sequence
  Synthetic polypeptide
MESQLQIEETTLLR

SEQ ID NO: 39072 - protein, 13 aa, Artificial Sequence
  Synthetic polypeptide
GLLGLAGMRPELR

SEQ ID NO: 39073 - protein, 14 aa, Artificial Sequence
  Synthetic polypeptide
GQEMETILANMISR

SEQ ID NO: 39074 - protein, 23 aa, Artificial Sequence
  Synthetic polypeptide
ICRPGAAAAARHPGSPGGQLAPR

SEQ ID NO: 39075 - protein, 12 aa, Artificial Sequence
  Synthetic polypeptide
ELGVTAGGLPTR

SEQ ID NO: 39076 - protein, 12 aa, Artificial Sequence
  Synthetic polypeptide
GNLDTKTPGMPK

SEQ ID NO: 39077 - protein, 13 aa, Artificial Sequence
  Synthetic polypeptide
LLELQGLPLMPSR

SEQ ID NO: 39078 - protein, 10 aa, Artificial Sequence
  Synthetic polypeptide
AGGSLEAGGK

SEQ ID NO: 39079 - protein, 25 aa, Artificial Sequence
  Synthetic polypeptide
EGDVVLYCSSATFCATSQSGTGEVR

SEQ ID NO: 39080 - protein, 10 aa, Artificial Sequence
  Synthetic polypeptide
STNDELDELR

SEQ ID NO: 39081 - protein, 13 aa, Artificial Sequence
  Synthetic polypeptide
INSAHLQTLSAGK

SEQ ID NO: 39082 - protein, 21 aa, Artificial Sequence
  Synthetic polypeptide
MGLSPASAPRPQTCFSLSTTK

SEQ ID NO: 39083 - protein, 22 aa, Artificial Sequence
  Synthetic polypeptide
MLADRSMSSSLSASQLHTVNMR

SEQ ID NO: 39084 - protein, 14 aa, Artificial Sequence
  Synthetic polypeptide
GTQVFVTGYTPWQR

SEQ ID NO: 39085 - protein, 11 aa, Artificial Sequence
  Synthetic polypeptide
METDLECSDSR

SEQ ID NO: 39086 - protein, 8 aa, Artificial Sequence
  Synthetic polypeptide
TLLPGTLR

SEQ ID NO: 39087 - protein, 11 aa, Artificial Sequence
  Synthetic polypeptide
WLMPVIPALGR

SEQ ID NO: 39088 - protein, 17 aa, Artificial Sequence
  Synthetic polypeptide
LLGAEIAPLHSSLDGLS

SEQ ID NO: 39089 - protein, 14 aa, Artificial Sequence
  Synthetic polypeptide
DPAIALQPGPQSER

SEQ ID NO: 39090 - protein, 9 aa, Artificial Sequence
  Synthetic polypeptide
MAHTLQYFK

SEQ ID NO: 39091 - protein, 15 aa, Artificial Sequence
  Synthetic polypeptide
MAHTLQYFKSSQHQR

SEQ ID NO: 39092 - protein, 11 aa, Artificial Sequence
  Synthetic polypeptide
MISAFPTEGQR

SEQ ID NO: 39093 - protein, 11 aa, Artificial Sequence
  Synthetic polypeptide
MDFMNAEILLK

SEQ ID NO: 39094 - protein, 17 aa, Artificial Sequence
  Synthetic polypeptide
SEEPLRPAAAPSENALR

SEQ ID NO: 39095 - protein, 14 aa, Artificial Sequence
  Synthetic polypeptide
TSPVAGPALPPNYK

SEQ ID NO: 39096 - protein, 11 aa, Artificial Sequence
  Synthetic polypeptide
EYLEYEDTAQR

SEQ ID NO: 39097 - protein, 10 aa, Artificial Sequence
  Synthetic polypeptide
QNLHEIGLWR

SEQ ID NO: 39098 - protein, 8 aa, Artificial Sequence
  Synthetic polypeptide
AGGSLEAK

SEQ ID NO: 39099 - protein, 23 aa, Artificial Sequence
  Synthetic polypeptide
AMSQINFFTNDPASAIGEYEDLR

SEQ ID NO: 39100 - protein, 12 aa, Artificial Sequence
  Synthetic polypeptide
LELALLAPQACR

SEQ ID NO: 39101 - protein, 20 aa, Artificial Sequence
  Synthetic polypeptide
SLVLEGFLINSKPENACEPI

SEQ ID NO: 39102 - protein, 26 aa, Artificial Sequence
  Synthetic polypeptide
TVTDSTLWIASSPGGLSPADCGASFR

SEQ ID NO: 39103 - protein, 13 aa, Artificial Sequence
  Synthetic polypeptide
IASTQEADVVVAR

SEQ ID NO: 39104 - protein, 19 aa, Artificial Sequence
  Synthetic polypeptide
LLRELQVMYGMLVFTLVLR

SEQ ID NO: 39105 - protein, 11 aa, Artificial Sequence
  Synthetic polypeptide
HTDLQATAIGK

SEQ ID NO: 39106 - protein, 13 aa, Artificial Sequence
  Synthetic polypeptide
YISLIYTNYAEGK

SEQ ID NO: 39107 - protein, 24 aa, Artificial Sequence
  Synthetic polypeptide
AQWLTPVIPALWEAEAGESPERPR

SEQ ID NO: 39108 - protein, 7 aa, Artificial Sequence
  Synthetic polypeptide
MILSSIR

SEQ ID NO: 39109 - protein, 7 aa, Artificial Sequence
  Synthetic polypeptide
MGISIVK

SEQ ID NO: 39110 - protein, 9 aa, Artificial Sequence
  Synthetic polypeptide
LLINRMVTL

SEQ ID NO: 39111 - protein, 18 aa, Artificial Sequence
  Synthetic polypeptide
MGAVAHTCNPSTLGGQGK

SEQ ID NO: 39112 - protein, 23 aa, Artificial Sequence
  Synthetic polypeptide
ALVNLSFVTGVSSMTFMMGNICR

SEQ ID NO: 39113 - protein, 7 aa, Artificial Sequence
  Synthetic polypeptide
APVSDEK

SEQ ID NO: 39114 - protein, 7 aa, Artificial Sequence
  Synthetic polypeptide
MNSLSIR

SEQ ID NO: 39115 - protein, 14 aa, Artificial Sequence
  Synthetic polypeptide
ALELGVVSQPSVYR

SEQ ID NO: 39116 - protein, 16 aa, Artificial Sequence
  Synthetic polypeptide
MGAVTHTCNPSTLEGR

SEQ ID NO: 39117 - protein, 12 aa, Artificial Sequence
  Synthetic polypeptide
ELLHGTEGGEHR

SEQ ID NO: 39118 - protein, 10 aa, Artificial Sequence
  Synthetic polypeptide
VAASSPIMRK

SEQ ID NO: 39119 - protein, 9 aa, Artificial Sequence
  Synthetic polypeptide
TITLEVEPR

SEQ ID NO: 39120 - protein, 25 aa, Artificial Sequence
  Synthetic polypeptide
MGAVAHTCNPSTLEGQDCPCGRPRR

SEQ ID NO: 39121 - protein, 16 aa, Artificial Sequence
  Synthetic polypeptide
EAEEPSDNGPLFTELK

SEQ ID NO: 39122 - protein, 10 aa, Artificial Sequence
  Synthetic polypeptide
LQDSTGSWEK

SEQ ID NO: 39123 - protein, 10 aa, Artificial Sequence
  Synthetic polypeptide
GLPSHAELIR

SEQ ID NO: 39124 - protein, 12 aa, Artificial Sequence
  Synthetic polypeptide
CNPSTLGDQAEK

SEQ ID NO: 39125 - protein, 18 aa, Artificial Sequence
  Synthetic polypeptide
QLQSANYGHMQASCLSIK

SEQ ID NO: 39126 - protein, 14 aa, Artificial Sequence
  Synthetic polypeptide
AHLNERNTLQEENK

SEQ ID NO: 39127 - protein, 19 aa, Artificial Sequence
  Synthetic polypeptide
DLYANTVMSVELNAASGTR

SEQ ID NO: 39128 - protein, 20 aa, Artificial Sequence
  Synthetic polypeptide
TEEMPQLNFGMAVLYGGMCL

SEQ ID NO: 39129 - protein, 21 aa, Artificial Sequence
  Synthetic polypeptide
ENLPSIQPGMVLQAVAHLHGR

SEQ ID NO: 39130 - protein, 15 aa, Artificial Sequence
  Synthetic polypeptide
LLNATHQIGCQYTHR

SEQ ID NO: 39131 - protein, 23 aa, Artificial Sequence
  Synthetic polypeptide
MAVVAHACNLNSFGGQGPAWFLR

SEQ ID NO: 39132 - protein, 12 aa, Artificial Sequence
  Synthetic polypeptide
MVWVGTIGSGPK

SEQ ID NO: 39133 - protein, 16 aa, Artificial Sequence
  Synthetic polypeptide
NLLDIDAPVTGWQELK

SEQ ID NO: 39134 - protein, 15 aa, Artificial Sequence
  Synthetic polypeptide
VISAFPSELQSQCTK

SEQ ID NO: 39135 - protein, 12 aa, Artificial Sequence
  Synthetic polypeptide
MACNMGLEKGEK

SEQ ID NO: 39136 - protein, 15 aa, Artificial Sequence
  Synthetic polypeptide
MLDNLMYDYELNWVR

SEQ ID NO: 39137 - protein, 14 aa, Artificial Sequence
  Synthetic polypeptide
AKIAPAEGPDVSER

SEQ ID NO: 39138 - protein, 6 aa, Artificial Sequence
  Synthetic polypeptide
MVLLVR

SEQ ID NO: 39139 - protein, 11 aa, Artificial Sequence
  Synthetic polypeptide
VGGSRVLGGDQ

SEQ ID NO: 39140 - protein, 15 aa, Artificial Sequence
  Synthetic polypeptide
NTQLTMWLPQLIWTK

SEQ ID NO: 39141 - protein, 13 aa, Artificial Sequence
  Synthetic polypeptide
MCQKEVMEQSAGR

SEQ ID NO: 39142 - protein, 25 aa, Artificial Sequence
  Synthetic polypeptide
MAQWLMPVIPALWEAQIHFILLFSR

SEQ ID NO: 39143 - protein, 12 aa, Artificial Sequence
  Synthetic polypeptide
LLSSSMHTLQTK

SEQ ID NO: 39144 - protein, 14 aa, Artificial Sequence
  Synthetic polypeptide
QQMLVCFVNLDVNK

SEQ ID NO: 39145 - protein, 21 aa, Artificial Sequence
  Synthetic polypeptide
MASTISAGCGGGACGPSYSGG

SEQ ID NO: 39146 - protein, 14 aa, Artificial Sequence
  Synthetic polypeptide
LLDEAAGEGEAAGR

SEQ ID NO: 39147 - protein, 14 aa, Artificial Sequence
  Synthetic polypeptide
TSPVAGPALPPNYK

SEQ ID NO: 39148 - protein, 17 aa, Artificial Sequence
  Synthetic polypeptide
LSTVVDADEIIVLDQEK

SEQ ID NO: 39149 - protein, 11 aa, Artificial Sequence
  Synthetic polypeptide
MDFMNAEILLK

SEQ ID NO: 39150 - protein, 28 aa, Artificial Sequence
  Synthetic polypeptide
MATVAHTSLATVEDFQIRPHTLYVHSYK

SEQ ID NO: 39151 - protein, 27 aa, Artificial Sequence
  Synthetic polypeptide
METQADLVSQEPQALLDSALREAEAGR

SEQ ID NO: 39152 - protein, 14 aa, Artificial Sequence
  Synthetic polypeptide
LLITAEDQSMWIQS

SEQ ID NO: 39153 - protein, 19 aa, Artificial Sequence
  Synthetic polypeptide
LADLFGWSQLIYNHITEYK

SEQ ID NO: 39154 - protein, 12 aa, Artificial Sequence
  Synthetic polypeptide
LLHHQLHMMLDK

SEQ ID NO: 39155 - protein, 16 aa, Artificial Sequence
  Synthetic polypeptide
LSPLPSNSCVTWGGYR

SEQ ID NO: 39156 - protein, 16 aa, Artificial Sequence
  Synthetic polypeptide
MILESTYHNTLHIAMK

SEQ ID NO: 39157 - protein, 21 aa, Artificial Sequence
  Synthetic polypeptide
MQENTLRAPTDSTLWHPPHYK

SEQ ID NO: 39158 - protein, 20 aa, Artificial Sequence
  Synthetic polypeptide
MMVNCHAHFWVSTYLSPHLL

SEQ ID NO: 39159 - protein, 10 aa, Artificial Sequence
  Synthetic polypeptide
SQVMDVDTLY

SEQ ID NO: 39160 - protein, 10 aa, Artificial Sequence
  Synthetic polypeptide
TDDSLGLGLK

SEQ ID NO: 39161 - protein, 17 aa, Artificial Sequence
  Synthetic polypeptide
GHEFETSLANMVIQLLK

SEQ ID NO: 39162 - protein, 12 aa, Artificial Sequence
  Synthetic polypeptide
MDGQMMDTGVDK

SEQ ID NO: 39163 - protein, 13 aa, Artificial Sequence
  Synthetic polypeptide
HLEDYMEHTPPPR

SEQ ID NO: 39164 - protein, 8 aa, Artificial Sequence
  Synthetic polypeptide
IFTYQICK

SEQ ID NO: 39165 - protein, 14 aa, Artificial Sequence
  Synthetic polypeptide
TENLGSILSWWHNK

SEQ ID NO: 39166 - protein, 13 aa, Artificial Sequence
  Synthetic polypeptide
MGGATSPLLSSAK

SEQ ID NO: 39167 - protein, 11 aa, Artificial Sequence
  Synthetic polypeptide
MISAFPTEGQR

SEQ ID NO: 39168 - protein, 12 aa, Artificial Sequence
  Synthetic polypeptide
TFTMIHFHLITR

SEQ ID NO: 39169 - protein, 14 aa, Artificial Sequence
  Synthetic polypeptide
LLPPCQPGSSLSSK

SEQ ID NO: 39170 - protein, 9 aa, Artificial Sequence
  Synthetic polypeptide
GLFSQAEIR

SEQ ID NO: 39171 - protein, 13 aa, Artificial Sequence
  Synthetic polypeptide
MAALTIATGLAVD

SEQ ID NO: 39172 - protein, 12 aa, Artificial Sequence
  Synthetic polypeptide
MYMAHGLTQSTK

SEQ ID NO: 39173 - protein, 13 aa, Artificial Sequence
  Synthetic polypeptide
EFETSLGLWQAMR

SEQ ID NO: 39174 - protein, 17 aa, Artificial Sequence
  Synthetic polypeptide
TAELPKPSISSNNSNPK

SEQ ID NO: 39175 - protein, 14 aa, Artificial Sequence
  Synthetic polypeptide
VQDHPGQHGEAIGK

SEQ ID NO: 39176 - protein, 10 aa, Artificial Sequence
  Synthetic polypeptide
TSLGNMINDK

SEQ ID NO: 39177 - protein, 17 aa, Artificial Sequence
  Synthetic polypeptide
MLPPFVLAVTMGLSVVK

SEQ ID NO: 39178 - protein, 13 aa, Artificial Sequence
  Synthetic polypeptide
QIGCYQGFAFAWK

SEQ ID NO: 39179 - protein, 14 aa, Artificial Sequence
  Synthetic polypeptide
SQGSGLNFIDLMVR

SEQ ID NO: 39180 - protein, 18 aa, Artificial Sequence
  Synthetic polypeptide
AWEAEIMVKYLLFMWEIK

SEQ ID NO: 39181 - protein, 11 aa, Artificial Sequence
  Synthetic polypeptide
ATVWLGSGDEK

SEQ ID NO: 39182 - protein, 28 aa, Artificial Sequence
  Synthetic polypeptide
DNTDSVVFEDVAVNFTQEEWALLGPSQK

SEQ ID NO: 39183 - protein, 8 aa, Artificial Sequence
  Synthetic polypeptide
QSLSEELK

SEQ ID NO: 39184 - protein, 15 aa, Artificial Sequence
  Synthetic polypeptide
AAAVAAKAEAVSPAK

SEQ ID NO: 39185 - protein, 10 aa, Artificial Sequence
  Synthetic polypeptide
KLILCLNDCK

SEQ ID NO: 39186 - protein, 18 aa, Artificial Sequence
  Synthetic polypeptide
TGAQPPATMPLNVSFTNR

SEQ ID NO: 39187 - protein, 11 aa, Artificial Sequence
  Synthetic polypeptide
DLEFETSLANK

SEQ ID NO: 39188 - protein, 18 aa, Artificial Sequence
  Synthetic polypeptide
LSSQHLGGQEPEQLPEKR

SEQ ID NO: 39189 - protein, 12 aa, Artificial Sequence
  Synthetic polypeptide
TPEVEATVPLQK

SEQ ID NO: 39190 - protein, 14 aa, Artificial Sequence
  Synthetic polypeptide
ISQLQIWDTAGQER

SEQ ID NO: 39191 - protein, 12 aa, Artificial Sequence
  Synthetic polypeptide
VILIFFPECYAK

SEQ ID NO: 39192 - protein, 10 aa, Artificial Sequence
  Synthetic polypeptide
IRDSEELIGR

SEQ ID NO: 39193 - protein, 16 aa, Artificial Sequence
  Synthetic polypeptide
MLAPENSDIGLAAWGR

SEQ ID NO: 39194 - protein, 14 aa, Artificial Sequence
  Synthetic polypeptide
QETPMAADEGSAEK

SEQ ID NO: 39195 - protein, 22 aa, Artificial Sequence
  Synthetic polypeptide
MLADRSMSSSLSASQLHTVNMR

SEQ ID NO: 39196 - protein, 12 aa, Artificial Sequence
  Synthetic polypeptide
LGVGSDSEVEER

SEQ ID NO: 39197 - protein, 9 aa, Artificial Sequence
  Synthetic polypeptide
IQEAEVAVK

SEQ ID NO: 39198 - protein, 9 aa, Artificial Sequence
  Synthetic polypeptide
IDMISCVWK

SEQ ID NO: 39199 - protein, 23 aa, Artificial Sequence
  Synthetic polypeptide
MGVVAHTCNPNTLGGQGIEMHQR

SEQ ID NO: 39200 - protein, 18 aa, Artificial Sequence
  Synthetic polypeptide
EDQMSSWSISTSVQPSGR

SEQ ID NO: 39201 - protein, 14 aa, Artificial Sequence
  Synthetic polypeptide
MLLTHWLNLADHWR

SEQ ID NO: 39202 - protein, 13 aa, Artificial Sequence
  Synthetic polypeptide
MEQFVQVYNWIDV

SEQ ID NO: 39203 - protein, 18 aa, Artificial Sequence
  Synthetic polypeptide
LLSSLFSEPTCLILVSPQ

SEQ ID NO: 39204 - protein, 14 aa, Artificial Sequence
  Synthetic polypeptide
TAQLPEQLMTWHSR

SEQ ID NO: 39205 - protein, 17 aa, Artificial Sequence
  Synthetic polypeptide
SYQLRPGTMIEWGNYWR

SEQ ID NO: 39206 - protein, 19 aa, Artificial Sequence
  Synthetic polypeptide
QEDPLNLTCPSCGITFAPK

SEQ ID NO: 39207 - protein, 12 aa, Artificial Sequence
  Synthetic polypeptide
TQEAEVANAASK

SEQ ID NO: 39208 - protein, 13 aa, Artificial Sequence
  Synthetic polypeptide
ITSVVMVDEAHER

SEQ ID NO: 39209 - protein, 16 aa, Artificial Sequence
  Synthetic polypeptide
NIFSCISMGNFGGPGK

SEQ ID NO: 39210 - protein, 22 aa, Artificial Sequence
  Synthetic polypeptide
VISAFPSEVPGSSHSGVPDSGR

SEQ ID NO: 39211 - protein, 19 aa, Artificial Sequence
  Synthetic polypeptide
DILMYMVWWCVPMMPATRR

SEQ ID NO: 39212 - protein, 15 aa, Artificial Sequence
  Synthetic polypeptide
GQEIQTILANTCIPR

SEQ ID NO: 39213 - protein, 11 aa, Artificial Sequence
  Synthetic polypeptide
METDLECSDSR

SEQ ID NO: 39214 - protein, 18 aa, Artificial Sequence
  Synthetic polypeptide
MLSFMRPPQPCFLYSLWN

SEQ ID NO: 39215 - protein, 14 aa, Artificial Sequence
  Synthetic polypeptide
MLEKLEFEDEVPGP

SEQ ID NO: 39216 - protein, 19 aa, Artificial Sequence
  Synthetic polypeptide
MELTIPGVGHSSGSLNEGK

SEQ ID NO: 39217 - protein, 9 aa, Artificial Sequence
  Synthetic polypeptide
MASICPFLK

SEQ ID NO: 39218 - protein, 13 aa, Artificial Sequence
  Synthetic polypeptide
AFLAMIHSVSSMK

SEQ ID NO: 39219 - protein, 18 aa, Artificial Sequence
  Synthetic polypeptide
LSLSEDTDNSSLSPPPAK

SEQ ID NO: 39220 - protein, 12 aa, Artificial Sequence
  Synthetic polypeptide
LHHWTPAWAAEK

SEQ ID NO: 39221 - protein, 8 aa, Artificial Sequence
  Synthetic polypeptide
TISPFTGK

SEQ ID NO: 39222 - protein, 18 aa, Artificial Sequence
  Synthetic polypeptide
MSAALMFDAVHVVVSAVR

SEQ ID NO: 39223 - protein, 11 aa, Artificial Sequence
  Synthetic polypeptide
MLLTTFVIHGR

SEQ ID NO: 39224 - protein, 12 aa, Artificial Sequence
  Synthetic polypeptide
MLLTTFVIHGRR

SEQ ID NO: 39225 - protein, 17 aa, Artificial Sequence
  Synthetic polypeptide
EYIVPMLTGLQPIMIIQ

SEQ ID NO: 39226 - protein, 13 aa, Artificial Sequence
  Synthetic polypeptide
PQNSTASVSEAER

SEQ ID NO: 39227 - protein, 11 aa, Artificial Sequence
  Synthetic polypeptide
SVSTIFLTCSR

SEQ ID NO: 39228 - protein, 20 aa, Artificial Sequence
  Synthetic polypeptide
MVILESMVSLTQELCPVAMR

SEQ ID NO: 39229 - protein, 7 aa, Artificial Sequence
  Synthetic polypeptide
VSTEEEK

SEQ ID NO: 39230 - protein, 17 aa, Artificial Sequence
  Synthetic polypeptide
MAHLLPNVSEETVSPTR

SEQ ID NO: 39231 - protein, 23 aa, Artificial Sequence
  Synthetic polypeptide
MGTVADTCDPSTLGGGVCDTAYR

SEQ ID NO: 39232 - protein, 13 aa, Artificial Sequence
  Synthetic polypeptide
MLQPSQEVGTISK

SEQ ID NO: 39233 - protein, 20 aa, Artificial Sequence
  Synthetic polypeptide
TQSLGVDEVTIVNILTNRSN

SEQ ID NO: 39234 - protein, 12 aa, Artificial Sequence
  Synthetic polypeptide
MPGPLRSLEMAR

SEQ ID NO: 39235 - protein, 11 aa, Artificial Sequence
  Synthetic polypeptide
VMGLVIPDVPK

SEQ ID NO: 39236 - protein, 12 aa, Artificial Sequence
  Synthetic polypeptide
LHHCTPAWLTER

SEQ ID NO: 39237 - protein, 10 aa, Artificial Sequence
  Synthetic polypeptide
MLSTSWTLPR

SEQ ID NO: 39238 - protein, 18 aa, Artificial Sequence
  Synthetic polypeptide
LAPALLSAMIFAVLWSTR

SEQ ID NO: 39239 - protein, 9 aa, Artificial Sequence
  Synthetic polypeptide
NGISGQVLK

SEQ ID NO: 39240 - protein, 14 aa, Artificial Sequence
  Synthetic polypeptide
MQLDQICISFDEGK

SEQ ID NO: 39241 - protein, 13 aa, Artificial Sequence
  Synthetic polypeptide
MGAWLTPDTGVGK

SEQ ID NO: 39242 - protein, 10 aa, Artificial Sequence
  Synthetic polypeptide
STNDELDELR

SEQ ID NO: 39243 - protein, 12 aa, Artificial Sequence
  Synthetic polypeptide
EAEAGESLKPGR

SEQ ID NO: 39244 - protein, 20 aa, Artificial Sequence
  Synthetic polypeptide
SQILGMQSLALVAQSGVQWR

SEQ ID NO: 39245 - protein, 25 aa, Artificial Sequence
  Synthetic polypeptide
WQIYSGPLPTSPGAACLPCFSCGAK

SEQ ID NO: 39246 - protein, 11 aa, Artificial Sequence
  Synthetic polypeptide
EYLEYEDTAQR

SEQ ID NO: 39247 - protein, 15 aa, Artificial Sequence
  Synthetic polypeptide
SSGAQGEYAGLATIR

SEQ ID NO: 39248 - protein, 19 aa, Artificial Sequence
  Synthetic polypeptide
AGGSGSVVIWTVPTGSWQK

SEQ ID NO: 39249 - protein, 10 aa, Artificial Sequence
  Synthetic polypeptide
VNGYPNYLIR

SEQ ID NO: 39250 - protein, 11 aa, Artificial Sequence
  Synthetic polypeptide
MASAWEGGAWR

SEQ ID NO: 39251 - protein, 17 aa, Artificial Sequence
  Synthetic polypeptide
CMCLEYPAVVEFAPFQK

SEQ ID NO: 39252 - protein, 11 aa, Artificial Sequence
  Synthetic polypeptide
TSLANMVGMFK

SEQ ID NO: 39253 - protein, 16 aa, Artificial Sequence
  Synthetic polypeptide
FSEASVAMLPVQLWNR

SEQ ID NO: 39254 - protein, 13 aa, Artificial Sequence
  Synthetic polypeptide
VETLCATLWGFGK

SEQ ID NO: 39255 - protein, 18 aa, Artificial Sequence
  Synthetic polypeptide
MDLVQVSGSLGSPVLSCK

SEQ ID NO: 39256 - protein, 15 aa, Artificial Sequence
  Synthetic polypeptide
MVAGPTYLGDLCPPK

SEQ ID NO: 39257 - protein, 8 aa, Artificial Sequence
  Synthetic polypeptide
HCHALMPK

SEQ ID NO: 39258 - protein, 9 aa, Artificial Sequence
  Synthetic polypeptide
ASGSQGMFK

SEQ ID NO: 39259 - protein, 9 aa, Artificial Sequence
  Synthetic polypeptide
IVESGDTPK

SEQ ID NO: 39260 - protein, 13 aa, Artificial Sequence
  Synthetic polypeptide
ASGSLEGPFVTWR

SEQ ID NO: 39261 - protein, 11 aa, Artificial Sequence
  Synthetic polypeptide
ENTMAENELQV

SEQ ID NO: 39262 - protein, 10 aa, Artificial Sequence
  Synthetic polypeptide
TVTVPAQELK

SEQ ID NO: 39263 - protein, 14 aa, Artificial Sequence
  Synthetic polypeptide
NLQLSAHLLTSSLK

SEQ ID NO: 39264 - protein, 15 aa, Artificial Sequence
  Synthetic polypeptide
NLDLLEGMESTQMPK

SEQ ID NO: 39265 - protein, 15 aa, Artificial Sequence
  Synthetic polypeptide
LDGHAGDLDIEDDMK

SEQ ID NO: 39266 - protein, 9 aa, Artificial Sequence
  Synthetic polypeptide
MTKLLSPIR

SEQ ID NO: 39267 - protein, 9 aa, Artificial Sequence
  Synthetic polypeptide
YEEEIRTCR

SEQ ID NO: 39268 - protein, 18 aa, Artificial Sequence
  Synthetic polypeptide
QAWRLMPVIPAHWEAEVK

SEQ ID NO: 39269 - protein, 15 aa, Artificial Sequence
  Synthetic polypeptide
AEIALLHSSLGNREK

SEQ ID NO: 39270 - protein, 25 aa, Artificial Sequence
  Synthetic polypeptide
TFWTNDDPGLEVLVPEGGVLPETQQ

SEQ ID NO: 39271 - protein, 19 aa, Artificial Sequence
  Synthetic polypeptide
QEAEIPGANLNVEILSSCR

SEQ ID NO: 39272 - protein, 15 aa, Artificial Sequence
  Synthetic polypeptide
LNEGASGLDGKPGSR

SEQ ID NO: 39273 - protein, 14 aa, Artificial Sequence
  Synthetic polypeptide
MESQLQIEETTLLR

SEQ ID NO: 39274 - protein, 25 aa, Artificial Sequence
  Synthetic polypeptide
MSDPVFLSLSLLVCETGDHEKRNGR

SEQ ID NO: 39275 - protein, 13 aa, Artificial Sequence
  Synthetic polypeptide
ICHFLSVTGSLLR

SEQ ID NO: 39276 - protein, 13 aa, Artificial Sequence
  Synthetic polypeptide
MSSINPNTSATWK

SEQ ID NO: 39277 - protein, 9 aa, Artificial Sequence
  Synthetic polypeptide
IILANTFSK

SEQ ID NO: 39278 - protein, 13 aa, Artificial Sequence
  Synthetic polypeptide
FCRLLNGLGEEIK

SEQ ID NO: 39279 - protein, 13 aa, Artificial Sequence
  Synthetic polypeptide
AQEFETSLGNMFR

SEQ ID NO: 39280 - protein, 15 aa, Artificial Sequence
  Synthetic polypeptide
MSDQEKGPIVSSGVR

SEQ ID NO: 39281 - protein, 17 aa, Artificial Sequence
  Synthetic polypeptide
TNYAASSYLSLTPEQWK

SEQ ID NO: 39282 - protein, 12 aa, Artificial Sequence
  Synthetic polypeptide
TSLGNMLTADPR

SEQ ID NO: 39283 - protein, 11 aa, Artificial Sequence
  Synthetic polypeptide
SPVTMEQLICK

SEQ ID NO: 39284 - protein, 22 aa, Artificial Sequence
  Synthetic polypeptide
GAGPAVPGGPVPAGATLTTGAR

SEQ ID NO: 39285 - protein, 16 aa, Artificial Sequence
  Synthetic polypeptide
GQEFETSLANMETPGR

SEQ ID NO: 39286 - protein, 15 aa, Artificial Sequence
  Synthetic polypeptide
FVDVTECQACSANSR

SEQ ID NO: 39287 - protein, 10 aa, Artificial Sequence
  Synthetic polypeptide
TELNIVPVPR

SEQ ID NO: 39288 - protein, 15 aa, Artificial Sequence
  Synthetic polypeptide
MTLATDGTADMFGIR

SEQ ID NO: 39289 - protein, 20 aa, Artificial Sequence
  Synthetic polypeptide
MELSAQFAATTTTPPRPLGR

SEQ ID NO: 39290 - protein, 25 aa, Artificial Sequence
  Synthetic polypeptide
EAIALCHFFFNISGILLWYPIPFTR

SEQ ID NO: 39291 - protein, 12 aa, Artificial Sequence
  Synthetic polypeptide
DAAALLLANEAR

SEQ ID NO: 39292 - protein, 10 aa, Artificial Sequence
  Synthetic polypeptide
MELTIPGVGK

SEQ ID NO: 39293 - protein, 24 aa, Artificial Sequence
  Synthetic polypeptide
METPAQLLFLLLLWLPAEAGGIMR

SEQ ID NO: 39294 - protein, 21 aa, Artificial Sequence
  Synthetic polypeptide
MGAVTHIWNPRTLGGQDPDHR

SEQ ID NO: 39295 - protein, 14 aa, Artificial Sequence
  Synthetic polypeptide
LTMGSTGCDRPLDK

SEQ ID NO: 39296 - protein, 16 aa, Artificial Sequence
  Synthetic polypeptide
WGGQAPPGQPPRPGGR

SEQ ID NO: 39297 - protein, 13 aa, Artificial Sequence
  Synthetic polypeptide
LRQEQLLEPRMQR

SEQ ID NO: 39298 - protein, 7 aa, Artificial Sequence
  Synthetic polypeptide
TLEVEGK

SEQ ID NO: 39299 - protein, 9 aa, Artificial Sequence
  Synthetic polypeptide
NLEASWATR

SEQ ID NO: 39300 - protein, 14 aa, Artificial Sequence
  Synthetic polypeptide
ELYPGQFKPPICLL

SEQ ID NO: 39301 - protein, 10 aa, Artificial Sequence
  Synthetic polypeptide
MLVSASQDGK

SEQ ID NO: 39302 - protein, 13 aa, Artificial Sequence
  Synthetic polypeptide
AGFYEQMNGPVAG

SEQ ID NO: 39303 - protein, 9 aa, Artificial Sequence
  Synthetic polypeptide
MLGTRPHGR

SEQ ID NO: 39304 - protein, 16 aa, Artificial Sequence
  Synthetic polypeptide
LAVNSPPVEPPEQHSR

SEQ ID NO: 39305 - protein, 13 aa, Artificial Sequence
  Synthetic polypeptide
MIVMNDQMDSSLK

SEQ ID NO: 39306 - protein, 23 aa, Artificial Sequence
  Synthetic polypeptide
MGTVAHACNTSTLGGQEHCEGLR

SEQ ID NO: 39307 - protein, 9 aa, Artificial Sequence
  Synthetic polypeptide
MSLCILSMK

SEQ ID NO: 39308 - protein, 12 aa, Artificial Sequence
  Synthetic polypeptide
IPTVTPGAASSC

SEQ ID NO: 39309 - protein, 11 aa, Artificial Sequence
  Synthetic polypeptide
TITDAELPIYR

SEQ ID NO: 39310 - protein, 15 aa, Artificial Sequence
  Synthetic polypeptide
GLEWVSQISESTNSL

SEQ ID NO: 39311 - protein, 10 aa, Artificial Sequence
  Synthetic polypeptide
VAVSVLSPGK

SEQ ID NO: 39312 - protein, 21 aa, Artificial Sequence
  Synthetic polypeptide
GQVIGEIDEETDSALDLGNIR

SEQ ID NO: 39313 - protein, 17 aa, Artificial Sequence
  Synthetic polypeptide
DQPGQHGPGMRPPLGLR

SEQ ID NO: 39314 - protein, 16 aa, Artificial Sequence
  Synthetic polypeptide
VILVNLGSSAEWVFQR

SEQ ID NO: 39315 - protein, 15 aa, Artificial Sequence
  Synthetic polypeptide
TTALQPGHSDLVTAR

SEQ ID NO: 39316 - protein, 8 aa, Artificial Sequence
  Synthetic polypeptide
LSVLSQPK

SEQ ID NO: 39317 - protein, 10 aa, Artificial Sequence
  Synthetic polypeptide
SNLNTGVPSR

SEQ ID NO: 39318 - protein, 8 aa, Artificial Sequence
  Synthetic polypeptide
LDSQYVER

SEQ ID NO: 39319 - protein, 11 aa, Artificial Sequence
  Synthetic polypeptide
DIVRSDLEGKR

SEQ ID NO: 39320 - protein, 12 aa, Artificial Sequence
  Synthetic polypeptide
AEIAPLNSSLGR

SEQ ID NO: 39321 - protein, 11 aa, Artificial Sequence
  Synthetic polypeptide
TFTGGAVIVQK

SEQ ID NO: 39322 - protein, 11 aa, Artificial Sequence
  Synthetic polypeptide
VETSDEEIHKK

SEQ ID NO: 39323 - protein, 19 aa, Artificial Sequence
  Synthetic polypeptide
SQLLERPRQENRLNLGASR

SEQ ID NO: 39324 - protein, 14 aa, Artificial Sequence
  Synthetic polypeptide
LSLGSRIDQINISR

SEQ ID NO: 39325 - protein, 17 aa, Artificial Sequence
  Synthetic polypeptide
NGKFPSLLTHNENMVAK

SEQ ID NO: 39326 - protein, 7 aa, Artificial Sequence
  Synthetic polypeptide
ACLAEGR

SEQ ID NO: 39327 - protein, 13 aa, Artificial Sequence
  Synthetic polypeptide
ILNCQKAMAPSFR

SEQ ID NO: 39328 - protein, 17 aa, Artificial Sequence
  Synthetic polypeptide
TEFLSFMNTELAAFTKK

SEQ ID NO: 39329 - protein, 8 aa, Artificial Sequence
  Synthetic polypeptide
VLGVGSTR

SEQ ID NO: 39330 - protein, 13 aa, Artificial Sequence
  Synthetic polypeptide
QNLQQAQCGLDLR

SEQ ID NO: 39331 - protein, 21 aa, Artificial Sequence
  Synthetic polypeptide
MRRPGQASAFLGLSFFTLYLR

SEQ ID NO: 39332 - protein, 13 aa, Artificial Sequence
  Synthetic polypeptide
TQGGSMGNSSSSR

SEQ ID NO: 39333 - protein, 12 aa, Artificial Sequence
  Synthetic polypeptide
NLDNLPSRLSIR

SEQ ID NO: 39334 - protein, 15 aa, Artificial Sequence
  Synthetic polypeptide
VVSKVEFVHFLAFIK

SEQ ID NO: 39335 - protein, 12 aa, Artificial Sequence
  Synthetic polypeptide
LPRTGIGAPRTR

SEQ ID NO: 39336 - protein, 9 aa, Artificial Sequence
  Synthetic polypeptide
MGWMGEAVR

SEQ ID NO: 39337 - protein, 12 aa, Artificial Sequence
  Synthetic polypeptide
MALSQCGPGKPK

SEQ ID NO: 39338 - protein, 10 aa, Artificial Sequence
  Synthetic polypeptide
LLITTSAGGR

SEQ ID NO: 39339 - protein, 11 aa, Artificial Sequence
  Synthetic polypeptide
LSCAASGFTLR

SEQ ID NO: 39340 - protein, 16 aa, Artificial Sequence
  Synthetic polypeptide
ASQASVPPASLPCPSR

SEQ ID NO: 39341 - protein, 7 aa, Artificial Sequence
  Synthetic polypeptide
ASVTLIR

SEQ ID NO: 39342 - protein, 7 aa, Artificial Sequence
  Synthetic polypeptide
MNSLSIR

SEQ ID NO: 39343 - protein, 10 aa, Artificial Sequence
  Synthetic polypeptide
APVTGWQELK

SEQ ID NO: 39344 - protein, 13 aa, Artificial Sequence
  Synthetic polypeptide
MEAYTPKLTQLLK

SEQ ID NO: 39345 - protein, 17 aa, Artificial Sequence
  Synthetic polypeptide
SHLLGRLSQENHWNLIK

SEQ ID NO: 39346 - protein, 15 aa, Artificial Sequence
  Synthetic polypeptide
GLEFETSLANMHGKK

SEQ ID NO: 39347 - protein, 23 aa, Artificial Sequence
  Synthetic polypeptide
TNVQQTTDLEIPPPGTVGYCAVK

SEQ ID NO: 39348 - protein, 19 aa, Artificial Sequence
  Synthetic polypeptide
LARHGWAEAFAGIRSSHIK

SEQ ID NO: 39349 - protein, 14 aa, Artificial Sequence
  Synthetic polypeptide
MATVYFTRATSQCK

SEQ ID NO: 39350 - protein, 12 aa, Artificial Sequence
  Synthetic polypeptide
LGGSSCLVAYKK

SEQ ID NO: 39351 - protein, 14 aa, Artificial Sequence
  Synthetic polypeptide
LLIYAASNGHSGQQ

SEQ ID NO: 39352 - protein, 9 aa, Artificial Sequence
  Synthetic polypeptide
MAACLGLPK

SEQ ID NO: 39353 - protein, 17 aa, Artificial Sequence
  Synthetic polypeptide
MSLGLSIHHLSDGSGIK

SEQ ID NO: 39354 - protein, 11 aa, Artificial Sequence
  Synthetic polypeptide
AEDTATSCRAK

SEQ ID NO: 39355 - protein, 15 aa, Artificial Sequence
  Synthetic polypeptide
ISSEQLFCFTLINPK

SEQ ID NO: 39356 - protein, 13 aa, Artificial Sequence
  Synthetic polypeptide
AIALQPGQQRETR

SEQ ID NO: 39357 - protein, 28 aa, Artificial Sequence
  Synthetic polypeptide
MGVVAHACNSSTLGGQDPLDLLHLPGVR

SEQ ID NO: 39358 - protein, 10 aa, Artificial Sequence
  Synthetic polypeptide
MELTIPGEGK

SEQ ID NO: 39359 - protein, 13 aa, Artificial Sequence
  Synthetic polypeptide
MAAAALRDPAQSR

SEQ ID NO: 39360 - protein, 10 aa, Artificial Sequence
  Synthetic polypeptide
GPSPSGAEPR

SEQ ID NO: 39361 - protein, 12 aa, Artificial Sequence
  Synthetic polypeptide
LLSSSMHTLQTK

SEQ ID NO: 39362 - protein, 17 aa, Artificial Sequence
  Synthetic polypeptide
SSRPAWPTWCLPPGPGR

SEQ ID NO: 39363 - protein, 8 aa, Artificial Sequence
  Synthetic polypeptide
MTDGGLAL

SEQ ID NO: 39364 - protein, 20 aa, Artificial Sequence
  Synthetic polypeptide
QFWNHFVCIVEETEADVNPK

SEQ ID NO: 39365 - protein, 16 aa, Artificial Sequence
  Synthetic polypeptide
GLILLEQDTAVQNMHK

SEQ ID NO: 39366 - protein, 11 aa, Artificial Sequence
  Synthetic polypeptide
LASVFQLQLLR

SEQ ID NO: 39367 - protein, 10 aa, Artificial Sequence
  Synthetic polypeptide
DASKGVSLHK

SEQ ID NO: 39368 - protein, 36 aa, Artificial Sequence
  Synthetic polypeptide
YAGRPLQCLIQDGILNPHAASCTCAACCDDMTLLLR

SEQ ID NO: 39369 - protein, 19 aa, Artificial Sequence
  Synthetic polypeptide
FQTSGLQNCSFKRWSMILK

SEQ ID NO: 39370 - protein, 23 aa, Artificial Sequence
  Synthetic polypeptide
QLWTLIGMEMVPEESTLTSLGIK

SEQ ID NO: 39371 - protein, 20 aa, Artificial Sequence
  Synthetic polypeptide
PAAVALACNPSTLRGRGMPR

SEQ ID NO: 39372 - protein, 18 aa, Artificial Sequence
  Synthetic polypeptide
VIHDNFGIVEGLMTVTPK

SEQ ID NO: 39373 - protein, 18 aa, Artificial Sequence
  Synthetic polypeptide
EFETSLANMLLDHYQNCK

SEQ ID NO: 39374 - protein, 22 aa, Artificial Sequence
  Synthetic polypeptide
AHSTLQDEAESFMHVQLEVMVR

SEQ ID NO: 39375 - protein, 14 aa, Artificial Sequence
  Synthetic polypeptide
HLEEATVAELSSCR

SEQ ID NO: 39376 - protein, 9 aa, Artificial Sequence
  Synthetic polypeptide
SLNLYNCNS

SEQ ID NO: 39377 - protein, 28 aa, Artificial Sequence
  Synthetic polypeptide
GAILTTMLATRNFSDAVASLDPRSCDSR

SEQ ID NO: 39378 - protein, 26 aa, Artificial Sequence
  Synthetic polypeptide
QMTQVTMPGEPVDVACGVDHMVTLAK

SEQ ID NO: 39379 - protein, 17 aa, Artificial Sequence
  Synthetic polypeptide
QVISAFPTEISTAMPVK

SEQ ID NO: 39380 - protein, 18 aa, Artificial Sequence
  Synthetic polypeptide
WVYEVQAGAARDALQGFK

SEQ ID NO: 39381 - protein, 24 aa, Artificial Sequence
  Synthetic polypeptide
QVDCLGPGVPDQPGQHDITRSGAK

SEQ ID NO: 39382 - protein, 15 aa, Artificial Sequence
  Synthetic polypeptide
YEEASIPFVGILVEK

SEQ ID NO: 39383 - protein, 28 aa, Artificial Sequence
  Synthetic polypeptide
QEQSSSPAMEQSWMENDFDKLTELGFRR

SEQ ID NO: 39384 - protein, 10 aa, Artificial Sequence
  Synthetic polypeptide
LFFLLLTSCR

SEQ ID NO: 39385 - protein, 15 aa, Artificial Sequence
  Synthetic polypeptide
AASRGVTFLFPIQAK

SEQ ID NO: 39386 - protein, 16 aa, Artificial Sequence
  Synthetic polypeptide
NPSTLGGQASPSPSPK

SEQ ID NO: 39387 - protein, 20 aa, Artificial Sequence
  Synthetic polypeptide
IIQVWWHVPVVPAAQEAEVR

SEQ ID NO: 39388 - protein, 14 aa, Artificial Sequence
  Synthetic polypeptide
MWSGLPSRGLPIFK

SEQ ID NO: 39389 - protein, 13 aa, Artificial Sequence
  Synthetic polypeptide
FLGLGFFICNMRR

SEQ ID NO: 39390 - protein, 16 aa, Artificial Sequence
  Synthetic polypeptide
AEIAPLHSSLGDRAAK

SEQ ID NO: 39391 - protein, 14 aa, Artificial Sequence
  Synthetic polypeptide
LLPVIPELWEAEMR

SEQ ID NO: 39392 - protein, 29 aa, Artificial Sequence
  Synthetic polypeptide
MDGPAEPQIPGLWDTYEDDISEISYLPKR

SEQ ID NO: 39393 - protein, 17 aa, Artificial Sequence
  Synthetic polypeptide
NLGSVWWLEVAELTNPS

SEQ ID NO: 39394 - protein, 19 aa, Artificial Sequence
  Synthetic polypeptide
TSLGNMCVIQSWVTSGTAK

SEQ ID NO: 39395 - protein, 19 aa, Artificial Sequence
  Synthetic polypeptide
EAANMILVDDDFSAIIIGK

SEQ ID NO: 39396 - protein, 17 aa, Artificial Sequence
  Synthetic polypeptide
MAHAYNPSTLGSQAPIK

SEQ ID NO: 39397 - protein, 13 aa, Artificial Sequence
  Synthetic polypeptide
MQVSLHPKCKADK

SEQ ID NO: 39398 - protein, 15 aa, Artificial Sequence
  Synthetic polypeptide
GQLRPHTWLSIRSTR

SEQ ID NO: 39399 - protein, 18 aa, Artificial Sequence
  Synthetic polypeptide
MMKPGLASIQSRIAILSR

SEQ ID NO: 39400 - protein, 24 aa, Artificial Sequence
  Synthetic polypeptide
WRHGTPAWLIQVLLEDETTESAVK

SEQ ID NO: 39401 - protein, 12 aa, Artificial Sequence
  Synthetic polypeptide
TDSREAEFPQKK

SEQ ID NO: 39402 - protein, 11 aa, Artificial Sequence
  Synthetic polypeptide
ATVLFYSYKPK

SEQ ID NO: 39403 - protein, 16 aa, Artificial Sequence
  Synthetic polypeptide
LLLSSLSSLGDSAPER

SEQ ID NO: 39404 - protein, 24 aa, Artificial Sequence
  Synthetic polypeptide
DLGQVISLDLHIFICEVSRVPMIR

SEQ ID NO: 39405 - protein, 8 aa, Artificial Sequence
  Synthetic polypeptide
ILWWSQGK

SEQ ID NO: 39406 - protein, 22 aa, Artificial Sequence
  Synthetic polypeptide
SLGLSFHICIIEAAGRGGEAVK

SEQ ID NO: 39407 - protein, 12 aa, Artificial Sequence
  Synthetic polypeptide
VISAFPSEVSRR

SEQ ID NO: 39408 - protein, 11 aa, Artificial Sequence
  Synthetic polypeptide
MISSTSVYAPK

SEQ ID NO: 39409 - protein, 28 aa, Artificial Sequence
  Synthetic polypeptide
GLPSHTELSMICSRASMTPLWGRPPWPR

SEQ ID NO: 39410 - protein, 14 aa, Artificial Sequence
  Synthetic polypeptide
GIPSQVELAWHWKR

SEQ ID NO: 39411 - protein, 11 aa, Artificial Sequence
  Synthetic polypeptide
VTLGISSPVKK

SEQ ID NO: 39412 - protein, 19 aa, Artificial Sequence
  Synthetic polypeptide
ICKAMLELLEDPVLCALAK

SEQ ID NO: 39413 - protein, 20 aa, Artificial Sequence
  Synthetic polypeptide
TCAMAQNIPEGQKLDILLNK

SEQ ID NO: 39414 - protein, 10 aa, Artificial Sequence
  Synthetic polypeptide
HVVQGIQIIR

SEQ ID NO: 39415 - protein, 17 aa, Artificial Sequence
  Synthetic polypeptide
VTGSLQDGMTTGPPRRR

SEQ ID NO: 39416 - protein, 23 aa, Artificial Sequence
  Synthetic polypeptide
YLSPEAEVAVSRDCATALQPGVK

SEQ ID NO: 39417 - protein, 10 aa, Artificial Sequence
  Synthetic polypeptide
QLLCIVSNQK

SEQ ID NO: 39418 - protein, 26 aa, Artificial Sequence
  Synthetic polypeptide
FVSDEMSKDCLSILYNTCVCTEGVTK

SEQ ID NO: 39419 - protein, 22 aa, Artificial Sequence
  Synthetic polypeptide
QLEYLARIQGFQASLFPETQQY

SEQ ID NO: 39420 - protein, 28 aa, Artificial Sequence
  Synthetic polypeptide
LQGERISGNLDAPEGGFDAILQTAVCTK

SEQ ID NO: 39421 - protein, 13 aa, Artificial Sequence
  Synthetic polypeptide
LLEILGATIENSR

SEQ ID NO: 39422 - protein, 9 aa, Artificial Sequence
  Synthetic polypeptide
MTKLLSPIR

SEQ ID NO: 39423 - protein, 12 aa, Artificial Sequence
  Synthetic polypeptide
VLILCQHEALVK

SEQ ID NO: 39424 - protein, 13 aa, Artificial Sequence
  Synthetic polypeptide
DDSEPGMPVLPPR

SEQ ID NO: 39425 - protein, 21 aa, Artificial Sequence
  Synthetic polypeptide
QWTEILHFTDFPISLDTTILK

SEQ ID NO: 39426 - protein, 8 aa, Artificial Sequence
  Synthetic polypeptide
MSVLGELS

SEQ ID NO: 39427 - protein, 18 aa, Artificial Sequence
  Synthetic polypeptide
GQEIKTILANTEWTYPMR

SEQ ID NO: 39428 - protein, 23 aa, Artificial Sequence
  Synthetic polypeptide
FSSHSEMVIITTITSNSQGEAAR

SEQ ID NO: 39429 - protein, 15 aa, Artificial Sequence
  Synthetic polypeptide
TENQTPHVLTHRPPK

SEQ ID NO: 39430 - protein, 11 aa, Artificial Sequence
  Synthetic polypeptide
QAFLEQTRPLR

SEQ ID NO: 39431 - protein, 12 aa, Artificial Sequence
  Synthetic polypeptide
ESFSDFSSSILK

SEQ ID NO: 39432 - protein, 34 aa, Artificial Sequence
  Synthetic polypeptide
QVLWLMPMIPALSEAEAAGSLETSLGNMTSAWCR

SEQ ID NO: 39433 - protein, 18 aa, Artificial Sequence
  Synthetic polypeptide
QTDHLRPGVQHQSGQHSK

SEQ ID NO: 39434 - protein, 17 aa, Artificial Sequence
  Synthetic polypeptide
IEDFGVHCKQMTSHLTK

SEQ ID NO: 39435 - protein, 18 aa, Artificial Sequence
  Synthetic polypeptide
YFDYWGQGTLVTQSPPSK

SEQ ID NO: 39436 - protein, 17 aa, Artificial Sequence
  Synthetic polypeptide
AVALYEGTLSLCSEDLK

SEQ ID NO: 39437 - protein, 20 aa, Artificial Sequence
  Synthetic polypeptide
MPSLNTSRPSGVPDRFSGSK

SEQ ID NO: 39438 - protein, 11 aa, Artificial Sequence
  Synthetic polypeptide
IVGNMFNQMAK

SEQ ID NO: 39439 - protein, 9 aa, Artificial Sequence
  Synthetic polypeptide
LLIYAAATR

SEQ ID NO: 39440 - protein, 13 aa, Artificial Sequence
  Synthetic polypeptide
LFSIHLLSALGPK

SEQ ID NO: 39441 - protein, 10 aa, Artificial Sequence
  Synthetic polypeptide
LCPAATLSER

SEQ ID NO: 39442 - protein, 10 aa, Artificial Sequence
  Synthetic polypeptide
TVEQGVGVWR

SEQ ID NO: 39443 - protein, 8 aa, Artificial Sequence
  Synthetic polypeptide
GLEWIGTK

SEQ ID NO: 39444 - protein, 18 aa, Artificial Sequence
  Synthetic polypeptide
QRPLCCDEQPHQTAFGPK

SEQ ID NO: 39445 - protein, 13 aa, Artificial Sequence
  Synthetic polypeptide
MIVMNDQMDSSLK

SEQ ID NO: 39446 - protein, 30 aa, Artificial Sequence
  Synthetic polypeptide
PGVVAHACNPSTLGGRDLHGMVQLPPAEGR

SEQ ID NO: 39447 - protein, 26 aa, Artificial Sequence
  Synthetic polypeptide
MSPQLLTPGSGAHSQVQLVQSGAEVK

SEQ ID NO: 39448 - protein, 14 aa, Artificial Sequence
  Synthetic polypeptide
LLEGEECRNLASKK

SEQ ID NO: 39449 - protein, 22 aa, Artificial Sequence
  Synthetic polypeptide
PGMMAHACNPSTLGGRGGWIMR

SEQ ID NO: 39450 - protein, 11 aa, Artificial Sequence
  Synthetic polypeptide
LFPGQPMVSNK

SEQ ID NO: 39451 - protein, 21 aa, Artificial Sequence
  Synthetic polypeptide
TAPPLSPLADSLCGLSPPAPR

SEQ ID NO: 39452 - protein, 18 aa, Artificial Sequence
  Synthetic polypeptide
NLHQSNFSLSGEAKYPPR

SEQ ID NO: 39453 - protein, 12 aa, Artificial Sequence
  Synthetic polypeptide
SCIFTISKIDDR

SEQ ID NO: 39454 - protein, 16 aa, Artificial Sequence
  Synthetic polypeptide
LHELMERTIFLITQIR

SEQ ID NO: 39455 - protein, 19 aa, Artificial Sequence
  Synthetic polypeptide
EAEAGESLESDAVKQAMQK

SEQ ID NO: 39456 - protein, 9 aa, Artificial Sequence
  Synthetic polypeptide
KKADATLLK

SEQ ID NO: 39457 - protein, 20 aa, Artificial Sequence
  Synthetic polypeptide
MVEGDQLPPGHTVSQYETCK

SEQ ID NO: 39458 - protein, 26 aa, Artificial Sequence
  Synthetic polypeptide
VCNKNFDDEDSVDGNRPSSASSTSSK

SEQ ID NO: 39459 - protein, 15 aa, Artificial Sequence
  Synthetic polypeptide
MLETLTLISSLGGLR

SEQ ID NO: 39460 - protein, 19 aa, Artificial Sequence
  Synthetic polypeptide
STNVLCTLFMLNLPDLEEK

SEQ ID NO: 39461 - protein, 28 aa, Artificial Sequence
  Synthetic polypeptide
QEQSSSPAMEQSWMENDFDKLTELGFRR

SEQ ID NO: 39462 - protein, 7 aa, Artificial Sequence
  Synthetic polypeptide
MILSSIR

SEQ ID NO: 39463 - protein, 24 aa, Artificial Sequence
  Synthetic polypeptide
MGAVAQACNPSTLGGQGKPAPEIR

SEQ ID NO: 39464 - protein, 22 aa, Artificial Sequence
  Synthetic polypeptide
YVLAAPEWTEEDLSQLTRSMVK

SEQ ID NO: 39465 - protein, 14 aa, Artificial Sequence
  Synthetic polypeptide
HPSFRPAMTVWVGK

SEQ ID NO: 39466 - protein, 20 aa, Artificial Sequence
  Synthetic polypeptide
ALEPGRGSEEAKCSITSCTR

SEQ ID NO: 39467 - protein, 8 aa, Artificial Sequence
  Synthetic polypeptide
QVLQHPWK

SEQ ID NO: 39468 - protein, 11 aa, Artificial Sequence
  Synthetic polypeptide
SLRPAATPSGK

SEQ ID NO: 39469 - protein, 12 aa, Artificial Sequence
  Synthetic polypeptide
HRRQISTAMPVK

SEQ ID NO: 39470 - protein, 25 aa, Artificial Sequence
  Synthetic polypeptide
TSSGLPLILHYAMTETPLSMCLWEK

SEQ ID NO: 39471 - protein, 13 aa, Artificial Sequence
  Synthetic polypeptide
LLDASQFGRMITR

SEQ ID NO: 39472 - protein, 14 aa, Artificial Sequence
  Synthetic polypeptide
SQHFGRPRQVDYLR

SEQ ID NO: 39473 - protein, 13 aa, Artificial Sequence
  Synthetic polypeptide
IQNSQVGIAVQQK

SEQ ID NO: 39474 - protein, 11 aa, Artificial Sequence
  Synthetic polypeptide
QPPRPNQLCRR

SEQ ID NO: 39475 - protein, 16 aa, Artificial Sequence
  Synthetic polypeptide
LQAEYMAASLGHGGPR

SEQ ID NO: 39476 - protein, 7 aa, Artificial Sequence
  Synthetic polypeptide
DTVDVLK

SEQ ID NO: 39477 - protein, 12 aa, Artificial Sequence
  Synthetic polypeptide
AASNQISGVPSR

SEQ ID NO: 39478 - protein, 11 aa, Artificial Sequence
  Synthetic polypeptide
LSWRGSGKITK

SEQ ID NO: 39479 - protein, 16 aa, Artificial Sequence
  Synthetic polypeptide
QELSILTMQVPPCSPR

SEQ ID NO: 39480 - protein, 11 aa, Artificial Sequence
  Synthetic polypeptide
LSCAASGFTVK

SEQ ID NO: 39481 - protein, 24 aa, Artificial Sequence
  Synthetic polypeptide
QAPGQGLEWMGGIIPIFGTRNYRK

SEQ ID NO: 39482 - protein, 13 aa, Artificial Sequence
  Synthetic polypeptide
VCTWTPFNPVTVR

SEQ ID NO: 39483 - protein, 9 aa, Artificial Sequence
  Synthetic polypeptide
RATKPTVQK

SEQ ID NO: 39484 - protein, 9 aa, Artificial Sequence
  Synthetic polypeptide
MTSQTMVNK

SEQ ID NO: 39485 - protein, 9 aa, Artificial Sequence
  Synthetic polypeptide
RTHQQAPLK

SEQ ID NO: 39486 - protein, 9 aa, Artificial Sequence
  Synthetic polypeptide
VAAAESHPL

SEQ ID NO: 39487 - protein, 9 aa, Artificial Sequence
  Synthetic polypeptide
GIRPPTSVR

SEQ ID NO: 39488 - protein, 9 aa, Artificial Sequence
  Synthetic polypeptide
AQMSVPFNR

SEQ ID NO: 39489 - protein, 9 aa, Artificial Sequence
  Synthetic polypeptide
SLSPPLVSK

SEQ ID NO: 39490 - protein, 9 aa, Artificial Sequence
  Synthetic polypeptide
AVNGKFVGR

SEQ ID NO: 39491 - protein, 9 aa, Artificial Sequence
  Synthetic polypeptide
IQNEIHAQR

SEQ ID NO: 39492 - protein, 9 aa, Artificial Sequence
  Synthetic polypeptide
RLDHQRAEK

SEQ ID NO: 39493 - protein, 10 aa, Artificial Sequence
  Synthetic polypeptide
RWKEVPSVPR

SEQ ID NO: 39494 - protein, 10 aa, Artificial Sequence
  Synthetic polypeptide
GVQQYHLLSW

SEQ ID NO: 39495 - protein, 9 aa, Artificial Sequence
  Synthetic polypeptide
RLATAPSEK

SEQ ID NO: 39496 - protein, 10 aa, Artificial Sequence
  Synthetic polypeptide
YLPDFYFGKF

SEQ ID NO: 39497 - protein, 8 aa, Artificial Sequence
  Synthetic polypeptide
TVKTKSLM

SEQ ID NO: 39498 - protein, 9 aa, Artificial Sequence
  Synthetic polypeptide
HSKALSLSK

SEQ ID NO: 39499 - protein, 10 aa, Artificial Sequence
  Synthetic polypeptide
KTKNLPMQEK

SEQ ID NO: 39500 - protein, 10 aa, Artificial Sequence
  Synthetic polypeptide
KTKDLDQFLK

SEQ ID NO: 39501 - protein, 10 aa, Artificial Sequence
  Synthetic polypeptide
GGGYNDFGNY

SEQ ID NO: 39502 - protein, 8 aa, Artificial Sequence
  Synthetic polypeptide
TEIILRIK

SEQ ID NO: 39503 - protein, 9 aa, Artificial Sequence
  Synthetic polypeptide
RMFWIPKTK

SEQ ID NO: 39504 - protein, 10 aa, Artificial Sequence
  Synthetic polypeptide
VWMRSPLSTF

SEQ ID NO: 39505 - protein, 10 aa, Artificial Sequence
  Synthetic polypeptide
LPDLAGLAHL

SEQ ID NO: 39506 - protein, 9 aa, Artificial Sequence
  Synthetic polypeptide
KVLGDVATK

SEQ ID NO: 39507 - protein, 9 aa, Artificial Sequence
  Synthetic polypeptide
MVKPPSLLK

SEQ ID NO: 39508 - protein, 11 aa, Artificial Sequence
  Synthetic polypeptide
ESFYGIGTTRW

SEQ ID NO: 39509 - protein, 9 aa, Artificial Sequence
  Synthetic polypeptide
SIKQLQLLK

SEQ ID NO: 39510 - protein, 9 aa, Artificial Sequence
  Synthetic polypeptide
SVVSVLVQK

SEQ ID NO: 39511 - protein, 10 aa, Artificial Sequence
  Synthetic polypeptide
ALRAVTLTAK

SEQ ID NO: 39512 - protein, 10 aa, Artificial Sequence
  Synthetic polypeptide
YLMPSQLWKA

SEQ ID NO: 39513 - protein, 9 aa, Artificial Sequence
  Synthetic polypeptide
EQLDILENI

SEQ ID NO: 39514 - protein, 10 aa, Artificial Sequence
  Synthetic polypeptide
RSPDHPRAEY

SEQ ID NO: 39515 - protein, 10 aa, Artificial Sequence
  Synthetic polypeptide
ITSWFVPRPW

SEQ ID NO: 39516 - protein, 9 aa, Artificial Sequence
  Synthetic polypeptide
NELDKFIVF

SEQ ID NO: 39517 - protein, 9 aa, Artificial Sequence
  Synthetic polypeptide
SHKASLNKF

SEQ ID NO: 39518 - protein, 9 aa, Artificial Sequence
  Synthetic polypeptide
GTVPKSKAL

SEQ ID NO: 39519 - protein, 12 aa, Artificial Sequence
  Synthetic polypeptide
FMMEQVGLAIRS

SEQ ID NO: 39520 - protein, 9 aa, Artificial Sequence
  Synthetic polypeptide
MELALRSQL

SEQ ID NO: 39521 - protein, 12 aa, Artificial Sequence
  Synthetic polypeptide
RVLLKEELTTPK

SEQ ID NO: 39522 - protein, 9 aa, Artificial Sequence
  Synthetic polypeptide
PSSPRPSSL

SEQ ID NO: 39523 - protein, 12 aa, Artificial Sequence
  Synthetic polypeptide
GSGKRTSSQLKP

SEQ ID NO: 39524 - protein, 9 aa, Artificial Sequence
  Synthetic polypeptide
STSYSISSK

SEQ ID NO: 39525 - protein, 10 aa, Artificial Sequence
  Synthetic polypeptide
RTQSSTIQIR

SEQ ID NO: 39526 - protein, 9 aa, Artificial Sequence
  Synthetic polypeptide
QEDLGQRGY

SEQ ID NO: 39527 - protein, 9 aa, Artificial Sequence
  Synthetic polypeptide
ETEKDRRPW

SEQ ID NO: 39528 - protein, 11 aa, Artificial Sequence
  Synthetic polypeptide
RRLQGATAMVR

SEQ ID NO: 39529 - protein, 11 aa, Artificial Sequence
  Synthetic polypeptide
WRFQSCPPTTY

SEQ ID NO: 39530 - protein, 10 aa, Artificial Sequence
  Synthetic polypeptide
AVMTEVVLSK

SEQ ID NO: 39531 - protein, 8 aa, Artificial Sequence
  Synthetic polypeptide
STSIYSTL

SEQ ID NO: 39532 - protein, 9 aa, Artificial Sequence
  Synthetic polypeptide
APKRNTSAL

SEQ ID NO: 39533 - protein, 9 aa, Artificial Sequence
  Synthetic polypeptide
RSVSARPPR

SEQ ID NO: 39534 - protein, 10 aa, Artificial Sequence
  Synthetic polypeptide
SVAWPFSFPK

SEQ ID NO: 39535 - protein, 8 aa, Artificial Sequence
  Synthetic polypeptide
TPNLRTIY

SEQ ID NO: 39536 - protein, 9 aa, Artificial Sequence
  Synthetic polypeptide
SIQHSDLLY

SEQ ID NO: 39537 - protein, 10 aa, Artificial Sequence
  Synthetic polypeptide
SVKQGTGTSW

SEQ ID NO: 39538 - protein, 10 aa, Artificial Sequence
  Synthetic polypeptide
KSQKLREQIK

SEQ ID NO: 39539 - protein, 9 aa, Artificial Sequence
  Synthetic polypeptide
RRQQLITRF

SEQ ID NO: 39540 - protein, 8 aa, Artificial Sequence
  Synthetic polypeptide
KSQLLERL

SEQ ID NO: 39541 - protein, 9 aa, Artificial Sequence
  Synthetic polypeptide
GLFFMKQSV

SEQ ID NO: 39542 - protein, 9 aa, Artificial Sequence
  Synthetic polypeptide
RENGFVKKF

SEQ ID NO: 39543 - protein, 14 aa, Artificial Sequence
  Synthetic polypeptide
NEQAALSEAKVGGS

SEQ ID NO: 39544 - protein, 8 aa, Artificial Sequence
  Synthetic polypeptide
HELQSHHF

SEQ ID NO: 39545 - protein, 8 aa, Artificial Sequence
  Synthetic polypeptide
NEIRISEA

SEQ ID NO: 39546 - protein, 10 aa, Artificial Sequence
  Synthetic polypeptide
APRMLPIQAV

SEQ ID NO: 39547 - protein, 8 aa, Artificial Sequence
  Synthetic polypeptide
EAEVARWL

SEQ ID NO: 39548 - protein, 10 aa, Artificial Sequence
  Synthetic polypeptide
RLCPAAPSEK

SEQ ID NO: 39549 - protein, 11 aa, Artificial Sequence
  Synthetic polypeptide
APRGPSGTQEM

SEQ ID NO: 39550 - protein, 10 aa, Artificial Sequence
  Synthetic polypeptide
STHPPPPSGL

SEQ ID NO: 39551 - protein, 15 aa, Artificial Sequence
  Synthetic polypeptide
LYSRYKKLQQHSGAK

SEQ ID NO: 39552 - protein, 10 aa, Artificial Sequence
  Synthetic polypeptide
AAAVNQGLSY

SEQ ID NO: 39553 - protein, 10 aa, Artificial Sequence
  Synthetic polypeptide
LWPSPVNLRF

SEQ ID NO: 39554 - protein, 10 aa, Artificial Sequence
  Synthetic polypeptide
VSLSPPLVSK

SEQ ID NO: 39555 - protein, 9 aa, Artificial Sequence
  Synthetic polypeptide
VAAAAARVL

SEQ ID NO: 39556 - protein, 9 aa, Artificial Sequence
  Synthetic polypeptide
WRTSALGQR

SEQ ID NO: 39557 - protein, 11 aa, Artificial Sequence
  Synthetic polypeptide
KYKLLDIGYRK

SEQ ID NO: 39558 - protein, 8 aa, Artificial Sequence
  Synthetic polypeptide
KFTRFFVK

SEQ ID NO: 39559 - protein, 9 aa, Artificial Sequence
  Synthetic polypeptide
LHQKGGITF

SEQ ID NO: 39560 - protein, 9 aa, Artificial Sequence
  Synthetic polypeptide
QPSQTQVPL

SEQ ID NO: 39561 - protein, 9 aa, Artificial Sequence
  Synthetic polypeptide
ETFPGKSTF

SEQ ID NO: 39562 - protein, 9 aa, Artificial Sequence
  Synthetic polypeptide
DVLDKFMSF

SEQ ID NO: 39563 - protein, 9 aa, Artificial Sequence
  Synthetic polypeptide
GRWITPSNR

SEQ ID NO: 39564 - protein, 9 aa, Artificial Sequence
  Synthetic polypeptide
SAALQALKR

SEQ ID NO: 39565 - protein, 9 aa, Artificial Sequence
  Synthetic polypeptide
TATQRPTPM

SEQ ID NO: 39566 - protein, 9 aa, Artificial Sequence
  Synthetic polypeptide
RLLVPSSPK

SEQ ID NO: 39567 - protein, 9 aa, Artificial Sequence
  Synthetic polypeptide
TEATVDTSF

SEQ ID NO: 39568 - protein, 8 aa, Artificial Sequence
  Synthetic polypeptide
LASREAIL

SEQ ID NO: 39569 - protein, 8 aa, Artificial Sequence
  Synthetic polypeptide
HDLVRISM

SEQ ID NO: 39570 - protein, 12 aa, Artificial Sequence
  Synthetic polypeptide
NPQFLISMILQR

SEQ ID NO: 39571 - protein, 10 aa, Artificial Sequence
  Synthetic polypeptide
MRATKPTVQK

SEQ ID NO: 39572 - protein, 9 aa, Artificial Sequence
  Synthetic polypeptide
SAAAGIVGR

SEQ ID NO: 39573 - protein, 9 aa, Artificial Sequence
  Synthetic polypeptide
HTMGFWLTK

SEQ ID NO: 39574 - protein, 10 aa, Artificial Sequence
  Synthetic polypeptide
SPRDEGKVFR

SEQ ID NO: 39575 - protein, 10 aa, Artificial Sequence
  Synthetic polypeptide
QALYCQLLTY

SEQ ID NO: 39576 - protein, 9 aa, Artificial Sequence
  Synthetic polypeptide
GTFPFAFSL

SEQ ID NO: 39577 - protein, 10 aa, Artificial Sequence
  Synthetic polypeptide
KTFPLSKSPK

SEQ ID NO: 39578 - protein, 10 aa, Artificial Sequence
  Synthetic polypeptide
KVLEKYWLYK

SEQ ID NO: 39579 - protein, 8 aa, Artificial Sequence
  Synthetic polypeptide
TTDAAIRY

SEQ ID NO: 39580 - protein, 10 aa, Artificial Sequence
  Synthetic polypeptide
QAQPTLRPPK

SEQ ID NO: 39581 - protein, 9 aa, Artificial Sequence
  Synthetic polypeptide
AQPTLRPPK

SEQ ID NO: 39582 - protein, 8 aa, Artificial Sequence
  Synthetic polypeptide
KPAVARAR

SEQ ID NO: 39583 - protein, 10 aa, Artificial Sequence
  Synthetic polypeptide
ESFYGIGTTR

SEQ ID NO: 39584 - protein, 11 aa, Artificial Sequence
  Synthetic polypeptide
RRNQETGAVQR

SEQ ID NO: 39585 - protein, 12 aa, Artificial Sequence
  Synthetic polypeptide
ATDNDFSRRNLY

SEQ ID NO: 39586 - protein, 9 aa, Artificial Sequence
  Synthetic polypeptide
EVVSTSYRR

SEQ ID NO: 39587 - protein, 11 aa, Artificial Sequence
  Synthetic polypeptide
KLRDPTDSTLR

SEQ ID NO: 39588 - protein, 10 aa, Artificial Sequence
  Synthetic polypeptide
SPSADRVVAL

SEQ ID NO: 39589 - protein, 12 aa, Artificial Sequence
  Synthetic polypeptide
KVSSPESGLSNR

SEQ ID NO: 39590 - protein, 9 aa, Artificial Sequence
  Synthetic polypeptide
DIISAFHPF

SEQ ID NO: 39591 - protein, 10 aa, Artificial Sequence
  Synthetic polypeptide
AVFSLRPIPR

SEQ ID NO: 39592 - protein, 9 aa, Artificial Sequence
  Synthetic polypeptide
GRFPSQAQL

SEQ ID NO: 39593 - protein, 9 aa, Artificial Sequence
  Synthetic polypeptide
DIFQQQISR

SEQ ID NO: 39594 - protein, 9 aa, Artificial Sequence
  Synthetic polypeptide
SVSATSVQK

SEQ ID NO: 39595 - protein, 9 aa, Artificial Sequence
  Synthetic polypeptide
VHCDPTKGF

SEQ ID NO: 39596 - protein, 10 aa, Artificial Sequence
  Synthetic polypeptide
IVQHTEISSK

SEQ ID NO: 39597 - protein, 51 aa, Artificial Sequence; identical to SEQ ID NO: 309
  Synthetic polypeptide

SEQ ID NO: 39598 - protein, 39 aa, Artificial Sequence; identical to SEQ ID NO: 308
  Synthetic polypeptide

SEQ ID NO: 39599 - protein, 29 aa, Artificial Sequence
  Synthetic polypeptide
MGWRAAGALLLALLLHGRLLALLDVLKHT

SEQ ID NO: 39600 - protein, 520 aa, Artificial Sequence
  Synthetic polypeptide
MDDQSPAEKKGLRCQNPACMDKGRAAKVCHHADCQQLHRRGPLNLCEACDSKFHSTMHYDGHVRFDLPPQGSVLARNVSTRSCPPRTSPAVDLEEEEEESSVDGKGDRKSTGLKLSKKKARRRHTDDPSKECFTLKFDLNVDIETEIVPAMKKKSLGEVLLPVFERKGIALGKVDIYLDQSNTPLSLTFEAYRFGGHYLRVKAPAKPGDEGKVEQGMKDSKSLSLPILRPAGTGPPALERVDAQSRRESLDILAPGRRRKNMSEFLGEASIPGQEPPTPSSCSLPSGSSGSTNTGDSWKNRAASRFSGFFSSGPSTSAFGREVDKMEQLEGKLHTYSLFGLPRLPRGLRFDHDSWEEEYDEDEDEDNACLRLEDSWRELIDGHEKLTRRQCHQQEAVWELLHTEASYIRKLRVIINLFLCCLLNLQESGLLCEVEAERLFSNIPEIAQLHRRLWASVMAPVLEKARRTRALLQPGDFLKGFKMETGIISLLPPWGGRPSAVRKRLRSAWRGPARRERAVT

SEQ ID NO: 39601 - protein, 501 aa, Artificial Sequence
  Synthetic polypeptide
MDKGRAAKVCHHADCQQLHRRGPLNLCEACDSKFHSTMHYDGHVRFDLPPQGSVLARNVSTRSCPPRTSPAVDLEEEEEESSVDGKGDRKSTGLKLSKKKARRRHTDDPSKECFTLKFDLNVDIETEIVPAMKKKSLGEVLLPVFERKGIALGKVDIYLDQSNTPLSLTFEAYRFGGHYLRVKAPAKPGDEGKVEQGMKDSKSLSLPILRPAGTGPPALERVDAQSRRESLDILAPGRRRKNMSEFLGEASIPGQEPPTPSSCSLPSGSSGSTNTGDSWKNRAASRFSGFFSSGPSTSAFGREVDKMEQLEGKLHTYSLFGLPRLPRGLRFDHDSWEEEYDEDEDEDNACLRLEDSWRELIDGHEKLTRRQCHQQEAVWELLHTEASYIRKLRVIINLFLCCLLNLQESGLLCEVEAERLFSNIPEIAQLHRRLWASVMAPVLEKARRTRALLQPGDFLKGFKMETGIISLLPPWGGRPSAVRKRLRSAWRGPARRERAVT

SEQ ID NO: 39602 - protein, 533 aa, Artificial Sequence
  Synthetic polypeptide
MGTGPGVSGRLAASRPGPGLPLRDSEPSWAGGRARDGDSQVCHHADCQQLHRRGPLNLCEACDSKFHSTMHYDGHVRFDLPPQGSVLARNVSTRSCPPRTSPAVDLEEEEEESSVDGKGDRKSTGLKLSKKKARRRHTDDPSKECFTLKFDLNVDIETEIVPAMKKKSLGEVLLPVFERKGIALGKVDIYLDQSNTPLSLTFEAYRFGGHYLRVKAPAKPGDEGKVEQGMKDSKSLSLPILRPAGTGPPALERVDAQSRRESLDILAPGRRRKNMSEFLGEASIPGQEPPTPSSCSLPSGSSGSTNTGDSWKNRAASRFSGFFSSGPSTSAFGREVDKMEQLEGKLHTYSLFGLPRLPRGLRFDHDSWEEEYDEDEDEDNACLRLEDSWRELIDGHEKLTRRQCHQQEAVWELLHTEASYIRKLRVIINLFLCCLLNLQESGLLCEVEAERLFSNIPEIAQLHRRLWASVMAPVLEKARRTRALLQPGDFLKGFKMETGIISLLPPWGGRPSAVRKRLRSAWRGPARRERAVT

SEQ ID NO: 39603 - protein, 464 aa, Artificial Sequence
  Synthetic polypeptide
MHYDGHVRFDLPPQGSVLARNVSTRSCPPRTSPAVDLEEEEEESSVDGKGDRKSTGLKLSKKKARRRHTDDPSKECFTLKFDLNVDIETEIVPAMKKKSLGEVLLPVFERKGIALGKVDIYLDQSNTPLSLTFEAYRFGGHYLRVKAPAKPGDEGKVEQGMKDSKSLSLPILRPAGTGPPALERVDAQSRRESLDILAPGRRRKNMSEFLGEASIPGQEPPTPSSCSLPSGSSGSTNTGDSWKNRAASRFSGFFSSGPSTSAFGREVDKMEQLEGKLHTYSLFGLPRLPRGLRFDHDSWEEEYDEDEDEDNACLRLEDSWRELIDGHEKLTRRQCHQQEAVWELLHTEASYIRKLRVIINLFLCCLLNLQESGLLCEVEAERLFSNIPEIAQLHRRLWASVMAPVLEKARRTRALLQPGDFLKGFKMETGIISLLPPWGGRPSAVRKRLRSAWRGPARRERAVT

SEQ ID NO: 39604 - protein, 541 aa, Artificial Sequence
  Synthetic polypeptide
MNSVLTKHGSPPRSWLSLCSGTDDQSPAEKKGLRCQNPACMDKGRAAKVCHHADCQQLHRRGPLNLCEACDSKFHSTMHYDGHVRFDLPPQGSVLARNVSTRSCPPRTSPAVDLEEEEEESSVDGKGDRKSTGLKLSKKKARRRHTDDPSKECFTLKFDLNVDIETEIVPAMKKKSLGEVLLPVFERKGIALGKVDIYLDQSNTPLSLTFEAYRFGGHYLRVKAPAKPGDEGKVEQGMKDSKSLSLPILRPAGTGPPALERVDAQSRRESLDILAPGRRRKNMSEFLGEASIPGQEPPTPSSCSLPSGSSGSTNTGDSWKNRAASRFSGFFSSGPSTSAFGREVDKMEQLEGKLHTYSLFGLPRLPRGLRFDHDSWEEEYDEDEDEDNACLRLEDSWRELIDGHEKLTRRQCHQQEAVWELLHTEASYIRKLRVIINLFLCCLLNLQESGLLCEVEAERLFSNIPEIAQLHRRLWASVMAPVLEKARRTRALLQPGDFLKGFKMETGIISLLPPWGGRPSAVRKRLRSAWRGPARRERAVT

SEQ ID NO: 39605 - protein, 543 aa, Artificial Sequence
  Synthetic polypeptide
MSLGERGSPQTFGGSSVSKGSDAGHDQSPAEKKGLRCQNPACMDKGRAAKVCHHADCQQLHRRGPLNLCEACDSKFHSTMHYDGHVRFDLPPQGSVLARNVSTRSCPPRTSPAVDLEEEEEESSVDGKGDRKSTGLKLSKKKARRRHTDDPSKECFTLKFDLNVDIETEIVPAMKKKSLGEVLLPVFERKGIALGKVDIYLDQSNTPLSLTFEAYRFGGHYLRVKAPAKPGDEGKVEQGMKDSKSLSLPILRPAGTGPPALERVDAQSRRESLDILAPGRRRKNMSEFLGEASIPGQEPPTPSSCSLPSGSSGSTNTGDSWKNRAASRFSGFFSSGPSTSAFGREVDKMEQLEGKLHTYSLFGLPRLPRGLRFDHDSWEEEYDEDEDEDNACLRLEDSWRELIDGHEKLTRRQCHQQEAVWELLHTEASYIRKLRVIINLFLCCLLNLQESGLLCEVEAERLFSNIPEIAQLHRRLWASVMAPVLEKARRTRALLQPGDFLKGFKMETGIISLLPPWGGRPSAVRKRLRSAWRGPARRERAVT

SEQ ID NO: 39606 - protein, 21 aa, Artificial Sequence
  Synthetic polypeptide
MDLVQVSGSLGSPVLSCKVRI

SEQ ID NO: 39607 - protein, 141 aa, Artificial Sequence; identical to SEQ ID NO: 956
  Synthetic polypeptide

SEQ ID NO: 39608 - protein, 292 aa, Artificial Sequence; identical to SEQ ID NO: 955
  Synthetic polypeptide

SEQ ID NO: 39609 - protein, 853 aa, Artificial Sequence; identical to SEQ ID NO: 986
  Synthetic polypeptide

SEQ ID NO: 39610 - protein, 321 aa, Artificial Sequence; identical to SEQ ID NO: 1026
  Synthetic polypeptide

SEQ ID NO: 39611 - protein, 280 aa, Artificial Sequence; identical to SEQ ID NO: 1027
  Synthetic polypeptide

SEQ ID NO: 39612 - protein, 175 aa, Artificial Sequence
  Synthetic polypeptide
  misc_feature (1)..(1): Xaa can be any naturally occurring amino acid
XFIHCTDDSPDPCIEYELVLRKWCELIPGAEFRCFVKENKLIGISQRDYTQYYDHISKQKEEIRRCIQDFFKKHIQYKFLDEDFVFDIYRDSRALYRGDEAKMRPSKWVLIQYEGVLIRRGNLDTKTPGMPKRRGKATSRTQQEGGHLHTVERDLRNAPCRHPDLGLPASRTVRQ

SEQ ID NO: 39613 - protein, 302 aa, Artificial Sequence [sequence omitted]

SEQ ID NO: 39614 - protein, 283 aa, Artificial Sequence
  Synthetic polypeptide
MAYRRDEMWSEGRYEYERIPRERAPPRSHPSDESGYRWTRDDHSASRQPEYRDMRDGFRRKSFYSSHYARERSPYKRDNTFFRESPVGRKDSPHSRSGSSVSSRSYSPERSKSYSFHQSQHRNKERPVQSLKTSRDTSPSSGSAVSSSKVLDKPSRLTEKELAEAASKWAAEKLEKSDESNLPEISEYEAGSTAPLFTDQPEEPESNTTHGIELFEDSQLTTRSKAIASKTKEIEQVYRQDCETFGMVVKMLIEKDPSLEKSIQFALRQNLHEIGLWRSVCTE

SEQ ID NO: 39615 - protein, 357 aa, Artificial Sequence [sequence omitted]

SEQ ID NO: 39616 - protein, 368 aa, Artificial Sequence
  Synthetic polypeptide
MLRHPVRSLVQVAYRRDEMWSEGRYEYERIPRERAPPRSHPSDGYNRLVNIVPKKPPLLDRPGEGSYNRYYSHVDYRDYDEGRSFSHDRRSGPPHRGDESGYRWTRDDHSASRQPEYRDMRDGFRRKSFYSSHYARERSPYKRDNTFFRESPVGRKDSPHSRSGSSVSSRSYSPERSKSYSFHQSQHRKSVRPGASYKRQNEGNPERDKERPVQSLKTSRDTSPSSGSAVSSSKVLDKPSRLTEKELAEAASKWAAEKLEKSDESNLPEISEYEAGSTAPLFTDQPEEPESNTTHGIELFEDSQLTTRSKAIASKTKEIEQVYRQDCETFGMVVKMLIEKDPSLEKSIQFALRQNLHEIGLWRSVCTE

SEQ ID NO: 39617 - protein, 230 aa, Artificial Sequence
  Synthetic polypeptide
MRDGFRRKSFYSSHYARERSPYKRDNTFFRESPVGRKDSPHSRSGSSVSSRSYSPERSKSYSFHQSQHRNKERPVQSLKTSRDTSPSSGSAVSSSKVLDKPSRLTEKELAEAASKWAAEKLEKSDESNLPEISEYEAGSTAPLFTDQPEEPESNTTHGIELFEDSQLTTRSKAIASKTKEIEQVYRQDCETFGMVVKMLIEKDPSLEKSIQFALRQNLHEIGLWRSVCTE

SEQ ID NO: 39618 - protein, 295 aa, Artificial Sequence
  Synthetic polypeptide
MWSEGRYEYERIPRERAPPRSHPSDESGYRWTRDDHSASRQPEYRDMRDGFRRKSFYSSHYARERSPYKRDNTFFRESPVGRKDSPHSRSGSSVSSRSYSPERSKSYSFHQSQHRKSVRPGASYKRQNEGNPERDKERPVQSLKTSRDTSPSSGSAVSSSKVLDKPSRLTEKELAEAASKWAAEKLEKSDESNLPEISEYEAGSTAPLFTDQPEEPESNTTHGIELFEDSQLTTRSKAIASKTKEIEQVYRQDCETFGMVVKMLIEKDPSLEKSIQFALRQNLHEIGLWRSVCTE

SEQ ID NO: 39619 - protein, 350 aa, Artificial Sequence
  Synthetic polypeptide
MWSEGRYEYERIPRERAPPRSHPSDGYNRLVNIVPKKPPLLDRPGEGSYNRYYSHVDYRDYDEGRSFSHDRRSGPPHRGDESGYRWTRDDHSASRQPEYRDMRDGFRRKSFYSSHYARERSPYKRDNTFFRESPVGRKDSPHSRSGSSVSSRSYSPERSKSYSFHQSQHRKSVRPGASYKRQNEGNPERDKERPVQSLKTSRDTSPSSGSAVSSSKVLDKPSRLTEKELAEAASKWAAEKLEKSDESNLPEISEYEAGSTAPLFTDQPEEPESNTTHGIELFEDSQLTTRSKAIASKTKEIEQVYRQDCETFGMVVKMLIEKDPSLEKSIQFALRQNLHEIGLWRSVCTE

SEQ ID NO: 39620 - protein, 331 aa, Artificial Sequence
  Synthetic polypeptide
MWSEGRYEYERIPRERAPPRSHPSDGYNRLVNIVPKKPPLLDRPGEGSYNRYYSHVDYRDYDEGRSFSHDRRSGPPHRGDESGYRWTRDDHSASRQPEYRDMRDGFRRKSFYSSHYARERSPYKRDNTFFRESPVGRKDSPHSRSGSSVSSRSYSPERSKSYSFHQSQHRNKERPVQSLKTSRDTSPSSGSAVSSSKVLDKPSRLTEKELAEAASKWAAEKLEKSDESNLPEISEYEAGSTAPLFTDQPEEPESNTTHGIELFEDSQLTTRSKAIASKTKEIEQVYRQDCETFGMVVKMLIEKDPSLEKSIQFALRQNLHEIGLWRSVCTE

SEQ ID NO: 39621 - protein, 22 aa, Artificial Sequence
  Synthetic polypeptide
MLGAVAHNCDPSTLRGRGGRIT

SEQ ID NO: 39622 - protein, 78 aa, Artificial Sequence; identical to SEQ ID NO: 2449
  Synthetic polypeptide

SEQ ID NO: 39623 - protein, 251 aa, Artificial Sequence
  Synthetic polypeptide
MSDNKERKSQGFPKEDNQDTSSLADAVEKVAKQQQSQASEIEKNKKVLFNLKNELHELEKEIAAISAETKETERQIYQQDSAIENTKLHCDSLETQIKSLHSENVKLKFDIETAQEDFEEHMIKYNAYYAKIKAHKNSLGEVESKWSFMTELHEKRDFVKKLKTMKEELMQDLQNPGGNRITQVQEDITNLKDKIITVKESIIEKTCFLEEEKKTHEKLRKEIETLHHPSTGVILADHKISLETEISSIPL

SEQ ID NO: 39624 - protein, 381 aa, Artificial Sequence
  Synthetic polypeptide
MKLLTRAGSFSRFYSLKVAPKVKATAAPAGAPPQPQDLEFTKLPNGLVIASLENYSPVSRIGLFIKAGSRYEDFSNLGTTHLLRLTSSLTTKGASSFKITRGIEAVGGKLSVTATRENMAYTVECLRGDVDILMEFLLNVTTAPEFRRWEVADLQPQLKIDKAVAFQNPQTHVIENLHAAAYRNALANPLYCPDYRIGKVTSEELHYFVQNHFTSARMALIGLGVSHPVLKQVAEQFLNMRGGLGLSGAKANYRGGEIREQNGDSLVHAAFVAESAVAGSAEANAFSVLQHVLGAGPHVKRGSNTTSHLHQAVAKATQQPFDVSAFNASYSDSGLFGIYTISQATAAGDVIKAAYNQVKTIAQGNLSNTDVQAAKRSCSYL

SEQ ID NO: 39625 - protein, 37 aa, Artificial Sequence
  Synthetic polypeptide
MAFSGSQAPYLSPDPKTRGAATPSVLVTAAPYPLAWG

SEQ ID NO: 39626 - protein, 72 aa, Artificial Sequence
  Synthetic polypeptide
MLLVPKAQGLVEMLQTIYETESCFSADGMSGREPSLEILPRTSLHSIPVTVGRRQRARRAGIKPWVLHLLSR

SEQ ID NO: 39627 - protein, 54 aa, Artificial Sequence
  Synthetic polypeptide
MNSPNESADGMSGREPSLEILPRTSLHSIPVTVGRRQRARRAGIKPWVLHLLSR

SEQ ID NO: 39628 - protein, 53 aa, Artificial Sequence
  Synthetic polypeptide
MNSPNESDGMSGREPSLEILPRTSLHSIPVTVGRRQRARRAGIKPWVLHLLSR

SEQ ID NO: 39629 - protein, 44 aa, Artificial Sequence
  Synthetic polypeptide
MSGREPSLEILPRTSLHSIPVTVGRRQRARRAGIKPWVLHLLSR

SEQ ID NO: 39630 - protein, 588 aa, Artificial Sequence
  Synthetic polypeptide
MAADVVGDVYVLVEHPFEYTGKDGRRVAIRPNERYRLLRRSTEHWWHVRREPGGRPFYLPAQYVRELPALGNPAAAAPPGPHPSPAAPEPLAYDYRFVSAAATAGPDGAPEESGGRASSLCGPAQRGAATQRSSLAPGLPACLYLRPAAPVRPAQSLNDLACAAVSPPAGLLGSSGSFKACSVAGSWVCPRPLARSDSENVYEVIQDLHVPPPEESAEQVDDPPEPVYANIERQPRATSPGAAAAPLPSPVWETHTDAGTGRPYYYNPDTGVTTWESPFEAAEGAASPATSPASVDSHVSLETEWGQYWDEESRRVFFYNPLTGETAWEDEAENEPEEELEMQPGLSPGSPGDPRPPTPETDYPESLTSYPEEDYSPVGSFGEPGPTSPLTTPPGWSCHVSQDKQMLYTNHFTQEQVPVPAPRSIHKSSQDGDTPAQASPPEEKVPAELDEVGSWEEVSPATAAVRTKTLDKAGVLHRTKTADKGKRLRKKHWSASWTVLEGGVLTFFKDSKTSAAGGLRQPSKFSTPEYTVELRGATLSWAPKDKSSRKNVLELRSRDGSEYLIQHDSEAIISTWHKAIAQGIQELR

SEQ ID NO: 39631 - protein, 593 aa, Artificial Sequence
  Synthetic polypeptide
MAADVVGDVYVLVEHPFEYTGKDGRRVAIRPNERYRLLRRSTEHWWHVRREPGGRPFYLPAQYVRELPALGNPAAAAPPGPHPSPAAPEPLAYDYRFVSAAATAGPDGAPEESGGRASSLCGPAQRGAATQRSSLAPGLPACLYLRPAAPVRPAQSLNDLACAAVSPPAGLLGSSGSFKACSVAGSWVCPRPLARSDSENVYEVIQDLHVPPPEESAEQVDDPPEPVYANIERQPRATSPGAAAAPLPSPVWETHTDAGTGRPYYYNPDTGVTTWESPFEAAEGAASPATSPASVDSHVSLETEWGQYWDEESRRVFFYNPLTGETAWEDEAENEPEEELEMQPGLSPGSPGDPRPPTPETDYPESLTSYPEEDYSPVGSFGEPGPTSPLTTPPGWSCHVSQDKQMLYTNHFTQEQWVRLEDPHGKPYFYNPEDSSVRWELPQVPVPAPRSIHKSSQDGDTPAQASPPEEKTKTLDKAGVLHRTKTADKGKRLRKKHWSASWTVLEGGVLTFFKDSKTSAAGGLRQPSKFSTPEYTVELRGATLSWAPKDKSSRKNVLELRSRDGSEYLIQHDSEAIISTWHKAIAQGIQELR

SEQ ID NO: 39632 - protein, 615 aa, Artificial Sequence
  Synthetic polypeptide
MAADVVGDVYVLVEHPFEYTGKDGRRVAIRPNERYRLLRRSTEHWWHVRREPGGRPFYLPAQYVRELPALGNPAAAAPPGPHPSPAAPEPLAYDYRFVSAAATAGPDGAPEESGGRASSLCGPAQRGAATQRSSLAPGLPACLYLRPAAPVRPAQSLNDLACAAVSPPAGLLGSSGSFKACSVAGSWVCPRPLARSDSENVYEVIQDLHVPPPEESAEQVDDPPEPVYANIERQPRATSPGAAAAPLPSPVWETHTDAGTGRPYYYNPDTGVTTWESPFEAAEGAASPATSPASVDSHVSLETEWGQYWDEESRRVFFYNPLTGETAWEDEAENEPEEELEMQPGLSPGSPGDPRPPTPETDYPESLTSYPEEDYSPVGSFGEPGPTSPLTTPPGWSCHVSQDKQMLYTNHFTQEQWVRLEDPHGKPYFYNPEDSSVRWELPQVPVPAPRSIHKSSQDGDTPAQASPPEEKVPAELDEVGSWEEVSPATAAVRTKTLDKAGVLHRTKTADKGKRLRKKHWSASWTVLEGGVLTFFKDSKTSAAGGLRQPSKFSTPEYTVELRGATLSWAPKDKSSRKNVLELRSRDGSEYLIQHDSEAIISTWHKAIAQGIQELR

SEQ ID NO: 39633 - protein, 247 aa, Artificial Sequence
  Synthetic polypeptide
MQPGLSPGSPGDPRPPTPETDYPESLTSYPEEDYSPVGSFGEPGPTSPLTTPPGWSCHVSQDKQMLYTNHFTQEQVPVPAPRSIHKSSQDGDTPAQASPPEEKVPAELDEVGSWEEVSPATAAVRTKTLDKAGVLHRTKTADKGKRLRKKHWSASWTVLEGGVLTFFKDSKTSAAGGLRQPSKFSTPEYTVELRGATLSWAPKDKSSRKNVLELRSRDGSEYLIQHDSEAIISTWHKAIAQGIQELR

SEQ ID NO: 39634 - protein, 274 aa, Artificial Sequence
  Synthetic polypeptide
MQPGLSPGSPGDPRPPTPETDYPESLTSYPEEDYSPVGSFGEPGPTSPLTTPPGWSCHVSQDKQMLYTNHFTQEQWVRLEDPHGKPYFYNPEDSSVRWELPQVPVPAPRSIHKSSQDGDTPAQASPPEEKVPAELDEVGSWEEVSPATAAVRTKTLDKAGVLHRTKTADKGKRLRKKHWSASWTVLEGGVLTFFKDSKTSAAGGLRQPSKFSTPEYTVELRGATLSWAPKDKSSRKNVLELRSRDGSEYLIQHDSEAIISTWHKAIAQGIQELR

SEQ ID NO: 39635 - protein, 393 aa, Artificial Sequence
  Synthetic polypeptide
MVDIIAKVTRRQSRALPAQVDDPPEPVYANIERQPRATSPGAAAAPLPSPVWETHTDAGTGRPYYYNPDTGVTTWESPFEAAEGAASPATSPASVDSHVSLETEWGQYWDEESRRVFFYNPLTGETAWEDEAENEPEEELEMQPGLSPGSPGDPRPPTPETDYPESLTSYPEEDYSPVGSFGEPGPTSPLTTPPGWSCHVSQDKQMLYTNHFTQEQWVRLEDPHGKPYFYNPEDSSVRWELPQVPVPAPRSIHKSSQDGDTPAQASPPEEKTKTLDKAGVLHRTKTADKGKRLRKKHWSASWTVLEGGVLTFFKDSKTSAAGGLRQPSKFSTPEYTVELRGATLSWAPKDKSSRKNVLELRSRDGSEYLIQHDSEAIISTWHKAIAQGIQELR

SEQ ID NO: 39636 - protein, 74 aa, Artificial Sequence; identical to SEQ ID NO: 4881
  Synthetic polypeptide

SEQ ID NO: 39637 - protein, 131 aa, Artificial Sequence; identical to SEQ ID NO: 5232
  Synthetic polypeptide

SEQ ID NO: 39638 - protein, 977 aa, Artificial Sequence; identical to SEQ ID NO: 5429
  Synthetic polypeptide

SEQ ID NO: 39639 - protein, 948 aa, Artificial Sequence; identical to SEQ ID NO: 5430
  Synthetic polypeptide

SEQ ID NO: 39640 - protein, 38 aa, Artificial Sequence; identical to SEQ ID NO: 5469
  Synthetic polypeptide

SEQ ID NO: 39641 - protein, 188 aa, Artificial Sequence; identical to SEQ ID NO: 6158
  Synthetic polypeptide

SEQ ID NO: 39642 - protein, 15 aa, Artificial Sequence
  Synthetic polypeptide
MGTVAHACNPCTLGG

SEQ ID NO: 39643 - protein, 13 aa, Artificial Sequence
  Synthetic polypeptide
MASICPFLKQWLN

SEQ ID NO: 39644 - protein, 356 aa, Artificial Sequence; identical to SEQ ID NO: 6519
  Synthetic polypeptide

SEQ ID NO: 39645 - protein, 283 aa, Artificial Sequence; identical to SEQ ID NO: 6579
  Synthetic polypeptide

SEQ ID NO: 39646 - protein, 269 aa, Artificial Sequence; identical to SEQ ID NO: 6578
  Synthetic polypeptide

SEQ ID NO: 39647 - protein, 30 aa, Artificial Sequence
  Synthetic polypeptide
  misc_feature (1)..(1): Xaa can be any naturally occurring amino acid
XSHLETLQLLRTAQLPEQLMTWHSRSSTNI

SEQ ID NO: 39648 - protein, 45 aa, Artificial Sequence; identical to SEQ ID NO: 7282
  Synthetic polypeptide

SEQ ID NO: 39649 - protein, 95 aa, Artificial Sequence; identical to SEQ ID NO: 7280
  Synthetic polypeptide

SEQ ID NO: 39650 - protein, 105 aa, Artificial Sequence; identical to SEQ ID NO: 8159
  Synthetic polypeptide

SEQ ID NO: 39651 - protein, 12 aa, Artificial Sequence
  Synthetic polypeptide
METDLECSDSRL

SEQ ID NO: 39652 - protein, 2494 aa, Artificial Sequence; identical to SEQ ID NO: 8333
  Synthetic polypeptide

SEQ ID NO: 39653 - protein, 397 aa, Artificial Sequence
  Synthetic polypeptide
MSDTKVKVAVRVRPMNRRELELNTKCVVEMEGNQTVLHPPPSNTKQGERKPPKVFAFDYCFWSMDESNTTKYAGQEVVFKCLGEGILEKAFQGYNACIFAYGQTGSGKSFSMMGHAEQLGLIPRLCCALFKRISLEQNESQTFKVEVSYMEIYNEKVRDLLDPKGSRQSLKVREHKVLGPYVDGLSQLAVTSFEDIESLMSEGNKSRTVAATNMNEESSRSHAVFNIIITQTLYDLQSGNSGEKVSKVSLVDLAGSERVSKTGAAGERLKEGSNINKSLTTLGLVISSLADQAAGKGKSKFVPYRDSVLTWLLKDNLGGNSQTSMIATISPAADNYEETLSTLRYADRAKRIVNHAVVNEDPNAKVIRELREEVEKLREQLSQAEAVALKVQDAVFY

SEQ ID NO: 39654 - protein, 397 aa, Artificial Sequence
  Synthetic polypeptide
MSDTKVKVAVRVRPMNRRELELNTKCVVEMEGNQTVLHPPPSNTKQGERRPSQVFAFDYCFWSMDESNTTKYAGQEVVFKCLGEGILEKAFQGYNACIFAYGQTGSGKSFSMMGHAEQLGLIPRLCCALFKRISLEQNESQTFKVEVSYMEIYNEKVRDLLDPKGSRQSLKVREHKVLGPYVDGLSQLAVTSFEDIESLMSEGNKSRTVAATNMNEESSRSHAVFNIIITQTLYDLQSGNSGEKVSKVSLVDLAGSERVSKTGAAGERLKEGSNINKSLTTLGLVISSLADQAAGKGKSKFVPYRDSVLTWLLKDNLGGNSQTSMIATISPAADNYEETLSTLRYADRAKRIVNHAVVNEDPNAKVIRELREEVEKLREQLSQAEAVALKVQDAVFY

SEQ ID NO: 39655 - protein, 182 aa, Artificial Sequence
  Synthetic polypeptide
MGSASPGLSSVSPSHLLLPPDTVSRTGLEKAAAGAVGLERRDWSPSPPATPEQGLSAFYLSYFDMLYPEDSSWAAKAPGASSREEPPEEPEQCPVIDSQAPAGSLDLVPGGLTLEEHSLEQVQSMVVGEVLKDIETACKLLNITAGLGSDGTIRMRPSLTPPLKLLPMSTGHGKENKQKNEK

SEQ ID NO: 39656 - protein, 212 aa, Artificial Sequence; identical to SEQ ID NO: 8995
  Synthetic polypeptide

SEQ ID NO: 39657 - protein, 173 aa, Artificial Sequence; identical to SEQ ID NO: 8996
  Synthetic polypeptide

SEQ ID NO: 39658 - protein, 72 aa, Artificial Sequence; identical to SEQ ID NO: 8997
  Synthetic polypeptide

SEQ ID NO: 39659 - protein, 120 aa, Artificial Sequence
  Synthetic polypeptide
  misc_feature (1)..(1): Xaa can be any naturally occurring amino acid
XQEVLPKIHEDKHYPCTLVGTWNTWYGEQDQAVHLWRYEGGYPALTEVMNKLRENKEFLEFRKARSDMLLSRKNQLLLEFSFWNEPVPRSGPNIYELRSYQLRPGTMIEWGNYWRGGSHL

SEQ ID NO: 39660 - protein, 254 aa, Artificial Sequence; identical to SEQ ID NO: 9382
  Synthetic polypeptide

SEQ ID NO: 39661 - protein, 664 aa, Artificial Sequence; identical to SEQ ID NO: 9380
  Synthetic polypeptide

SEQ ID NO: 39662 - protein, 676 aa, Artificial Sequence; identical to SEQ ID NO: 9381
  Synthetic polypeptide

SEQ ID NO: 39663 - protein, 102 aa, Artificial Sequence; identical to SEQ ID NO: 9385
  Synthetic polypeptide

SEQ ID NO: 39664 - protein, 226 aa, Artificial Sequence; identical to SEQ ID NO: 9379
  Synthetic polypeptide

SEQ ID NO: 39665 - protein, 238 aa, Artificial Sequence; identical to SEQ ID NO: 9378
  Synthetic polypeptide

SEQ ID NO: 39666 - protein, 590 aa, Artificial Sequence; identical to SEQ ID NO: 9377
  Synthetic polypeptide

SEQ ID NO: 39667 - protein, 651 aa, Artificial Sequence; identical to SEQ ID NO: 9376
  Synthetic polypeptide

SEQ ID NO: 39668 - protein, 468 aa, Artificial Sequence; identical to SEQ ID NO: 9374
  Synthetic polypeptide

SEQ ID NO: 39669 - protein, 469 aa, Artificial Sequence; identical to SEQ ID NO: 9375
  Synthetic polypeptide

SEQ ID NO: 39670 - protein, 440 aa, Artificial Sequence; identical to SEQ ID NO: 9383
  Synthetic polypeptide

SEQ ID NO: 39671 - protein, 314 aa, Artificial Sequence
  Synthetic polypeptide
  misc_feature (1)..(1): Xaa can be any naturally occurring amino acid
XLEQPTDPVARDGPLSQTSSKPDPSQWESPSFNPFGSHSVLQNSPPLSSEGSYHFDPDNFDESMDPFKPTTTLTSSDFCSPTGNHVNEILESPKKAKSRLITTTEQVKFLCFLLSGCKVKKHETQSLALDACSRDEGAVISQISDISNRDGHATDEEKLASTSCGQKSAGAEVKGEPEEDLEYFECSNVPVSTINHAFSSSEAGIEKETCQKMEEDGSTVLGLLESSAEKAPVSVSCGGESPLDGICLSESDKTAVLTLIREEIITKEIEANEWKKKYEETRQEVLEMRKIVAEYEKTIAQMIDSTVALPLEAT

SEQ ID NO: 39672 - protein, 422 aa, Artificial Sequence
  Synthetic polypeptide
  misc_feature (1)..(1): Xaa can be any naturally occurring amino acid
XRSKLRKPKPVPLRKKAIGGEFSDTNAAVEGTPLPKASYHFSPEELDENTSPLLGDARFQKSPPDLKETPGTLSSDTNDSGVELGEESRSSPLKLEFDFTEDTGNIEARKALPRKLGRKLGSTLTPKIQKDGISKSAGLEQPTDPVARDGPLSQTSSKPDPSQWESPSFNPFGSHSVLQNSPPLSSEGSYHFDPDNFDESMDPFKPTTTLTSSDFCSPTGNHVNEILESPKKAKSRLITTTEQVKFLCFLLSGCKVKKHETQSLALDACSRDEGAVISQISDISNRDGHATDEEKLASTSCGQKSAGAEVKGIEKETCQKMEEDGSTVLGLLESSAEKAPVSVSCGGESPLDGICLSESDKTAVLTLIREEIITKEIEANEWKKKYEETRQEVLEMRKIVAEYEKTIAQMIDSTVALPLEAT

SEQ ID NO: 39673 - protein, 11 aa, Artificial Sequence
  Synthetic polypeptide
MGISIVKQCMT

SEQ ID NO: 39674 - protein, 61 aa, Artificial Sequence
  Synthetic polypeptide
MTRDFKPGDLIFAKMKGYPHWPARVDEVPDGAVKPPTNKLPIFFFGTHETLLGGRDLPCLR

SEQ ID NO: 39675 - protein, 565 aa, Artificial Sequence
  Synthetic polypeptide
LFDTDTWSLQIRKTGAQTATDFPHAIRIWYKTKPEGRSVTWTSDQSGRPCVYTVGSPINNRALFPCQEPPVAMSTWQATVRAAASFVVLMSGENSAKPTQLWEECSSWYYYVTMPMPASTFTIAVGCWTEMKMETWSSNDLATERPFSPSEANFRHVGVCSHMEYPCRFQNASATTQEIIPHRVFAPVCLTGACQETLLRLIPPCLSAAHSVLGAHPFSRLDVLIVPANFPSLGMASPHIMFLSQSILTGGNHLCGTRLCHEIAHAWFGLAIGARDWTEEWLSEGFATHLEDVFWATAQQLAPYEAREQQELRACLRWRRLQDEMQCSPEEMQVLRPSKDKTGHTSDSGASVIKHGLNPEKIFMQVHYLKGYFLLRFLAKRLGDETYFSFLRKFVHTFHGQLILSQDFLQMLLENIPEEKRLELSVENIYQDWLESSGIPKPLQRERRAGAECGLARQVRAEVTKWIGVNRRPRKRKRREKEEVFEKLLPDQLVLLLEHLLEQKTLSPRTLQSLQRTYHLQDQDAEVRHRWCELIVKHKFTKAYKSVERFLQEDQMFHQEKMKLA

SEQ ID NO: 39676 - protein, 684 aa, Artificial Sequence
  Synthetic polypeptide
MDIQLDPARDDLPLMANTSHILVKHYVLDLDVDFESQVIEGTIVLFLEDGNRFKKQNSSIEEACQSESNKACKFGMPEPCHIPVTNARTFSSEMEYNDFAICSKGEKDTSDKDGNHDNQEHASGISSSKYCCDTGNHGSEDFLLVLDCCDLSVLKVEEVDVAAVPGLEKFTRSPELTVVSEEFRNQIVRELVTLPANRWREQLDYYARCSQAPGCGELLFDTDTWSLQIRKTGAQTATDFPHAIRIWYKTKPEGRSVTWTSDQSGRPCVYTVGSPINNRALFPCQEPPVAMSTWQATVRAAASFVVLMSGENSAKPTQLWEECSSWYYYVTMPMPASTFTIAVGCWTEMKMETWSSNDLATERPFSPSEANFRHVGVCSHMEYPCRFQNASATTQEIIPHRVFAPVCLTGACQETLLRLIPPCLSAAHSVLGAHPFSRLDVLIVPANFPSLGMARPSKDKTGHTSDSGASVIKHGLNPEKIFMQVHYLKGYFLLRFLAKRLGDETYFSFLRKFVHTFHGQLILSQDFLQMLLENIPEEKRLELSVENIYQDWLESSGIPKPLQRERRAGAECGLARQVRAEVTKWIGVNRRPRKRKRREKEEVFEKLLPDQLVLLLEHLLEQKTLSPRTLQSLQRTYHLQDQDAEVRHRWCELIVKHKFTKAYKSVERFLQEDQMFHQEKMKLA

SEQ ID NO: 39677 - protein, 783 aa, Artificial Sequence
  Synthetic polypeptide
MDIQLDPARDDLPLMANTSHILVKHYVLDLDVDFESQVIEGTIVLFLEDGNRFKKQNSSIEEACQSESNKACKFGMPEPCHIPVTNARTFSSEMEYNDFAICSKGEKDTSDKDGNHDNQEHASGISSSKYCCDTGNHGSEDFLLVLDCCDLSVLKVEEVDVAAVPGLEKFTRSPELTVVSEEFRNQIVRELVTLPANRWREQLDYYARCSQAPGCGELLFDTDTWSLQIRKTGAQTATDFPHAIRIWYKTKPEGRSVTWTSDQSGRPCVYTVGSPINNRALFPCQEPPVAMSTWQATVRAAASFVVLMSGENSAKPTQLWEECSSWYYYVTMPMPASTFTIAVGCWTEMKMETWSSNDLATERPFSPSEANFRHVGVCSHMEYPCRFQNASATTQEIIPHRVFAPVCLTGACQETLLRLIPPCLSAAHSVLGAHPFSRLDVLIVPANFPSLGMASPHIMFLSQSILTGGNHLCGTRLCHEIAHAWFGLAIGARDWTEEWLSEGFATHLEDVFWATAQQLAPYEAREQQELRACLRWRRLQDEMQCSPEEMQVLRPSKDKTGHTSDSGASVIKHGLNPEKIFMQVHYLKGYFLLRFLAKRLGDETYFSFLRKFVHTFHGQLILSQDFLQMLLENIPEEKRLELSVENIYQDWLESSGIPKPLQRERRAGAECGLARQVRAEVTKWIGVNRRPRKRKRREKEEVFEKLLPDQLVLLLEHLLEQKTLSPRTLQSLQRTYHLQDQDAEVRHRWCELIVKHKFTKAYKSVERFLQEDQMFHQEKMKLA

SEQ ID NO: 39678 - protein, 145 aa, Artificial Sequence
  Synthetic polypeptide
MRMRRPLAGGGKSWGIAHFYKPLQRERRAGAECGLARQVRAEVTKWIGVNRRPRKRKRREKEEVFEKLLPDQLVLLLEHLLEQKTLSPRTLQSLQRTYHLQDQDAEVRHRWCELIVKHKFTKAYKSVERFLQEDQMFHQEKMKLA

SEQ ID NO: 39679 - protein, 124 aa, Artificial Sequence
  Synthetic polypeptide
MRMRRPLAGGGKSWGIAHFYKVTKWIGVNRRPRKRKRREKEEVFEKLLPDQLVLLLEHLLEQKTLSPRTLQSLQRTYHLQDQDAEVRHRWCELIVKHKFTKAYKSVERFLQEDQMFHQEKMKLA

SEQ ID NO: 39680 - protein, 507 aa, Artificial Sequence
  Synthetic polypeptide
VVSEEFRNQIVRELVTLPANRWREQLDYYARCSQAPGCGELLFDTDTWSLQIRKTGAQTATDFPHAIRIWYKTKPEGRSVTWTSDQSGRPCVYTVGSPINNRALFPCQEPPVAMSTWQATVRAAASFVVLMSGENSAKPTQLWEECSSWYYYVTMPMPASTFTIAVGCWTEMKMETWSSNDLATERPFSPSEANFRHVGVCSHMEYPCRFQNASATTQEIIPHRVFAPVCLTGACQETLLRLIPPCLSAAHSVLGAHPFSRLDVLIVPANFPSLGMARPSKDKTGHTSDSGASVIKHGLNPEKIFMQVHYLKGYFLLRFLAKRLGDETYFSFLRKFVHTFHGQLILSQDFLQMLLENIPEEKRLELSVENIYQDWLESSGIPKPLQRERRAGAECGLARQVRAEVTKWIGVNRRPRKRKRREKEEVFEKLLPDQLVLLLEHLLEQKTLSPRTLQSLQRTYHLQDQDAEVRHRWCELIVKHKFTKAYKSVERFLQEDQMFHQEKMKLA

SEQ ID NO: 39681 - protein, 148 aa, Artificial Sequence
  Synthetic polypeptide
  misc_feature (1)..(1): Xaa can be any naturally occurring amino acid
XADPGRAQGAGSGAAAASSPAAGEPLQRERRAGAECGLARQVRAEVTKWIGVNRRPRKRKRREKEEVFEKLLPDQLVLLLEHLLEQKTLSPRTLQSLQRTYHLQDQDAEVRHRWCELIVKHKFTKAYKSVERFLQEDQMFHQEKMKLA

SEQ ID NO: 39682 - protein, 144 aa, Artificial Sequence
  Synthetic polypeptide
  misc_feature (1)..(1): Xaa can be any naturally occurring amino acid
XRAQGAGSGAAAASSPAAGEPLQRERRAGAECGLARQVRAEVTKWIGVNRRPRKRKRREKEEVFEKLLPDQLVLLLEHLLEQKTLSPRTLQSLQRTYHLQDQDAEVRHRWCELIVKHKFTKAYKSVERFLQEDQMFHQEKMKLA

SEQ ID NO: 39683 - protein, 821 aa, Artificial Sequence; identical to SEQ ID NO: 10122
  Synthetic polypeptide

SEQ ID NO: 39684 - protein, 498 aa, Artificial Sequence
  Synthetic polypeptide
GKQLQALRAAQGFSTQGMIINVMSMNQPNRQKDHIMFSLFEKDDNWGETTTAITGTSEHSISQEDIARISKDMEDSVGLDCKRYLGLTVASFLGLLVFLTPIAFILLPPILWRDELEPCGTICEGLFISMAFKLLILLIGTWALFFRKRRADMPRVFVFRALLLVLIFLFVVSYWLFYGVRILDSRDRNYQGIVQYAVSLVDALLFIHYLAIVLLELRQLQPMFTLQVVRSTDGESRFYSLGHLSIQRAALVVLENYYKDFTIYNPNLLTASKFRAAKHMAGLKVYNVDGPSNNATGQSRAMIAAAARRRDSSHNELYYEEAEHERRVKKRKARLVVAVEEAFIHIQRLQAEEQQKAPGEVMDPREAAQAIFPSMARALQKYLRITRQQNYHSMESILQHLAFCITNGMTPKAFLERYLSAGPTLQYDKDRWLSTQWRLVSDEAVTNGLRDGIVFVLKCLDFSLVVNVKKIPFIILSEEFIDPKSHKFVLRLQSETSV

SEQ ID NO: 39685 - protein, 32 aa, Artificial Sequence; identical to SEQ ID NO: 10764
  Synthetic polypeptide

SEQ ID NO: 39686 - protein, 30 aa, Artificial Sequence; identical to SEQ ID NO: 10965
  Synthetic polypeptide

SEQ ID NO: 39687 - protein, 121 aa, Artificial Sequence
  Synthetic polypeptide
EAEASQAAQEAEINARKAKNSVTSLLSIINDLLEQLGQLDTVDLNKLNEIEGTLNKAKDEMKVSDLDRKVSDLENEAKKQEAAIMDYNRDIEEIMKDIRNLEDIRKTLPSGCFNTPSIEKP

SEQ ID NO: 39688 - protein, 109 aa, Artificial Sequence
  Synthetic polypeptide
DQPGQHGPGMRPPLGLREFAPGVPPGRRDLPLHPRGFLPGHAPFRPLGSLGPREYFIPGTRLPPPTHGPQEYPPPPAVRDLLPSGSRDEPPPASQSTSQDCSQALKQSP

SEQ ID NO: 39689 - protein, 94 aa, Artificial Sequence
  Synthetic polypeptide
ETTLAFKSSFLETTAYFFMKPKLGEKEVSPNAFFSIWHEFSSDFKDFWKKENKLLLQERVKEAEEVCRQKKGKSLYKIKPRHDSGIKAKISMKT

SEQ ID NO: 39690 - protein, 56 aa, Artificial Sequence; identical to SEQ ID NO: 12119
  Synthetic polypeptide

SEQ ID NO: 39691 - protein, 157 aa, Artificial Sequence
  Synthetic polypeptide
AREVEVAVSQHRATALQPGRQGKYVVFFFYPLDFTFVCPTEIIAFSDRAEEFKKLNCQVIGASVDSHFCHLAWVNTPKKQGGLGPMNIPLVSDPKRTIAQDYGVLKADEGISFRGLFIIDDKGILRQITVNDLPVGRSVDETLRLVQAFQFTDKHGE

SEQ ID NO: 39692 - protein, 185 aa, Artificial Sequence
  Synthetic polypeptide
AREVEVAVSQHRATALQPGRQGKYVVFFFYPLDFTFVCPTEIIAFSDRAEEFKKLNCQVIGASVDSHFCHLAWVNTPKKQGGLGPMNIPLVSDPKRTIAQDYGVLKADEGISFRGLFIIDDKGILRQITVNDLPVGRSVDETLRLVQAFQFTDKHGEVCPAGWKPGSDTIKPDVQKSKEYFSKQK

SEQ ID NO: 39693 - protein, 31 aa, Artificial Sequence; identical to SEQ ID NO: 12202
  Synthetic polypeptide

SEQ ID NO: 39694 - protein, 54 aa, Artificial Sequence; identical to SEQ ID NO: 12712
  Synthetic polypeptide

SEQ ID NO: 39695 - protein, 53 aa, Artificial Sequence; identical to SEQ ID NO: 12800
  Synthetic polypeptide

SEQ ID NO: 39696 - protein, 500 aa, Artificial Sequence
  Synthetic polypeptide
HLSLLSCFPLSPYDRSTRLFPFAFCQGWKQPEAINTNRCWCHVPCRACRAMSQINFFTNDPASAIGEYEDLRAENQKTKEKCDKIRQERDEAVKKLEEFQKISHMVIEEVNFMQNHLEIEKTCRESAEALATKLNKENKTLKRISMLYMAKLGPDVITEEINIDDEDSTTDTDGAAETCVSVQCQKQIKELRDQIVSVQEEKKILAIELENLKSKLVEVIEEVNKVKQEKTVLNSEVLEQRKVLEKCNRVSMLAVEEYEEMQVNLELEKDLRKKAESFAQEMFIEQNKLKRQSHLLLQSSIPDQQLLKALDENAKLTQQLEEERIQHQQKVKELEEQLENETLHKEIHNLKQQLELLEEDKKELELKYQNSEEKARNLKHSVDELQKRVNQSENSVPPPPPPPPPLPPPPPNPIRSLMSMIRKRSHPSGSGAKKEKATQPETTEEVTDLKRQAVEEMMDRIKKGVHLRPVNQTARPKTKPESSKGCESAVDELKGILASQ

SEQ ID NO: 39697 - protein, 693 aa, Artificial Sequence
  Synthetic polypeptide
HLSLLSCFPLSPYDRSTRLFPFAFCQGWKQPEAINTNRCWCHVPCRACRAMSQINFFTNDPASAIGEYEDLRAENQKTKEKCDKIRQERDEAVKKLEEFQKISHMVIEEVNFMQNHLEIEKTCRESAEALATKLNKENKTLKRISMLYMAKLGPDVITEEINIDDEDSTTDTDGAAETCVSVQCQKQIKELRDQIVSVQEEKKILAIELENLKSKLVEVIEEVNKVKQEKTVLNSEVLEQRKVLEKCNRVSMLAVEEYEEMQVNLELEKDLRKKAESFAQEMFIEQNKLKRQSHLLLQSSIPDQQLLKALDENAKLTQQLEEERIQHQQKVKELEEQLENETLHKEIHNLKQQLELLEEDKKELELKYQNSEEKARNLKHSVDELQKRVNQSENSVPPPPPPPPPLPPPPPNPIRSLMSMIRKRSHPSGSGAKKEKATQPETTEEVTDLKRQAVEEMMDRIKKGVHLRPVNQTARPKTKPESSKGCESAVDELKGILGTLNKSTSSRSLKSLDPENSETELERILRRRKVTAEADSSSPTGILATSESKSMPVLGSVSSVTKTALNKKTLEAEFNSPSPPTPEPGEGPRKLEGCTSSKVTFQPPSSIGCRKKYIDGEKQAEPVVVLDPVSTHEPQTKDQVAEKDPTQHKEDEGEIQPENKEDSIENFFPFHFGFEGVLPLAGVTLSTKARDPK

SEQ ID NO: 39698 - protein, 675 aa, Artificial Sequence
  Synthetic polypeptide
HLSLLSCFPLSPYDRSTRLFPFAFCQGWKQPEAINTNRCWCHVPCRACRAMSQINFFTNDPASAIGEYEDLRAENQKTKEKCDKIRQERDEAVKKLEEFQKISHMVIEEVNFMQNHLEIEKTCRESAEALATKLNKENKTLKRISMLYMAKLGPDVITEEINIDDEDSTTDTDGAAETCVSVQCQKQIKELRDQIVSVQEEKKILAIELENLKSKLVEVIEEVNKVKQEKTVLNSEVLEQRKVLEKCNRVSMLAVEEYEEMQVNLELEKDLRKKAESFAQEMFIEQNKLKRQSHLLLQSSIPDQQLLKALDENAKLTQQLEEERIQHQQKVKELEEQLENETLHKEIHNLKQQLELLEEDKKELELKYQNSEEKARNLKHSVDELQKRVNQSENSVPPPPPPPPPLPPPPPNPIRSLMSMIRKRSHPSGSGAKKEKATQPETTEEVTDLKRQAVEEMMDRIKKGVHLRPVNQTARPKTKPESSKGCESAVDELKGILGTLNKSTSSRSLKSLDPENSETELERILRRRKVTAEADSSSPTGILATSESKSMPVLGSVSSVTKTALNKKTLEAEFNSPSPPTPEPGEGPRKLEGCTSSKVTFQPPSSIGCRKKYIDGEKQAEPVVVLDPVSTHEPQTKDQVAEKDPTQHKEDEGEIQPENKEDSIENVRETDSSNC

SEQ ID NO: 39699 - protein, 45 aa, Artificial Sequence
  Synthetic polypeptide
GQARWLTPVISALGRPRRADHLRSGVQDQPGQQGPVTLHKKIHTT

SEQ ID NO: 39700 - protein, 132 aa, Artificial Sequence
  Synthetic polypeptide
GQARWLTPVISALGRPRRADHLRSGVQDQPGQQGPVTLHKKIHTTTVLFIVQIHILLIQAITQAKLQMHLMILQMTGLSILALLGKSTTTIVEQKFHNGKNQKSGLKENRDKKKQTRWQSTASQKIGITEER

SEQ ID NO: 39701 - protein, 657 aa, Artificial Sequence; identical to SEQ ID NO: 13430
  Synthetic polypeptide

SEQ ID NO: 39702 - protein, 63 aa, Artificial Sequence
  Synthetic polypeptide
DSGQWKTAPSATTIGQAGSKQASRALPPCPWNTQTSGSRATACTPGSGTFVTLVSSVKPARPA

SEQ ID NO: 39703 - protein, 440 aa, Artificial Sequence; identical to SEQ ID NO: 13767
  Synthetic polypeptide

SEQ ID NO: 39704 - protein, 2046 aa, Artificial Sequence; identical to SEQ ID NO: 13766
  Synthetic polypeptide

SEQ ID NO: 39705 - protein, 2056 aa, Artificial Sequence; identical to SEQ ID NO: 13764
  Synthetic polypeptide

SEQ ID NO: 39706 - protein, 2056 aa, Artificial Sequence; identical to SEQ ID NO: 13765
  Synthetic polypeptide

SEQ ID NO: 39707 - protein, 2043 aa, Artificial Sequence; identical to SEQ ID NO: 13762
  Synthetic polypeptide

SEQ ID NO: 39708 - protein, 155 aa, Artificial Sequence; identical to SEQ ID NO: 13768
  Synthetic polypeptide

SEQ ID NO: 39709 - protein, 31 aa, Artificial Sequence
  Synthetic polypeptide
FLKDLELEIPFGPAIPLLGSCSQCRNRICCC

SEQ ID NO: 39710 - protein, 27 aa, Artificial Sequence
  Synthetic polypeptide
SQHLGRPRQADHLMPGVQDQPNMTSVP

SEQ ID NO: 39711 - protein, 27 aa, Artificial Sequence
  Synthetic polypeptide
IWLTEDATALLQRPGWRRRWRPSSPRL

SEQ ID NO: 39712 - protein, 77 aa, Artificial Sequence
  Synthetic polypeptide
SEAHVLLALQVSWSCSTALQSTPCPGQLPSARGPLVTGGWGQREKLIGSESSRLLERQLQVCVLQIMGSCVPSCPTP

SEQ ID NO: 39713 - protein, 81 aa, Artificial Sequence
  Synthetic polypeptide
SEAHVLLALQVSWSCSTALQSTPCPGQLPSARGPLVTGGWGQREKLIGSESSRLLERQLQVCVLQIMGSCVPSCPTPSWTA

SEQ ID NO: 39714 - protein, 135 aa, Artificial Sequence
  Synthetic polypeptide
SEAHVLLALQVSWSCSTALQSTPCPGQLPSARGPLVTGGWGQREKLIGSESSRLLERQLQVCVLQIMGSCVPSCPTPSWTASASSTPPGSCLERSSGSAEAMTLQPSWSGSRSVWTASSCSSTPTSWTSPMSSRK

SEQ ID NO: 39715 - protein, 66 aa, Artificial Sequence; identical to SEQ ID NO: 15043
  Synthetic polypeptide

SEQ ID NO: 39716 - protein, 64 aa, Artificial Sequence
  Synthetic polypeptide
ASGDPSTGQQHPFITAETWKRPKCPEMLPTSQTLRLINLCLKFPNLTMFKTMAEMCICKMKITR

SEQ ID NO: 39717 - protein, 876 aa, Artificial Sequence; identical to SEQ ID NO: 15565
  Synthetic polypeptide

SEQ ID NO: 39718 - protein, 527 aa, Artificial Sequence; identical to SEQ ID NO: 15564
  Synthetic polypeptide

SEQ ID NO: 39719 - protein, 273 aa, Artificial Sequence; identical to SEQ ID NO: 15566
  Synthetic polypeptide

SEQ ID NO: 39720 - protein, 54 aa, Artificial Sequence
  Synthetic polypeptide
RSICCSFAPRDSGSTTWCFIQKSQRCLLSLTGNFLPWATPLLMWPTAAWLITCH

SEQ ID NO: 39721 - protein, 59 aa, Artificial Sequence
  Synthetic polypeptide
RSICCSFAPRDSGSTTWCFIQKSQRCLLSLTGNFLPWATPLLMWPTAAWLITCHPVFPC

SEQ ID NO: 39722 - protein, 37 aa, Artificial Sequence
  Synthetic polypeptide
ILLLYPSCVSQTLQSAFSLTAVKRKSGFSFLLGIVGF

SEQ ID NO: 39723 - protein, 45 aa, Artificial Sequence
  Synthetic polypeptide
ILLLYPSCVSQTLQSAFSLTAVKRKSGFSFLLGIVGFDSSQILHY

SEQ ID NO: 39724 - protein, 13 aa, Artificial Sequence
  Synthetic polypeptide
ELGVTAGGLPTRL

SEQ ID NO: 39725 - protein, 23 aa, Artificial Sequence
  Synthetic polypeptide
CQMVTQIYKKYSNVLEMAWLQYA

SEQ ID NO: 39726 - protein, 22 aa, Artificial Sequence
  Synthetic polypeptide
SQHFGRPSCVPLPATGVKMSFA

SEQ ID NO: 39727 - protein, 16 aa, Artificial Sequence
  Synthetic polypeptide
GQEFKTSLANMDMFKE

SEQ ID NO: 39728 - protein, 125 aa, Artificial Sequence; identical to SEQ ID NO: 16901
  Synthetic polypeptide

SEQ ID NO: 39729 - protein, 83 aa, Artificial Sequence
  Synthetic polypeptide
GQARWLTPVIPALWEAETGGSRGQEMETIPANTLIQEDILDTGNDKNGKEEVIKRKIPYILKRQLYENKPRRPYILKRDSYYY

SEQ ID NO: 39730 - protein, 14 aa, Artificial Sequence
  Synthetic polypeptide
LLITAEDQSMWIQS

SEQ ID NO: 39731 - protein, 9 aa, Artificial Sequence
  Synthetic polypeptide
IVEQTLKTN

SEQ ID NO: 39732 - protein, 338 aa, Artificial Sequence; identical to SEQ ID NO: 17227
  Synthetic polypeptide

SEQ ID NO: 39733 - protein, 43 aa, Artificial Sequence; identical to SEQ ID NO: 17343
  Synthetic polypeptide

SEQ ID NO: 39734 - protein, 314 aa, Artificial Sequence; identical to SEQ ID NO: 17399
  Synthetic polypeptide

SEQ ID NO: 39735 - protein, 42 aa, Artificial Sequence
  Synthetic polypeptide
LQEMGPLGVPQRGQAACRHQLRPGQGRALGEGPGQPQWDVCE

SEQ ID NO: 39736 - protein, 31 aa, Artificial Sequence; identical to SEQ ID NO: 18130
  Synthetic polypeptide

SEQ ID NO: 39737 - protein, 341 aa, Artificial Sequence; identical to SEQ ID NO: 18535
  Synthetic polypeptide

SEQ ID NO: 39738 - protein, 51 aa, Artificial Sequence; identical to SEQ ID NO: 18777
  Synthetic polypeptide

SEQ ID NO: 39739 - protein, 30 aa, Artificial Sequence; identical to SEQ ID NO: 18927
  Synthetic polypeptide

SEQ ID NO: 39740 - protein, 370 aa, Artificial Sequence; identical to SEQ ID NO: 19419
  Synthetic polypeptide

SEQ ID NO: 39741 - protein, 243 aa, Artificial Sequence; identical to SEQ ID NO: 19421
  Synthetic polypeptide

SEQ ID NO: 39742 - protein, 331 aa, Artificial Sequence; identical to SEQ ID NO: 19416
  Synthetic polypeptide

SEQ ID NO: 39743 - protein, 277 aa, Artificial Sequence; identical to SEQ ID NO: 19420
  Synthetic polypeptide

SEQ ID NO: 39744 - protein, 36 aa, Artificial Sequence; identical to SEQ ID NO: 19426
  Synthetic polypeptide

SEQ ID NO: 39745 - protein, 111 aa, Artificial Sequence; identical to SEQ ID NO: 19624
  Synthetic polypeptide

SEQ ID NO: 39746 - protein, 1166 aa, Artificial Sequence; identical to SEQ ID NO: 19623
  Synthetic polypeptide

SEQ ID NO: 39747 - protein, 1167 aa, Artificial Sequence; identical to SEQ ID NO: 19621
  Synthetic polypeptide

SEQ ID NO: 39748 - protein, 1218 aa, Artificial Sequence; identical to SEQ ID NO: 19954
  Synthetic polypeptide

SEQ ID NO: 39749 - protein, 1262 aa, Artificial Sequence; identical to SEQ ID NO: 19956
  Synthetic polypeptide

SEQ ID NO: 39750 - protein, 1285 aa, Artificial Sequence; identical to SEQ ID NO: 19950
  Synthetic polypeptide

SEQ ID NO: 39751 - protein, 1219 aa, Artificial Sequence; identical to SEQ ID NO: 19953
  Synthetic polypeptide

SEQ ID NO: 39752 - protein, 1242 aa, Artificial Sequence; identical to SEQ ID NO: 19955
  Synthetic polypeptide

SEQ ID NO: 39753 - protein, 60 aa, Artificial Sequence
  Synthetic polypeptide
DSLLRDQGWALGEFMNPRICRPGAAAAARHPGSPGGQLAPRGLPRAQLRSLGGAGGQTGG

SEQ ID NO: 39754 - protein, 181 aa, Artificial Sequence
  Synthetic polypeptide
DSLLRDQGWALGEFMNPRICRPGAAAAARHPGSPGGQLAPRGLPRAQLRSLGQRGRPLAGGAVGQIPWGTGRAAFLRCHIYPTQLPSLLVPPRGIEAGAGGQSGRGPGPCPLPAAGGTGGPQHAGPLQWHCQCCRRCSGGRQGGRLDWARGRHEEDHARLPAGGEVWAPGGRGRLAPLRPG

SEQ ID NO: 39755 - protein, 188 aa, Artificial Sequence
  Synthetic polypeptide
DSLLRDQGWALGEFMNPRICRPGAAAAARHPGSPGGQLAPRGLPRAQLRSLGQRGRPLAGGAVGQIPWGTGRAAFLRCHIYPTQLPSLLVPPRGIEAGAGGQSGRGPGPCPLPAAGGTGGPQHAGPLQWHCQCCRRCSGGRQGGRLDWARGRHEEDHARLPAGGEVWAPGGRGRLAPLRPGRAGDGEG

SEQ ID NO: 39756 - protein, 38 aa, Artificial Sequence; identical to SEQ ID NO: 20282
  Synthetic polypeptide

SEQ ID NO: 39757 - protein, 50 aa, Artificial Sequence
  Synthetic polypeptide
SVIVSHHTQMGLSSFRKTSSGLPLILHCVYAKGTGLRNQETTRRRRKENH

SEQ ID NO: 39758 - protein, 30 aa, Artificial Sequence
  Synthetic polypeptide
KETFFLQQQGNDAKNGYHRPCHRPGVHEPS

SEQ ID NO: 39759 - protein, 60 aa, Artificial Sequence
  Synthetic polypeptide
MGLSPASAPRPQTCFSLSTTKTVTSLAYLTHPMLGVGQGAQTLPAPIPAPQAACLHLLPH

SEQ ID NO: 39760 - protein, 117 aa, Artificial Sequence; identical to SEQ ID NO: 21624
  Synthetic polypeptide

SEQ ID NO: 39761 - protein, 36 aa, Artificial Sequence; identical to SEQ ID NO: 21626
  Synthetic polypeptide

SEQ ID NO: 39762 - protein, 31 aa, Artificial Sequence
  Synthetic polypeptide
TCLYNMDAPGKPPTKRKKQAQKDCPTHSGVS

SEQ ID NO: 39763 - protein, 399 aa, Artificial Sequence
  Synthetic polypeptide
ELGRTAGGQQQALPLGSPRCDLKENLLKDNCAPESIEFPVSEARVLEDRPLSDKGSGDSSQVTQVSPQRIALRLRPDDSKNFSIQVRQVEDYPVDIYYLMDLSYSMKDDLWSIQNLGTKLATQMRKLTSNLRIGFGAFVDKPVSPYMYISPPEALENPCYDMKTTCLPMFGYKHVLTLTDQVTRFNEEVKKQSVSRNRDAPEGGFDAIMQATVCDEKIGWRNDASHLLVFTTDAKTHIALDGRLAGIVQPNDGQCHVGSDNHYSASTTMDYPSLGLMTEKLSQKNINLIFAVTENVVNLYQNYSELIPGTTVGVLSMDSSNVLQLIVDAYGKIRSKVELEVRDLPEELSLSFNATCLNNEVIPGLKSCMGLKIGDTVRWAGQGLCPGASVGTQPPFFLL

SEQ ID NO: 39764 - protein, 744 aa, Artificial Sequence
  Synthetic polypeptide
ELGRTAGGQQQALPLGSPRCDLKENLLKDNCAPESIEFPVSEARVLEDRPLSDKGSGDSSQVTQVSPQRIALRLRPDDSKNFSIQVRQVEDYPVDIYYLMDLSYSMKDDLWSIQNLGTKLATQMRKLTSNLRIGFGAFVDKPVSPYMYISPPEALENPCYDMKTTCLPMFGYKHVLTLTDQVTRFNEEVKKQSVSRNRDAPEGGFDAIMQATVCDEKIGWRNDASHLLVFTTDAKTHIALDGRLAGIVQPNDGQCHVGSDNHYSASTTMDYPSLGLMTEKLSQKNINLIFAVTENVVNLYQNYSELIPGTTVGVLSMDSSNVLQLIVDAYGKIRSKVELEVRDLPEELSLSFNATCLNNEVIPGLKSCMGLKIGDTVSFSIEAKVRGCPQEKEKSFTIKPVGFKDSLIVQVTFDCDCACQAQAEPNSHRCNNGNGTFECGVCRCGPGWLGSQCECSEEDYRPSQQDECSPREGQPVCSQRGECLCGQCVCHSSDFGKITGKYCECDDFSCVRYKGEMCSGHGQCSCGDCLCDSDWTGYYCNCTTRTDTCMSSNGLLCSGRGKCECGSCVCIQPGSYGDTCEKCPTCPDACTFKKECVECKKFDRGALHDENTCNRYCRDEIESVKELKDTGKDAVNCTYKNEDDCVVRFQYYEDSSGKSILYVVEEPECPKGPDILVVLLSVMGAILLIGLAALLIWKLLITIHDRKEFAKFEEERARAKWDTANNPLYKEATSTFTNITYRGT

SEQ ID NO: 39765 - protein, 754 aa, Artificial Sequence
  Synthetic polypeptide
ELGRTAGGQQQALPLGSPRCDLKENLLKDNCAPESIEFPVSEARVLEDRPLSDKGSGDSSQVTQVSPQRIALRLRPDDSKNFSIQVRQVEDYPVDIYYLMDLSYSMKDDLWSIQNLGTKLATQMRKLTSNLRIGFGAFVDKPVSPYMYISPPEALENPCYDMKTTCLPMFGYKHVLTLTDQVTRFNEEVKKQSVSRNRDAPEGGFDAIMQATVCDEKIGWRNDASHLLVFTTDAKTHIALDGRLAGIVQPNDGQCHVGSDNHYSASTTMDYPSLGLMTEKLSQKNINLIFAVTENVVNLYQNYSELIPGTTVGVLSMDSSNVLQLIVDAYGKIRSKVELEVRDLPEELSLSFNATCLNNEVIPGLKSCMGLKIGDTVSFSIEAKVRGCPQEKEKSFTIKPVGFKDSLIVQVTFDCDCACQAQAEPNSHRCNNGNGTFECGVCRCGPGWLGSQCECSEEDYRPSQQDECSPREGQPVCSQRGECLCGQCVCHSSDFGKITGKYCECDDFSCVRYKGEMCSGHGQCSCGDCLCDSDWTGYYCNCTTRTDTCMSSNGLLCSGRGKCECGSCVCIQPGSYGDTCEKCPTCPDACTFKKECVECKKFDRGALHDENTCNRYCRDEIESVKELKDTGKDAVNCTYKNEDDCVVRFQYYEDSSGKSILYVVEEPECPKGPDILVVLLSVMGAILLIGLAALLIWKLLITIHDRKEFAKFEEERARAKWDTEILLYYCSFILVHQSLESLRTEFTSKQKDGN

SEQ ID NO: 39766 - protein, 56 aa, Artificial Sequence; identical to SEQ ID NO: 22024
  Synthetic polypeptide

SEQ ID NO: 39767 - protein, 30 aa, Artificial Sequence
  Synthetic polypeptide
LQENKLRAPTDSTLCTLCKKPGEKGFFPTS

SEQ ID NO: 39768 - protein, 22 aa, Artificial Sequence
  Synthetic polypeptide
MKKGNLLIISLDAKKVTPDDIN

SEQ ID NO: 39769 - protein, 4928 aa, Artificial Sequence
  Synthetic polypeptide
SQLLGRLSQENCLSLGGGGCSELRSQYCTPALEAETKTKDEMAAAEEKVGKNEQGEPEDLKKPEGKNRSAAAVKNEKEQKNQEADVQEVKASTLSPGGGVTVFFHAIISLHFPFNPDLHKVFIRGGEEFGESKWDSNICELHYTRDLGHDRVLVEGIVCISKKHLDKYIPYKYVIYNGESFEYEFIYKHQQKKGEYVNRCLFIKSSLLGSGDWHQYYDIVYMKPHGRLQKVMNHITDGPRKDLVKGKQIAAALMLDSTFSILQTWDTINLNSFFTQFEQFCFVLQQPMIYEGQAQLWTDLQYREKEVKRYLWQHLKKHVVPLPDGKSTDFLPVDCPVRSKLKTGLIVLFVVEKIELLLEGSLDWLCHLLTSDASSPDEFHRDLSHILGIPQSWRLYLVNLCQRCMDTRTYTWLGALPVLHCCMELAPRHKDAWRQPEDTWAALEGLSFSPFREQMLDTSSLLQFMREKQHLLSIDEPLFRSWFSLLPLSHLVMYMENFIEHLGRFPAHILDCLSGIYYRLPGLEQVLNTQDVQDVQNVQNILEMLLRLLDTYRDKIPEEALSPSYLTVCLKLHEAICSSTKLLKFYELPALSAEIVCRMIRLLSLVDSAGQRDETGNNSVQTVFQGTLAATKRWLREVFTKNMLTSSGASFTYVKEIEVWRRLVEIQFPAEHGWKESLLGDMEWRLTKEEPLSQITAYCNSCWDTKGLEDSVAKTFEKCIIEAVSSACQSQTSILQGFSYSDLRKFGIVLSAVITKSWPRTADNFNDILKHLLTLADVKHVFRLCGTDEKILANVTEDAKRLIAVADSVLTKVVGDLLSGTILVGQLELIIKHKNQFLDIWQLREKSLSPQDEQCAVEEALDWRREELLLLKKEKRCVDSLLKMCGNVKHLIQVDFGVLAVRHSQDLSSKRLNDTVTVRLSTSSNSQRATHYHLSSQVQEMAGKIDLLRDSHIFQLFWREAAEPLSEPKEDQEAAELLSEPEEESERHILELEEVYDYLYQPSYRKFIKLHQDLKSGEVTLAEIDVIFKDFVNKYTDLDSELKIMCTVDHQDQRDWIKDRVEQIKEYHHLHQAVHAAKVILQVKESLGLNGDFSVLNTLLNFTDNFDDFRRETLDQINQELIQAKKLLQDISEARCKGLQALSLRKEFICWVREALGGINELKVFVDLASISAGENDIDVDRVACFHDAVQGYASLLFKLDPSVDFSAFMKHLKKLWKALDKDQYLPRKLCDSARNLEWLKTVNESHGSVERSSLTLATAINQRGIYVIQAPKGGQKISPDTVLHLILPESPGSHEESREYSLEEVKELLNKLMLMSGKKDRNNTEVERFSEVFCSVQRLSQAFIDLHSAGNMLFRTWIAMAYCSPKQGVSLQMDFGLDLVTELKEGGDVTELLAALCRQMEHFLDSWKRFVTQKRMEHFYLNFYTAEQLVYLSTELRKQPPSDAALTMLSFIKSNCTLRDVLRASVGCGSEAARYRMRRVMEELPLMLLSEFSLVDKLRIIMEQSMRCLPAFLPDCLDLETLGHCLAHLAGMGGSPVERCLPRGLQVGQPNLVVCGHSEVLPAALAVYMQTPSQPLPTYDEVLLCTPATTFEEVALLLRRCLTLGSLGHKVYSLLFADQLSYEVARQAEELFHNLCTQQHREDYQLVMVCDGDWEHCYLPSAFSQHKVFVTPQAPLEAIQAYLAGHYRVPKQTLSAAAVFNDRLCVGIVASERAGVGKSLYVKRLHDKMKMQLNVKNVPLKTIRLIDPQVDESRVLGALLPFLDAQYQKVPVLFHLDVTSSVQTGIWVFLFKLLILQYLMDINGKMWLRNPCHLYIVEILERRTSVPSRSSSALRTRVPQFSFLDIFPKVTCRPPKEVIDMELSALRSDTEPGMDLWEFCSETFQRPYQYLRRFNQNQDLDTFQYQEGSVEGTPEECLQHFLFHCGVINPSWSELRNFARFLNYQLRDCEASLFCNPSFIGDTLRGFKKFVVTFMIFMARDFATPSLHTSDQSPGKHMVTMDGVREEDLAPFSLRKRWESEPHPYVFFNDDHTTMTFIGFHLQPNINGSVDAISHLTGKVIKRDVMTRDLYQGLLLQRVPFNVDFDKLPRHKKLERLCLTLGIPQATDPDKTYELTTDNMLKILAIEMRFRCGIPVIIMGETGCGKTRLIKFLSDLRRGGTNADTIKLVKVHGGTTADMIYSRVREAENVAFANKDQHQLDTILFFDEANTTEAISCIKEVLCDHMVDGQPLAEDSGLHIIAACNPYRKHSEEMICRLESAGLGYRVSMEETADRLGSIPLRQLVYRVHALPPSLIPLVWDFGQLSDVAEKLYIQQIVQRLVESISLDENGTRVITEVLCASQGFMRKTEDECSFVSLRDVERCVKVFRWFHEHSAMLLAQLNAFLSKSSVSKNHTERDPVLWSLMLAIGVCYHASLEKKDSYRKAIARFFPKPYDDSRLLLDEITRAQDLFLDGVPLRKTIAKNLALKENVFMMVVCIELKIPLFLVGKPGSSKSLAKTIVADAMQGPAAYSDLFRSLKQVHLVSFQCSPHSTPQGIISTFRQCARFQQGKDLQQYVSVVVLDEVGLAEDSPKMPLKTLHPLLEDGCIEDDPAPHKKVGFVGISNWALDPAKMNRGIFVSRGSPNETELIESAKGICSSDILVQDRVQGYFASFAKAYETVCKRQDKEFFGLRDYYSLIKMVFAAAKASNRKPSPQDIAQAVLRNFSGKDDIQALDIFLANLPEAKCSEEVSPMQLIKQNIFGPSQKVPGGEQEDAESRYLLVLTKNYVALQILQQTFFEGDQQPEIIFGSGFPKDQEYTQLCRNINRVKICMETGKMVLLLNLQNLYESLYDALNQYYVHLGGQKYVDLGLGTHRVKCRVHPNFRLIVIEEKDVVYKHFPIPLINRLEKHYLDINTVLEKWQKSIVEELCAWVEKFINVKAHHFQKRHKYSPSDVFIGYHSDACASVVLQVIERQGPRALTEELHQKVSEEAKSILLNCATPDAVVRLSAYSLGGFAAEWLSQEYFHRQRHNSFADFLQAHLHTADLERHAIFTEITTFSRLLTSHDCEILESEVTGRAPKPTLLWLQQFDTEYSFLKEVRNCLTNTAKCKILIFQTDFEDGIRSAQLIASAKYSVINEINKIRENEDRIFVYFITKLSRVGRGTAYVGFHGGLWQSVHIDDLRRSTLMVSDVTRLQHVTISQLFAPGDLPELGLEHRAEDGHEEAMETEASTSGEVAEVAEEAMETESSEKVGKETSELGGSDVSILDTTRLLRSCVQSAVGMLRDQNESCTRNMRRVVLLLGLLNEDDACHASFLRVSKMRLSVFLKKQEESQFHPLEWLAREACNQDALQEAGTFRHTLWKRVQGAVTPLLASMISFIDRDGNLELLTRPDTPPWARDLWMFIFSDTMLLNIPLVMNNERHKGEMAYIVVQNHMNLSENASNNVPFSWKIKDYLEELWVQAQYITDAEGLPKKFVDIFQQTPLGRFLAQLHGEPQQELLQCYLKDFILLTMRVSTEEELKFLQMALWSCTRKLKAASEAPEEEVSLPWVHLAYQRFRSRLQNFSRILTIYPQVLHSLMEARWNHELAGCEMTLDAFAAMACTEMLTRNTLKPSPQAWLQLVKNLSMPLELICSDEHMQGSGSLAQAVIREVRAQWSRIFSTALFVEHVLLGTESRVPELQGLVTEHVFLLDKCLRENSDVKTHGPFEAVMRTLCECKETASKTLSRFGIQPCSICLGDAKDPVCLPCDHVHCLRCLRAWFASEQMICPYCLTALPDEFSPAVSQAHREAIEKHARFRQMCNSFFVDLVSTICFKDNAPPEKEVIESLLSLLFVQKGRLRDAAQRHCEHTKSLSPFNDVVDKTPVIRSVILKLLLKYSFHDVKDYIQEYLTLLKKKAFITEDKTELYMLFINCLEDSILEKTSAYSRNDELNHLEEEGRFLKAYSPASRGREPANEASVEYLQEVARIRLCLDRAADFLSEPEGGPEMAKEKQCYLQQVKQFCIRVENDWHRVYLVRKLSSQRGMEFVQGLSKPGRPHQWVFPKDVVKQQGLRQDHPGQMDRYLVYGDEYKALRDAVAKAVLECKPLGIKTALKACKTPQSQQSAYFLLTLFREVAILYRSHNASLHPTPEQCEAVSKFIGECKILSPPDISRFATSLVDNSVPLLRAGPSDSNLDGTVTEMAIHAAAVLLCGQNELLEPLKNLAFSPATMAHAFLPTMPEDLLAQARRWKGLERVHWYTCPNGHPCSVGECGRPMEQSICIDCHAPIGGIDHKPRDGFHLVKDKADRTQTGHVLGNPQRRDVVTCDRGLPPVVFLLIRLLTHLALLLGASQSSQALINIIKPPVRDPKGFLQQHILKDLEQLAKMLGHSADETIGVVHLVLRRLLQEQHQLSSRRLLNFDTELSTKEMRNNWEKEIAAVISPELEHLDKTLPTMNNLISQDKRISSNPVAKIIYGDPVTFLPHLPRKSVVHCSKIWSCRKRITVEYLQHIVEQKNGKERVPILWHFLQKEAELRLVKFLPEILALQRDLVKQFQNVQQVEYSSIRGFLSKHSSDGLRQLLHNRITVFLSTWNKLRRSLETNGEINLPKDYCSTDLDLDTEFEILLPRRRGLGLCATALVSYLIRLHNEIVYAVEKLSKENNSYSVDAAEVTELHVISYEVERDLTPLILSNCQYQVEEGRETVQEFDLEKIQRQIVSRFLQGKPRLSLKGIPTLVYRHDWNYEHLFMDIKNKMAQDSLPSSVISAISGQLQSYSDACEVLSVVEVTLGFLSTAGGDPNMQLNVYTQDILQMGDQTIHVLKALNRCQLKHTIALWQFLSAHKSEQLLRLHKEPFGEISSRYKADLSPENAKLLSTFLNQTGLDAFLLELHEMIILKLKNPQTQTEERFRPQWSLRDTLVSYMQTKESEILPEMASQFPEEILLASCVSVWKTAAVLKWNREMR

SEQ ID NO: 39770 - protein, 1271 aa, Artificial Sequence
  Synthetic polypeptide
SQLLGRLSQENCLSLGGGGCSELRSQYCTPALEAETKTKDEMAAAEEKVGKNEQGEPEDLKKPEGKNRSAAAVKNEKEQKNQEADVQEVKASTLSPGGGVTVFFHAIISLHFPFNPDLHKVFIRGGEEFGESKWDSNICELHYTRDLGHDRVLVEGIVCISKKHLDKYIPYKYVIYNGESFEYEFIYKHQQKKGEYVNRCLFIKSSLLGSGDWHQYYDIVYMKPHGRLQKVMNHITDGPRKDLVKGKQIAAALMLDSTFSILQTWDTINLNSFFTQFEQFCFVLQQPMIYEGQAQLWTDLQYREKEVKRYLWQHLKKHVVPLPDGKSTDFLPVDCPVRSKLKTGLIVLFVVEKIELLLEGSLDWLCHLLTSDASSPDEFHRDLSHILGIPQSWRLYLVNLCQRCMDTRTYTWLGALPVLHCCMELAPRHKDAWRQPEDTWAALEGLSFSPFREQMLDTSSLLQFMREKQHLLSIDEPLFRSWFSLLPLSHLVMYMENFIEHLGRFPAHILDCLSGIYYRLPGLEQVLNTQDVQDVQNVQNILEMLLRLLDTYRDKIPEEALSPSYLTVCLKLHEAICSSTKLLKFYELPALSAEIVCRMIRLLSLVDSAGQRDETGNNSVQTVFQGTLAATKRWLREVFTKNMLTSSGASFTYVKEIEVWRRLVEIQFPAEHGWKESLLGDMEWRLTKEEPLSQITAYCNSCWDTKGLEDSVAKTFEKCIIEAVSSACQSQTSILQGFSYSDLRKFGIVLSAVITKSWPRTADNFNDILKHLLTLADVKHVFRLCGTDEKILANVTEDAKRLIAVADSVLTKVVGDLLSGTILVGQLELIIKHKNQFLDIWQLREKSLSPQDEQCAVEEALDWRREELLLLKKEKRCVDSLLKMCGNVKHLIQVDFGVLAVRHSQDLSSKRLNDTVTVRLSTSSNSQRATHYHLSSQVQEMAGKIDLLRDSHIFQLFWREAAEPLSEPKEDQEAAELLSEPEEESERHILELEEVYDYLYQPSYRKFIKLHQDLKSGEVTLAEIDVIFKDFVNKYTDLDSELKIMCTVDHQDQRDWIKDRVEQIKEYHHLHQAVHAAKVILQVKESLGLNGDFSVLNTLLNFTDNFDDFRRETLDQINQELIQAKKLLQDISEARCKGLQALSLRKEFICWVREALGGINELKVFVDLASISAGENDIDVDRVACFHDAVQGYASLLFKLDPSVDFSAFMKHLKKLWKALDKDQYLPRKLVSLILSLMQILLNRALLSNVRAVTVEMVAHLCGRFVHSRFQ

SEQ ID NO: 39771 - protein, 784 aa, Artificial Sequence
  Synthetic polypeptide
SQLLGRLSQENCLSLGGGGCSELRSQYCTPALEAETKTKDEMAAAEEKVGKNEQGEPEDLKKPEGKNRSAAAVKNEKEQKNQEADVQEVKASTLSPGGGVTVFFHAIISLHFPFNPDLHKVFIRGGEEFGESKWDSNICELHYTRDLGHDRVLVEGIVCISKKHLDKYIPYKYVIYNGESFEYEFIYKHQQKKGEYVNRCLFIKSSLLGSGDWHQYYDIVYMKPHGRLQKVMNHITDGPRKDLVKGKQIAAALMLDSTFSILQTWDTINLNSFFTQFEQFCFVLQQPMIYEGQAQLWTDLQYREKEVKRYLWQHLKKHVVPLPDGKSTDFLPVDCPVRSKLKTGLIVLFVVEKIELLLEGSLDWLCHLLTSDASSPDEFHRDLSHILGIPQSWRLYLVNLCQRCMDTRTYTWLGALPVLHCCMELAPRHKDAWRQPEDTWAALEGLSFSPFREQMLDTSSLLQFMREKQHLLSIDEPLFRSWFSLLPLSHLVMYMENFIEHLGRFPAHILDCLSGIYYRLPGLEQVLNTQDVQDVQNVQNILEMLLRLLDTYRDKIPEEALSPSYLTVCLKLHEAICSSTKLLKFYELPALSAEIVCRMIRLLSLVDSAGQRDETGNNSVQTVFQGTLAATKRWLREVFTKNMLTSSGASFTYVKEIEVWRRLVEIQFPAEHGWKESLLGDMEWRLTKEEPLSQITAYCNSCWDTKGLEDSVAKTFEKCIIEAVSSACQVNNLSSWETDSGSQLCSAMTQLRAMKHPLGLSSSANSEIGKWAPSSLAKGNGAEI

SEQ ID NO: 39772 - protein, 48 aa, Artificial Sequence; identical to SEQ ID NO: 22788
  Synthetic polypeptide

SEQ ID NO: 39773 - protein, 360 aa, Artificial Sequence
  Synthetic polypeptide
EWSGIQKATLMDLQLSDSNFRRHILLQYLILFQYLKGQVKFKSSNYVLTDEQSLWIEDTTKSVYQLLSENPPDGERFSKMVEHILNTEENWNSWKNEGCPSFVKERTSDTKPTRIIRKRTAPEDFLGKGPTKKILMGNEELTRLWNLCPDNMEACKSETREHMPTLEEFFEEAIEQADPENMVENEYKAVNNSNYGWRALRLLARRSPHFFQPTNQQFKSLPEYLENMVIKLAKELPPPSEEIKTGEDEDEEDNDALLKENESPDVRRDKPVTGEQIEVFANKLGEQWKILAPYLEMKDSEIRQIECDSEDMKMRAKQLLVAWQDQEGVHATPENLINALNKSGLSDLAESLTNDNETNS

SEQ ID NO: 39774 - protein, 244 aa, Artificial Sequence
  Synthetic polypeptide
EWSGIQKATLMDLQLSDSNFRRHILLQYLILFQYLKGQVKFKSSNYVLTDEQSLWIEDTTKSVYQLLSENPPDGERFSKMVEHILNTEENWNSWKNEGCPSFVKESVCFVHDRTSDTKPTRIIRKRTAPEDFLGKGPTKKILMGNEELTRLWNLCPDNMEACKSETREHMPTLEEFFEEAIEQADPENMVENEYKAVNNSNYGWRALRLLARRSPHFFQPTNQQFKSLPEYLENMVIKLAKELP

SEQ ID NO: 39775 - protein, 369 aa, Artificial Sequence; identical to SEQ ID NO: 23147
  Synthetic polypeptide

SEQ ID NO: 39776 - protein, 1754 aa, Artificial Sequence; identical to SEQ ID NO: 23144
  Synthetic polypeptide

SEQ ID NO: 39777 - protein, 1467 aa, Artificial Sequence; identical to SEQ ID NO: 23146
  Synthetic polypeptide

SEQ ID NO: 39778 - protein, 1557 aa, Artificial Sequence; identical to SEQ ID NO: 23190
  Synthetic polypeptide

SEQ ID NO: 39779 - protein, 282 aa, Artificial Sequence
  Synthetic polypeptide
GQVLGPWPSRGPPDRPALRVGRLRVPARPGGACSRPRAQRRQPPGRPLPAADALSVLCGRRVPACAEPVAAALPDAGLDLLRDTDSEGRGAGEGDAAAGHHARHGAQPRGALARLVPQLPRALPAQRRTAGSGAQAGRHPPLQPPGRGLPVLGSLRGGHGDPELPAQRLLLPRQPGCGLRRPGLLLPLPALRAVCGLAGPAARGWPRGREPAVARGLRLRLREPGSAGGAGRGRAVAQRGHPAYGRRLQPGPGLWPSAAGRGALRPRHLVPGSCVPRPVRDP

SEQ ID NO: 39780 - protein, 96 aa, Artificial Sequence; identical to SEQ ID NO: 23757
  Synthetic polypeptide

SEQ ID NO: 39781 - protein, 135 aa, Artificial Sequence; identical to SEQ ID NO: 23758
  Synthetic polypeptide

SEQ ID NO: 39782 - protein, 131 aa, Artificial Sequence; identical to SEQ ID NO: 23754
  Synthetic polypeptide

SEQ ID NO: 39783 - protein, 632 aa, Artificial Sequence; identical to SEQ ID NO: 23759
  Synthetic polypeptide

SEQ ID NO: 39784 - protein, 30 aa, Artificial Sequence; identical to SEQ ID NO: 24361
  Synthetic polypeptide

SEQ ID NO: 39785 - protein, 330 aa, Artificial Sequence; identical to SEQ ID NO: 24498
  Synthetic polypeptide

SEQ ID NO: 39786 - protein, 253 aa, Artificial Sequence; identical to SEQ ID NO: 24500
  Synthetic polypeptide

SEQ ID NO: 39787 - protein, 174 aa, Artificial Sequence
  Synthetic polypeptide
GVDQKGPAPEPPSMRLKARPSSPGFSVLTCSAFSFYPPELQLRFLRNGLAAGTGQGDFGPNSDGSFHASSSLTVKSGDEHHYCCIVQHAGLAQPLRVELESPAKSSVLVVGIVIGVLLLTAAAVGGALLWRRMRSGLPAPWISLRGDDTGVLLPTPGEAQDADLKDVNVIPATA

SEQ ID NO: 39788 - protein, 83 aa, Artificial Sequence; identical to SEQ ID NO: 24700
  Synthetic polypeptide

SEQ ID NO: 39789 - protein, 53 aa, Artificial Sequence; identical to SEQ ID NO: 24903
  Synthetic polypeptide

SEQ ID NO: 39790 - protein, 70 aa, Artificial Sequence; identical to SEQ ID NO: 24902
  Synthetic polypeptide

SEQ ID NO: 39791 - protein, 124 aa, Artificial Sequence; identical to SEQ ID NO: 24901
  Synthetic polypeptide

SEQ ID NO: 39792 - protein, 19 aa, Artificial Sequence
  Synthetic polypeptide
QAWWIMPIIPALWEAKLCL

SEQ ID NO: 39793 - protein, 28 aa, Artificial Sequence
  Synthetic polypeptide
QAWWIMPIIPALWEAKLCLEKGAVRHRR

SEQ ID NO: 39794 - protein, 160 aa, Artificial Sequence; identical to SEQ ID NO: 25361
  Synthetic polypeptide

SEQ ID NO: 39795 - protein, 44 aa, Artificial Sequence
  Synthetic polypeptide
REGDVVLYCSSATFCATSQSGTGEVRCHIHACQASGGCPAEDGR

SEQ ID NO: 39796 - protein, 14 aa, Artificial Sequence
  Synthetic polypeptide
CNPSTLGDQAEKLG

SEQ ID NO: 39797 - protein, 29 aa, Artificial Sequence
  Synthetic polypeptide
GFPSHMSLGYHFQCPIPRTASRFYLWRRC

SEQ ID NO: 39798 - protein, 29 aa, Artificial Sequence
  Synthetic polypeptide
IQKRNNKAKSWFAVWGKGGEFAPSWDCKP

SEQ ID NO: 39799 - protein, 33 aa, Artificial Sequence
  Synthetic polypeptide
IQKRNNKAKSWFAVWGKGGEFAPSWDCKPGMYV

SEQ ID NO: 39800 - protein, 150 aa, Artificial Sequence; identical to SEQ ID NO: 26567
  Synthetic polypeptide

SEQ ID NO: 39801 - protein, 755 aa, Artificial Sequence; identical to SEQ ID NO: 26565
  Synthetic polypeptide

SEQ ID NO: 39802 - protein, 99 aa, Artificial Sequence
  Synthetic polypeptide
VVDTGDALPRSAPREGPCSSCWRPAGPQPLAVKLFWLESRLQEITPWRCRDKAPDILAQYGTTLTVFFSFRTPMELELPPASHFEFIGSSANCRRHQYL

SEQ ID NO: 39803 - protein, 89 aa, Artificial Sequence
  Synthetic polypeptide
ATSLWYFMAAQAKTGLKPVVSTEAPPIIFATPTKLTSDSTVYDYAGKNKVPELQKFFQETYLQTILFLWLLETPVVGILDKGTFPAGLQ

SEQ ID NO: 39804 - protein, 104 aa, Artificial Sequence
  Synthetic polypeptide
ATSLWYFMAAQAKTGLKPVVSTEAPPIIFATPTKLTSDSTVYDYAGKNKVPELQKFFQKADGVPVYLKRGLPDQMLYRTTMALTVGGTIYCLIALYMASQPKNK

SEQ ID NO: 39805 - protein, 69 aa, Artificial Sequence
  Synthetic polypeptide
ATSLWYFMAAQAKTGLKPVVSTEAPPIIFATPTKLTSDSTVYDYAGKNKVPELQKFFQVREDTLQQKSL

SEQ ID NO: 39806 - protein, 42 aa, Artificial Sequence; identical to SEQ ID NO: 26686
  Synthetic polypeptide

SEQ ID NO: 39807 - protein, 28 aa, Artificial Sequence
  Synthetic polypeptide
MGTVAHAYNPSTLGGRESDIDAAAAMML

SEQ ID NO: 39808 - protein, 213 aa, Artificial Sequence; identical to SEQ ID NO: 26814
  Synthetic polypeptide

SEQ ID NO: 39809 - protein, 55 aa, Artificial Sequence
  Synthetic polypeptide
GQELKTSLANMVVFPLMKSRRLGWRGRSCWLQRRDWTHTMYWPQRELQAPGKTLI

SEQ ID NO: 39810 - protein, 57 aa, Artificial Sequence; identical to SEQ ID NO: 27241
  Synthetic polypeptide

SEQ ID NO: 39811 - protein, 56 aa, Artificial Sequence; identical to SEQ ID NO: 27243
  Synthetic polypeptide

SEQ ID NO: 39812 - protein, 48 aa, Artificial Sequence; identical to SEQ ID NO: 27244
  Synthetic polypeptide

SEQ ID NO: 39813 - protein, 47 aa, Artificial Sequence; identical to SEQ ID NO: 27246
  Synthetic polypeptide

SEQ ID NO: 39814 - protein, 48 aa, Artificial Sequence
  Synthetic polypeptide
MELTIPGEGKSPRQCLKEGYCNSLKYAFFECKRSVLDNRARFRGRKGY

SEQ ID NO: 39815 - protein, 47 aa, Artificial Sequence
  Synthetic polypeptide
MELTIPGEGKSPRQCLKEGYCNSLKYAFFECKRSVMESRSVARAGVQ

SEQ ID NO: 39816 - protein, 36 aa, Artificial Sequence
  Synthetic polypeptide
MGRDSLHCRIVGRIKGQIGILLWNSMGTMQQPRAER

SEQ ID NO: 39817 - protein, 45 aa, Artificial Sequence
  Synthetic polypeptide
MGRDSLHCRIVGRIKGQIGILLWNSMGTMQQPRAERARNASTAGS

SEQ ID NO: 39818 - protein, 429 aa, Artificial Sequence; identical to SEQ ID NO: 27458
  Synthetic polypeptide

SEQ ID NO: 39819 - protein, 62 aa, Artificial Sequence
  Synthetic polypeptide
SQHFGRLREPIDNLTPEERDARTVFCMQLAARIRPRDLEEFFSTVGKVRDVRMISDRNSRRS

SEQ ID NO: 39820 - protein, 101 aa, Artificial Sequence
  Synthetic polypeptide
SQHFGRLREPIDNLTPEERDARTVFCMQLAARIRPRDLEEFFSTVGKVRDVRMISDRNSRRSKGIAYVEFVDVSSVPLAIGLTGQRVLGVPIIVQASQAEK

SEQ ID NO: 39821 - protein, 332 aa, Artificial Sequence
  Synthetic polypeptide
SQHFGRLREPIDNLTPEERDARTVFCMQLAARIRPRDLEEFFSTVGKVRDVRMISDRNSRRSKGIAYVEFVDVSSVPLAIGLTGQRVLGVPIIVQASQAEKNRAAAMANNLQKGSAGPMRLYVGSLHFNITEDMLRGIFEPFGRFSDSECAKKALEQLNGFELAGRPMKVGHVTERTDASSASSFLDSDELERTGIDLGTTGRLQLMARLAEGTGLQIPPAAQQALQMSGSLAFGAVAEFSFVIDLQTRLSQQTEASALAAAASVQPLATQCFQLSNMFNPQTEEEVGWDTEIKDDVIEECNKHGGVIHIYVDKNSAQGNVYVKCPSIAAAI

SEQ ID NO: 39822 - protein, 292 aa, Artificial Sequence
  Synthetic polypeptide
SQHFGRLREPIDNLTPEERDARTVFCMQLAARIRPRDLEEFFSTVGKVRDVRMISDRNSRRSKGIAYVEFVDVSSVPLAIGLTGQRVLGVPIIVQASQAEKNRAAAMANNLQKGSAGPMRLYVGSLHFNITEDMLRGIFEPFGRIESIQLMMDSETGRSKGYGFITFSDSECAKKALEQLNGFELAGRPMKVGHVTERTDASSASSFLDSDELERTGIDLGTTGRLQLMARLAEGTGLQIPPAAQQALQMSGSLAFGAVADLQTRLSQQTEALFVIMFWNEIWSDNMITLQL

SEQ ID NO: 39823 - protein, 393 aa, Artificial Sequence
  Synthetic polypeptide
SQHFGRLREPIDNLTPEERDARTVFCMQLAARIRPRDLEEFFSTVGKVRDVRMISDRNSRRSKGIAYVEFVDVSSVPLAIGLTGQRVLGVPIIVQASQAEKNRAAAMANNLQKGSAGPMRLYVGSLHFNITEDMLRGIFEPFGRIESIQLMMDSETGRSKGYGFITFSDSECAKKALEQLNGFELAGRPMKVGHVTERTDASSASSFLDSDELERTGIDLGTTGRLQLMARLAEGTGLQIPPAAQQALQMSGSLAFGAVADLQTRLSQQTEASALAAAASVQPLATQCFQLSNMFNPQTEEEVGWDTEIKDDVIEECNKHGGVIHIYVDKNSAQGNVYVKCPSIAAAIAAVNALHGRWFAGKMITAAYVPLPTYHNLFPDSMTATQLLVPSRR

SEQ ID NO: 39824 - protein, 399 aa, Artificial Sequence
  Synthetic polypeptide
SQHFGRLREPIDNLTPEERDARTVFCMQLAARIRPRDLEEFFSTVGKVRDVRMISDRNSRRSKGIAYVEFVDVSSVPLAIGLTGQRVLGVPIIVQASQAEKNRAAAMANNLQKGSAGPMRLYVGSLHFNITEDMLRGIFEPFGRIESIQLMMDSETGRSKGYGFITFSDSECAKKALEQLNGFELAGRPMKVGHVTERTDASSASSFLDSDELERTGIDLGTTGRLQLMARLAEGTGLQIPPAAQQALQMSGSLAFGAVAEFSFVIDLQTRLSQQTEASALAAAASVQPLATQCFQLSNMFNPQTEEEVGWDTEIKDDVIEECNKHGGVIHIYVDKNSAQGNVYVKCPSIAAAIAAVNALHGRWFAGKMITAAYVPLPTYHNLFPDSMTATQLLVPSRR

SEQ ID NO: 39825 - protein, 72 aa, Artificial Sequence
  Synthetic polypeptide
DTPELDSWFCHLPFVRSSTGPADLKHFDPEFTQEAVSKSIGCTPDTVASSSGASSAFLGFSYAPEDDDILDC

SEQ ID NO: 39826 - protein, 455 aa, Artificial Sequence; identical to SEQ ID NO: 28011
  Synthetic polypeptide

SEQ ID NO: 39827 - protein, 26 aa, Artificial Sequence
  Synthetic polypeptide
AGRGGSHLQSQHFGRPRRVDHLSPSD

SEQ ID NO: 39828 - protein, 13 aa, Artificial Sequence
  Synthetic polypeptide
KGDPGIDARVRDG

SEQ ID NO: 39829 - protein, 36 aa, Artificial Sequence; identical to SEQ ID NO: 28347
  Synthetic polypeptide

SEQ ID NO: 39830 - protein, 75 aa, Artificial Sequence; identical to SEQ ID NO: 28646
  Synthetic polypeptide

SEQ ID NO: 39831 - protein, 229 aa, Artificial Sequence; identical to SEQ ID NO: 28645
  Synthetic polypeptide

SEQ ID NO: 39832 - protein, 1051 aa, Artificial Sequence; identical to SEQ ID NO: 28644
  Synthetic polypeptide

SEQ ID NO: 39833 - protein, 1082 aa, Artificial Sequence; identical to SEQ ID NO: 28643
  Synthetic polypeptide

SEQ ID NO: 39834 - protein, 10 aa, Artificial Sequence
  Synthetic polypeptide
MTKLLSPIRM

SEQ ID NO: 39835 - protein, 28 aa, Artificial Sequence
  Synthetic polypeptide
GLLWSGMALTGSLRVTQRLWRSLTSSST

SEQ ID NO: 39836 - protein, 178 aa, Artificial Sequence; identical to SEQ ID NO: 28915
  Synthetic polypeptide

SEQ ID NO: 39837 - protein, 24 aa, Artificial Sequence
  Synthetic polypeptide
ITEQAERKAGGIWKTGIPSATLIR

SEQ ID NO: 39838 - protein, 99 aa, Artificial Sequence
  Synthetic polypeptide
QNQPLFFPFFLSLLSRKTMRMKTFMMIHCHLMNNMSCRSRLATLNEKLTALERRIEYIEARVTKGETLRTVPCCCWEVALHNTGHMGKAPAAFSSFLSP

SEQ ID NO: 39839 - protein, 69 aa, Artificial Sequence
  Synthetic polypeptide
QNQPLFFPFFLSLLSRKTMRMKTFMMIHCHLMNNMSCRSRLATLNEKLTALERRIEYIEARVTKGETLT

SEQ ID NO: 39840 - protein, 14 aa, Artificial Sequence
  Synthetic polypeptide
TQEAELAGVATVRK

SEQ ID NO: 39841 - protein, 476 aa, Artificial Sequence; identical to SEQ ID NO: 29312
  Synthetic polypeptide

SEQ ID NO: 39842 - protein, 474 aa, Artificial Sequence; identical to SEQ ID NO: 29314
  Synthetic polypeptide

SEQ ID NO: 39843 - protein, 56 aa, Artificial Sequence; identical to SEQ ID NO: 29368
  Synthetic polypeptide

SEQ ID NO: 39844 - protein, 86 aa, Artificial Sequence; identical to SEQ ID NO: 29364
  Synthetic polypeptide

SEQ ID NO: 39845 - protein, 125 aa, Artificial Sequence; identical to SEQ ID NO: 29365
  Synthetic polypeptide

SEQ ID NO: 39846 - protein, 182 aa, Artificial Sequence; identical to SEQ ID NO: 29363
  Synthetic polypeptide

SEQ ID NO: 39847 - protein, 22 aa, Artificial Sequence
  Synthetic polypeptide
MAGLVFQWLRTPPTCSSLALML

SEQ ID NO: 39848 - protein, 26 aa, Artificial Sequence
  Synthetic polypeptide
MLPPFVLAVTMGLSVVKVAKVSSKGV

SEQ ID NO: 39849 - protein, 153 aa, Artificial Sequence
  Synthetic polypeptide
WAQWLTPVIPALWKAKIAPAEGPDVSERMVIITGPPEAQFKAQGRIFGKLKEENFFNPKEEVKLEAHIRVPSSTAGRVIGKGGKTVNELQNLTSAEVIVPRDQTPDENEEVIVRIIGHFFASQTAQRKIREIVQQVKQQEQKYPQGVASQRSK

SEQ ID NO: 39850 - protein, 33 aa, Artificial Sequence; identical to SEQ ID NO: 29998
  Synthetic polypeptide

SEQ ID NO: 39851 - protein, 28 aa, Artificial Sequence
  Synthetic polypeptide
MASASPTIKRPRKSRATSSLSYIQVQQL

SEQ ID NO: 39852 - protein, 80 aa, Artificial Sequence; identical to SEQ ID NO: 30393
  Synthetic polypeptide

SEQ ID NO: 39853 - protein, 131 aa, Artificial Sequence
  Synthetic polypeptide
GLTGEFSITRFHACVLQLPFHQQVWKNPTFFLRVISDTASLCYSILKAKNAGMSLGAKGAAGPLPSEAVQWLCHQAFLLKLTRHRVTYVPLLGSLRTAQTQLSRKLPGTTLTALEAAANPALPSDFKTILD

SEQ ID NO: 39854 - protein, 138 aa, Artificial Sequence; identical to SEQ ID NO: 31694
  Synthetic polypeptide

SEQ ID NO: 39855 - protein, 826 aa, Artificial Sequence; identical to SEQ ID NO: 31692
  Synthetic polypeptide

SEQ ID NO: 39856 - protein, 563 aa, Artificial Sequence; identical to SEQ ID NO: 31693
  Synthetic polypeptide

SEQ ID NO: 39857 - protein, 36 aa, Artificial Sequence; identical to SEQ ID NO: 31734
  Synthetic polypeptide

SEQ ID NO: 39858 - protein, 21 aa, Artificial Sequence
  Synthetic polypeptide
SEGIRIMEMLLKEQCGAPLAE

SEQ ID NO: 39859 - protein, 989 aa, Artificial Sequence
  Synthetic polypeptide
HFIAMMYFKIKVDWRRSFITTDVNPYYDSFVRWQFLTLRERNKIKFGKRYTIYSPKDGQPCMDHDRQTGEGVGPQEYTLLKLKVLEPYPSKLSGLKGKNIFLVAATLRPETMFGQTNCWVRPDMKYIGFETVNGDIFICTQKAARNMSYQGFTKDNGVVPVVKELMGEEILGASLSAPLTSYKVIYVLPMLTIKEDKGTGVVTSVPSDSPDDIAALRDLKKKQALRAKYGIRDDMVLPFEPVPVIEIPGFGNLSAVTICDELKIQSQNDREKLAEAKEKIYLKGFYEGIMLVDGFKGQKVQDVKKTIQKKMIDAGDALIYMEPEKQVMSRSSDECVVALCDQWYLDYGEENWKKQTSQCLKNLETFCEETRRNFEATLGWLQEHACSRTYGLGTHLPWDEQWLIESLSDSTIYMAFYTVAHLLQGGNLHGQAESPLGIRPQQMTKEVWDYVFFKEAPFPKTQIAKEKLDQLKQEFEFWYPVDLRVSGKDLVPNHLSYYLYNHVAMWPEQSDKWPTAVRANGHLLLNSEKMSKSTGNFLTLTQAIDKFSADGMRLALADAGDTVEDANFVEAMADAGILRLYTWVEWVKEMVANWDSLRSGPASTFNDRVFASELNAGIIKTDQNYEKMMFKEALKTGFFEFQAAKDKYRELAVEGMHRELVFRFIEVQTLLLAPFCPHLCEHIWTLLGKPDSIMNASWPVAGPVNEVLIHSSQYLMEVTHDLRLRLKNYMMPAKGKKTDKQPLQKPSHCTIYVAKNYPPWQHTTLSVLRKHFEANNGKLPDNKVIASELGSMPELKKYMKKVMPFVAMIKENLEKMGPRILDLQLEFDEKAVLMENIVYLTNSLELEHIEVKFASEAEDKIREDCCPGKPLNVFRIEPGVSVSLVNPQPSNGHFSTKIEIRQGDNCDSIIRRLMKMNRGIKDLSKVKLMRFDDPLLGPRRVPVLGKEYTEKTPISEHAVFNVDLMSKKIHLTENGIRVDIGDTIIYLVH

SEQ ID NO: 39860 - protein, 20 aa, Artificial Sequence
  Synthetic polypeptide
SRTMSSLRVSTSHVGPWVSP

SEQ ID NO: 39861 - protein, 119 aa, Artificial Sequence
  Synthetic polypeptide
HDYDEDLVQEASSEDVLGVHMVDKDTERDIEMKRQLRRLRELHLYSTWKKYQEAMKTSLGVPQRGDLEDLEEHLPGQTVSEEATGVHMMQVDPATPAKKLEDSTITGSHQQMSASPSSA

SEQ ID NO: 39862 - protein, 164 aa, Artificial Sequence
  Synthetic polypeptide
HDYDEDLVQEASSEDVLGVHMVDKDTERDIEMKRQLRRLRELHLYSTWKKYQEAMKTSLGVPQRGDLEDLEEHLPGQTVSEEATGVHMMQVDPATPAKKLEDSTITGSHQQMSASPSSAPAEEATEKTKVEEEVKTRKPKKKTRKPSKKSRWNVLKCWDIFNIF

SEQ ID NO: 39863 - protein, 60 aa, Artificial Sequence
  Synthetic polypeptide
MACNMGLEKGEKRVPAGPPPTVCSGGAPQHGAPQCDLRWLQWACGRNPLQVQRLPRLRLV

SEQ ID NO: 39864 - protein, 45 aa, Artificial Sequence
  Synthetic polypeptide
GAKPSKGNWQTNRFKTIKDNSSNIKKAQHMMKKEQTDVMHQNIYD

SEQ ID NO: 39865 - protein, 603 aa, Artificial Sequence
  Synthetic polypeptide
GAKPSKGNWQTNRFKTIKDNSSNIKKAQHMMKKEQTDVMHQNIYDYIHVDDRQDFCRQLHWAMDPPQVVFGQPPPLETGDDAILGRLLRAQEWGTGTPTEYSAFLTRCFICRVRCLLDSTSGFLARGSQAWQLRLCCPEPLMTMQFQGKLKFLFGQKKKAPSGAMLPPRLSLFCIAAPVLLPSAAEMKMRSALLRAKPRADTAATADAKVKATTSLCESELHGKPNYSAGRSSRESGVLVLREQTDAGRWAQVPARAPCLCLRGGPDLVLDPKGGSGDREEEQHRMLSRASGVTGRRETPGPTKPLPWTAGKHSEDGARPRLQPSKNDPPSLRPMPRGSCLPCPCVQGTFRNSPISHPPSPSPSAYSSRTSRPMRDVGEDQVHPPLCHFPQRSLQHQLPQPGAQRFATRGYPMEDMKLQGVPMPPGDLCGPTLLLDVSIKMEKDSGCEGAADGCVPSQVWLGASDRSHPATFPTRMHLKTEPDSRQQVYISHLGHGVRGAQPHGRATAGRSRELTPFHPAHCACLEPTDGLPQSEPPHQLCARGRGEQSCTCRAAEAAPVVKREPLDSPQWATHSQGMVPGMLPKSALATLVPPQASGCTFLP

SEQ ID NO: 39866 - protein, 585 aa, Artificial Sequence
  Synthetic polypeptide
GAKPSKGNWQTNRFKTIKDNSSNIKKAQHMMKKEQTDVMHQNIYDYIHVDDRQDFCRQLHWAMDPPQVVFGQPPPLETGDDAILGRLLRAQEWGTGTPTEYSAFLTRCFICRVRCLLDSTSGFLTMQFQGKLKFLFGQKKKAPSGAMLPPRLSLFCIAAPVLLPSAAEMKMRSALLRAKPRADTAATADAKVKATTSLCESELHGKPNYSAGRSSRESGVLVLREQTDAGRWAQVPARAPCLCLRGGPDLVLDPKGGSGDREEEQHRMLSRASGVTGRRETPGPTKPLPWTAGKHSEDGARPRLQPSKNDPPSLRPMPRGSCLPCPCVQGTFRNSPISHPPSPSPSAYSSRTSRPMRDVGEDQVHPPLCHFPQRSLQHQLPQPGAQRFATRGYPMEDMKLQGVPMPPGDLCGPTLLLDVSIKMEKDSGCEGAADGCVPSQVWLGASDRSHPATFPTRMHLKTEPDSRQQVYISHLGHGVRGAQPHGRATAGRSRELTPFHPAHCACLEPTDGLPQSEPPHQLCARGRGEQSCTCRAAEAAPVVKREPLDSPQWATHSQGMVPGMLPKSALATLVPPQASGCTFLP

SEQ ID NO: 39867 - protein, 13 aa, Artificial Sequence
  Synthetic polypeptide
MMAHLCIFGLQSR

SEQ ID NO: 39868 - protein, 538 aa, Artificial Sequence; identical to SEQ ID NO: 33066
  Synthetic polypeptide

SEQ ID NO: 39869 - protein, 1443 aa, Artificial Sequence; identical to SEQ ID NO: 33064
  Synthetic polypeptide

SEQ ID NO: 39870 - protein, 97 aa, Artificial Sequence; identical to SEQ ID NO: 33138
  Synthetic polypeptide

SEQ ID NO: 39871 - protein, 619 aa, Artificial Sequence; identical to SEQ ID NO: 33357
  Synthetic polypeptide

SEQ ID NO: 39872 - protein, 1377 aa, Artificial Sequence; identical to SEQ ID NO: 33682
  Synthetic polypeptide

SEQ ID NO: 39873 - protein, 1385 aa, Artificial Sequence; identical to SEQ ID NO: 33685
  Synthetic polypeptide

SEQ ID NO: 39874 - protein, 1398 aa, Artificial Sequence; identical to SEQ ID NO: 33686
  Synthetic polypeptide

SEQ ID NO: 39875 - protein, 1433 aa, Artificial Sequence; identical to SEQ ID NO: 33684
  Synthetic polypeptide

SEQ ID NO: 39876 - protein, 548 aa, Artificial Sequence; identical to SEQ ID NO: 33747
  Synthetic polypeptide

SEQ ID NO: 39877 - protein, 24 aa, Artificial Sequence
  Synthetic polypeptide
FPSGILCVIMPGRSISLSSPYWLD

SEQ ID NO: 39878 - protein, 38 aa, Artificial Sequence
  Synthetic polypeptide
TPGRNGHLESGHLKLVIIFWREQIKKYTGCYPSCSECS

SEQ ID NO: 39879 - protein, 21 aa, Artificial Sequence
  Synthetic polypeptide
SQRCLTTLFGSFRKRQQEKTV

SEQ ID NO: 39880 - protein, 101 aa, Artificial Sequence
  Synthetic polypeptide
SQRCLTTLFGSFRKRQQEKTVNFIKDTCNILCQNDNFVMLASRKFKFRKMHYDRFVIFLMPHIGCIVMALSKYLMMFQIYCKVCIPALKKNISMLNTIFTY

SEQ ID NO: 39881 - protein, 82 aa, Artificial Sequence; identical to SEQ ID NO: 34621
  Synthetic polypeptide

SEQ ID NO: 39882 - protein, 234 aa, Artificial Sequence
  Synthetic polypeptide
TLLPGTLRAEIVSDYGKDPSITSILDALDIFLLPVTNPDGYVFSQTKNRMWRKTRSKVSGSLCVGVDPNRNWDAGFGGPGASSNPCSDSYHGPSANSEVEVKSIVDFIKSHGKVKAFITLHSYSQLLMFPYGYKCTKLDDFDELSEVAQKAAQSLRSLHGTKYKVGPICSVIYQASGGSIDWSYDYGIKYSFAFELRDTGRYGFLLPARQILPTAEETWLGLKAIMEHVRDHPY

SEQ ID NO: 39883 - protein, 71 aa, Artificial Sequence; identical to SEQ ID NO: 35509
  Synthetic polypeptide

SEQ ID NO: 39884 - protein, 119 aa, Artificial Sequence; identical to SEQ ID NO: 35504
  Synthetic polypeptide

SEQ ID NO: 39885 - protein, 127 aa, Artificial Sequence; identical to SEQ ID NO: 35510
  Synthetic polypeptide

SEQ ID NO: 39886 - protein, 133 aa, Artificial Sequence; identical to SEQ ID NO: 35508
  Synthetic polypeptide

SEQ ID NO: 39887 - protein, 81 aa, Artificial Sequence; identical to SEQ ID NO: 35506
  Synthetic polypeptide

SEQ ID NO: 39888 - protein, 95 aa, Artificial Sequence; identical to SEQ ID NO: 35507
  Synthetic polypeptide

SEQ ID NO: 39889 - protein, 119 aa, Artificial Sequence
  Synthetic polypeptide
ILSQKSYLSPLRSSPQAIQMVATLGTTTCCSFDNLLEVGPICNKEDIWLHVDAAYAGSAFICPEFRHLLNGVEFADSFNFNPHKWLLVNFDCSAMWSRQPVRMLRLKKTCLVSAVVRRS

SEQ ID NO: 39890 - protein, 261 aa, Artificial Sequence
  Synthetic polypeptide
ILSQKSYLSPLRSSPQAIQMVATLGTTTCCSFDNLLEVGPICNKEDIWLHVDAAYAGSAFICPEFRHLLNGVEFADSFNFNPHKWLLVNFDCSAMWVKKRTDLTGAFRLDPTYLKHSHQDSGLITDYRHWQIPLGRRFRSLKMWFVFRMYGVKGLQAYIRKHVQLSHEFESLVRQDPRFEICVEVILGLVCFRLKGSNKVNEALLQRINSAKKIHLVPCHLRDKFVLRFAICSRTVESAHVQRAWEHIKELAADVLRAERE

SEQ ID NO: 39891 - protein, 30 aa, Artificial Sequence
  Synthetic polypeptide
STPFSSAPRTLPSLDDLRALKGKHFLLDPL

SEQ ID NO: 39892 - protein, 275 aa, Artificial Sequence
  Synthetic polypeptide
STPFSSAPRTLPSLDDLRALKGKHFLLDPLMPELLVFPAQTDLHEHPLYRAGHLILQDRASCLPAMLLDPPPGSHVIDACAAPGNKTSHLAALLKNQGKIFAFDLDAKRLASMATLLARAGVSCCELAEEDFLAVSPSDPRYHEVHYILLDPSCSGSGMPSRQLEEPGAGTPSPVRLHALAGFQQRALCHALTFPSLQRLVYSTCSLCQEENEDVVRDALQQNPGAFRLAPALPAWPHRGLSTFPGAEHCLRASPETTLSSGFFVAVIERVEVPR

SEQ ID NO: 39893 - protein, 316 aa, Artificial Sequence
  Synthetic polypeptide
STPFSSAPRTLPSLDDLRALKGKHFLLDPLMPELLVFPAQTDLHEHPLYRAGHLILQDRASCLPAMLLDPPPGSHVIDACAAPGNKTSHLAALLKNQGKIFAFDLDAKRLASMATLLARAGVSCCELAEEDFLAVSPSDPRYHEVHYILLDPSCSGSGMPSRQLEEPGAGTPSPVRLHALAGFQQRALCHALTFPSLQRLVYSTCSLCQEENEDVVRDALQQNPGAFRLAPALPAWPHRGLSTFPGAEHCLRASPETTLSSGFFVAVIERVEVPSLTGQSISTRTHTQPSPKEKEETAKSRSRCLHTALHIAEAPG

SEQ ID NO: 39894 - protein, 312 aa, Artificial Sequence
  Synthetic polypeptide
STPFSSAPRTLPSLDDLRALKGKHFLLDPLMPELLVFPAQTDLHEHPLYRAGHLILQDRASCLPAMLLDPPPGSHVIDACAAPGNKTSHLAALLKNQGKIFAFDLDAKRLASMATLLARAGVSCCELAEEDFLAVSPSDPRYHEVHYILLDPSCSGSGMPSRQLEEPGAGTPSPVRLHALAGFQQRALCHALTFPSLQRLVYSTCSLCQEENEDVVRDALQQNPGAFRLAPALPAWPHRGLSTFPGAEHCLRASPETTLSSGFFVAVIERVEVPSSASQAKASAPERTPSPAPKRKKRQQRAAAGACTPPCT

SEQ ID NO: 39895 - protein, 69 aa, Artificial Sequence
  Synthetic polypeptide
TQEVEVAVNRDHTTTVQLGRWRICSSAWRRSPSPRETWRPRRSWSTRALGSWNRACYWRRRRPSGCSEN

SEQ ID NO: 39896 - protein, 39 aa, Artificial Sequence
  Synthetic polypeptide
TQEVEVAVNRDHTTTVQLGRWRICSSAWRRSPSPRETWS

SEQ ID NO: 39897 - protein, 116 aa, Artificial Sequence
  Synthetic polypeptide
PINKVGQKRRYEIARLHCKNVMPFCCVVMECLPLEVSCRTVMKPKPAQMGRLRGATWTGSSPQGSWDFTRSVCNNTSKTLSDPSDPVFLSGGTSHSVLEWLSQEGCAVPSQLQDGV

SEQ ID NO: 39898 - protein, 263 aa, Artificial Sequence; identical to SEQ ID NO: 35909
  Synthetic polypeptide

SEQ ID NO: 39899 - protein, 746 aa, Artificial Sequence; identical to SEQ ID NO: 35908
  Synthetic polypeptide

SEQ ID NO: 39900 - protein, 19 aa, Artificial Sequence
  Synthetic polypeptide
GHMRWLTPVIPALWEAERL

SEQ ID NO: 39901 - protein, 447 aa, Artificial Sequence
  Synthetic polypeptide
TGAQPPATMPLNVSFTNRNYDLDYDSVQPYFYCDEEENFYQQQQQSELQPPAPSEDIWKKFELLPTPPLSPSRRSGLCSPSYVAVTPFSLRGDNDGGGGSFSTADQLEMVTELLGGDMVNQSFICDPDDETFIKNIIIQDCMWSGFSAAAKLVSEKLASYQAARKDSGSPNPARGHSVCSTSSLYLQDLSAAASECIDPSVVFPYPLNDSSSPKSCASQDSSAFSPSSDSLLSSTESSPQGSPEPLVLHEETPPTTSSDSEEEQEDEEEIDVVSVEKRQAPGKRSESGSPSAGGHSKPPHSPLVLKRCHVSTHQHNYAAPPSTRKDYPAAKRVKLDSVRVLRQISNNRKCTSPRSSDTEENVKRRTHNVLERQRRNELKRSFFALRDQIPELENNEKAPKVVILKKATAYILSVQAEEQKLISEEDLLRKRREQLKHKLEQLRNSCA

SEQ ID NO: 39902 - protein, 44 aa, Artificial Sequence
  Synthetic polypeptide
MESQMVEQLCSRFYDLPSGAFIYRMGQVFQYKAIPDNAWTRGAE

SEQ ID NO: 39903 - protein, 17 aa, Artificial Sequence
  Synthetic polypeptide
MAHTLQYFKSSQHQRTL

SEQ ID NO: 39904 - protein, 115 aa, Artificial Sequence
  Synthetic polypeptide
GLNEAIFMIPTNPPPTFRKPELWSDDFTDFVKKCLVKNPEQRATATQLLQHPFIKNAKPVSILRDLITEAMEIKAKRHEEQQRELEEEEENSDEDELDSHTMVKTSVESVGTMRA

SEQ ID NO: 39905 - protein, 267 aa, Artificial Sequence
  Synthetic polypeptide
GLNEAIFMIPTNPPPTFRKPELWSDDFTDFVKKCLVKNPEQRATATQLLQHPFIKNAKPVSILRDLITEAMEIKAKRHEEQQRELEEEEENSDEDELDSHTMVKTSVESVGTMRATSTMSEGAQTMIEHNSTMLESDLGTMVINSEDEEEEDGTMKRNATSPQVQRPSFMDYFDKQDFKNKSHENCNQNMHEPFPMSKNVFPDNWKVPQDGDFDFLKNLSLEELQMRLKALDPMMEREIEELRQRYTAKRQPILDAMDAKKRRQQNF

SEQ ID NO: 39906 - protein, 32 aa, Artificial Sequence
  Synthetic polypeptide
EVRRPSAWQPPRLRSEEPLRPAAAPSENALRS

SEQ ID NO: 39907 - protein, 85 aa, Artificial Sequence; identical to SEQ ID NO: 37444
  Synthetic polypeptide

SEQ ID NO: 39908 - protein, 248 aa, Artificial Sequence; identical to SEQ ID NO: 37443
  Synthetic polypeptide

SEQ ID NO: 39909 - protein, 400 aa, Artificial Sequence; identical to SEQ ID NO: 37438
  Synthetic polypeptide

SEQ ID NO: 39910 - protein, 447 aa, Artificial Sequence; identical to SEQ ID NO: 37441
  Synthetic polypeptide

SEQ ID NO: 39911 - protein, 411 aa, Artificial Sequence; identical to SEQ ID NO: 37442
  Synthetic polypeptide

SEQ ID NO: 39912 - protein, 63 aa, Artificial Sequence
  Synthetic polypeptide
KVQLAGNTLPSTPCWTRSTPVWTTWRRRMTTSTPASRSCWSPTGRHAWSSSSSSGRPPVMPAP

SEQ ID NO: 39913 - protein, 184 aa, Artificial Sequence; identical to SEQ ID NO: 37756
  Synthetic polypeptide

SEQ ID NO: 39914 - protein, 283 aa, Artificial Sequence; identical to SEQ ID NO: 37759
  Synthetic polypeptide

SEQ ID NO: 39915 - protein, 375 aa, Artificial Sequence; identical to SEQ ID NO: 37757
  Synthetic polypeptide

SEQ ID NO: 39916 - protein, 324 aa, Artificial Sequence; identical to SEQ ID NO: 37753
  Synthetic polypeptide

SEQ ID NO: 39917 - protein, 91 aa, Artificial Sequence; identical to SEQ ID NO: 37758
  Synthetic polypeptide

SEQ ID NO: 39918 - protein, 480 aa, Artificial Sequence; identical to SEQ ID NO: 38101
  Synthetic polypeptide

SEQ ID NO: 39919 - protein, 901 aa, Artificial Sequence; identical to SEQ ID NO: 38100
  Synthetic polypeptide

SEQ ID NO: 39920 - protein, 54 aa, Artificial Sequence
  Synthetic polypeptide
GRAWWLTPVIPARWEAEAGRSRGQEMETILANMISRSCSVNNKVSKKTTKPPTL

SEQ ID NO: 39921 - protein, 61 aa, Artificial Sequence
  Synthetic polypeptide
GRAWWLTPVIPARWEAEAGRSRGQEMETILANMISRSCSVNNKVSKKTTKPPTLRSFLSPI

SEQ ID NO: 39922 - protein, 45 aa, Artificial Sequence; identical to SEQ ID NO: 38141
  Synthetic polypeptide

SEQ ID NO: 39923 - protein, 90 aa, Artificial Sequence; identical to SEQ ID NO: 38156
  Synthetic polypeptide

SEQ ID NO: 39924 - protein, 726 aa, Artificial Sequence; identical to SEQ ID NO: 90
  Synthetic polypeptide

SEQ ID NO: 39925 - protein, 495 aa, Artificial Sequence
  Synthetic polypeptide
MLHTEGHALLRAVGQGKLRLARLLLEGGAYVNEGDAQGETALMAACRARYDDPQNKARMVRYLLEQGADPNIADRLGRTALMHACAGGGGAAVASLLLAHGADPSVRDHAGASALVHALDRGDRETLATLLDACKAKGTEVIIITTDTSPSGTKKTRQYLNSPPSPGVEDPAPASPSPGFCTSPSEIQLQTAGGGGRGMLSPRAQEEEEKRDVFEFPLPKPPDDPSPSEPLPKPPRHPPKPLKRLNSEPWGLVAPPQPVPPTEGRPGIERLTAEFNGLTLTGRPRLSRRHSTEGPEDPPPWAEKVTSGGPLSRRNTAPEAQESGPPSGLRQKLSRMEPVELDTPGHLCPDSPESSRLSLERRRYSASPLTLPPAGSAPSPRQSQESLPGAVSPLSGRRRSPGLLERRGSGTLLLDHISQTRPGFLPPLNVSPHPPIPDIRPQPGGRAPSLPAPPYAGAPGSPRTKRKLLHHQLHMMLDKSNYFSEPQYPHLQSVK

SEQ ID NO: 39926 - protein, 71 aa, Artificial Sequence
  Synthetic polypeptide
MATAGGGSGADPGSRGLLRLLSFCVLLAGLCRGNSVERKIYIPLNKTAPCVRLLNATHQIGCQYTHRGKTV

SEQ ID NO: 39927 - protein, 305 aa, Artificial Sequence
  Synthetic polypeptide
MARLRDCLPRLMLTLRSLLFWSLVYCYCGLCASIHLLKLLWSLGKGPAQTFRRPAREHPPACLSDPSLGTHCYVRIKDSGLRFHYVAAGERGKPLMLLLHGFPEFWYSWRYQLREFKSEYRVVALDLRGYGETDAPIHRQNYKLDCLITDIKDILDSLGYSKCVLIGHDWGGMIAWLIAICYPEMVMKLIVINFPHPNVFTEYILRHPAQLLKSSYYYFFQIPWFPEFMFSINDFKVLKHLFTSHSTGIGRKGCQLTTEDLEAYIYVFSQPGALSGPINHYRNIFSCISMGNFGGPGKFYWYLRE

SEQ ID NO: 39928 - protein, 21 aa, Artificial Sequence
  Synthetic polypeptide
MDLVQVSGSLGSPVLSCKVRI

SEQ ID NO: 39929 - protein, 853 aa, Artificial Sequence; identical to SEQ ID NO: 986
  Synthetic polypeptide

SEQ ID NO: 39930 - protein, 20 aa, Artificial Sequence
  Synthetic polypeptide
MIVMNDQMDSSLKAGSMPCS

SEQ ID NO: 39931 - protein, 117 aa, Artificial Sequence
  Synthetic polypeptide
MPPYTVVYFPVRGRCAALRMLLADQGQSWKEEVVTVETWQEGSLKASCLYGQLPKFQDGDLTLYQSNTILRHLGRTLGLYGKDQQEAALVDMVNDGVEDLRCKYISLIYTNYAEGKE

SEQ ID NO: 39932 - protein, 120 aa, Artificial Sequence
  Synthetic polypeptide
MALRICVTYTPALPIGLCTRCCLCLEQSPSWCHCLRGVSFLTFHLHQSVPLGDRDSLLMFTRQAGHFVEGSKAGRSRGRLCLSQALRVAVSVLSPGKWNFPPPRDVMMIDVTSSAQCLYR

SEQ ID NO: 39933 - protein, 13 aa, Artificial Sequence
  Synthetic polypeptide
MAALTIATGLAVD

SEQ ID NO: 39934 - protein, 409 aa, Artificial Sequence
  Synthetic polypeptide
MSIHFSSPVFTSRSAAFSGRGAQVRLSSARPGGLGSSSLYGLGASRPRVAVRSAYGGPVGAGIREVTINQSLLAPLRLDADPSLQRVRQEESEQIKTLNNKFASFIDKVRFLEQQNKLLETKWTLLQEQKSAKSSRLPDIFEAQIAGLRGQLEALQVDGGRLEAELRSMQDVVEDFKNKYEDEINHRTAAENEFVVLKKDVDAAYMSKVELEAKVDALNDEINFLRTLNETELTELQSQISDTSVVLSMDNSRSLDLDGIIAEVKAQYEEMAKCSRAEAEAWYQTKFETLQAQAGKHGDDLRNTRNEISEMNRAIQRLQAEIDNIKNQRAKLEAAIAEAEERGELALKDARAKQEELEAALQRGKQDMARQLQSANYGHMQASCLSIKFSWNPVIPLPSSIAFGCGCFT

SEQ ID NO: 39935 - protein, 77 aa, Artificial Sequence
  Synthetic polypeptide
MEFWLSWVFLVAILKGVQCEVQLVESGGGLIQPGGSLRLSCAASGFTVSSNYMSWVRQAPGKGLEWVSQISESTNSL

SEQ ID NO: 39936 - protein, 35 aa, Artificial Sequence
  Synthetic polypeptide
MSSINPNTSATWKCKSIKLLSFLSCPALGMSLSVA

SEQ ID NO: 39937 - protein, 290 aa, Artificial Sequence
  Synthetic polypeptide
MWPQPRLPPHPAMSEKTQQGKLAAAKKKLKAYWQRKSPGIPAGANRKKKVNGSSPDTATSGGYHSPGDSATGIYGEGRASSTTLQDLESQYQELAVALDSSSAIISQLTENINSLVRTSKEEKKHEIHLVQKLGRSLFKLKNQTAEPLAPQPPAGPSKVEQLQDETNHLRKELESVGRQLQAEVENNQMLSLLNRRQEERLREQEERLREQEERLCEQEERLCEQEERLREQEERLCEQEKLPGQERLLEEVEKLLKQERRQEEQERLLERERLLDEAAGEGEAAGRGGG

SEQ ID NO: 39938 - protein, 168 aa, Artificial Sequence
  Synthetic polypeptide
MQIFVKTLTGKTITLEVEPSDTIENVKAKIQDKEGIPPDQQRLIFAGKQLEDGRTLSDYNIQKESTLHLVLRLRGGMQIFVKTLTGKTITLEVEPRHDGRAGHTSIIITSSLLEFRKSQPALTSTQILSLVRNIYNLFSLKFATWKLHLPDKTLVSTTPYQNPGISFY

SEQ ID NO: 39939 - protein, 18 aa, Artificial Sequence
  Synthetic polypeptide
MPGPLRSLEMARRDGSRL

SEQ ID NO: 39940 - protein, 150 aa, Artificial Sequence
  Synthetic polypeptide
MAEPDPSHPLETQAGKVQEAQDSDSDSEGGAAGGEADMDFLRNLFSQTLSLGSQKERLLDELTLEGVARYMQSERCRRVICLVGAGISTSAGIPDFRSPSTGLYDNLEKYHLPYPEAIFEISYFKKHPEPFFALAKELYPGQFKPPICLL

SEQ ID NO: 39941 - protein, 977 aa, Artificial Sequence; identical to SEQ ID NO: 5429
  Synthetic polypeptide

SEQ ID NO: 39942 - protein, 52 aa, Artificial Sequence
  Synthetic polypeptide
MCQKEVMEQSAGRGNLDTDMHRQEGQPQKDTGRRGPSVSQGEKPQEPTLPTP

SEQ ID NO: 39943 - protein, 23 aa, Artificial Sequence
  Synthetic polypeptide
MSDQEKGPIVSSGVRDSSKWLRT

SEQ ID NO: 39944 - protein, 144 aa, Artificial Sequence
  Synthetic polypeptide
MDEKYVNSIWDLLKNAIQEIQRKNNSGLSFEELYRNAYTMVLHKHGEKLYTGLREVVTEHLINKVREDVLNSLNNNFLQTLNQAWNDHQTAMVMIRDILMYMVWWCVPMMPATRRLRQENCLNLGGRGCRKPRSCHCTLAWMTE

SEQ ID NO: 39945 - protein, 24 aa, Artificial Sequence
  Synthetic polypeptide
METPAQLLFLLLLWLPAEAGGIMR

SEQ ID NO: 39946 - protein, 13 aa, Artificial Sequence
  Synthetic polypeptide
MASICPFLKQWLN

SEQ ID NO: 39947 - protein, 21 aa, Artificial Sequence
  Synthetic polypeptide
MASTISAGCGGGACGPSYSGG

SEQ ID NO: 39948 - protein, 356 aa, Artificial Sequence
  Synthetic polypeptide
MKKKLVVLGLLAVVLVLVIVGLCLWLPSASKEPDNHVYTRAAMAADAKQCLEIGRDTLRDGGSAVDAAIAALLCVGLMNAHSMGIGVGLFLTIYNSTTRKAEVINAREVAPRLAFASMFNSSEQSQKGGLSVAVPGEIRGYELAHQRHGRLPWARLFQPSIQLARQGFPVGKGLAAVLENKRTVIEQQPVLWYVFCRDRKVLREGERLTLPRLADTYEMLAIEGAQAFYNGSLMAQIVKDIQAAGGIVTAEDLNNYRAELIEHPLNISLGDAVLYMPSARLSGPVLALILNILKGYNFSRESVETPEQKGLTYHRIVEAFRFAYAKRTLLGDPKFVDVTECQACSANSRNIFCMKE

SEQ ID NO: 39949 - protein, 283 aa, Artificial Sequence; identical to SEQ ID NO: 6579
  Synthetic polypeptide

SEQ ID NO: 39950 - protein, 208 aa, Artificial Sequence
  Synthetic polypeptide
MKGSNRNKDHSAEGEGVGKRPKRKCLQWHPLLAKKLLDFSEEEEEEDEEEDIDKVQLLGADGLEQDVGETEDDESPEQRARRPMNAFLLFCKRHRSLVRQEHPRLDNRGATKILADWWAVLDPKEKQKYTDMAKEYKDAFMKANPGYKWCPTTNKPVKSPTPTVNPRKKLWAFPSDSSRDLPSPKKAKTEEMPQLNFGMAVLYGGMCL

SEQ ID NO: 39951 - protein, 28 aa, Artificial Sequence
  Synthetic polypeptide
MTLATDGTADMFGIRWGQATSQGTEAAS

SEQ ID NO: 39952 - protein, 45 aa, Artificial Sequence; identical to SEQ ID NO: 7282
  Synthetic polypeptide

SEQ ID NO: 39953 - protein, 193 aa, Artificial Sequence; identical to SEQ ID NO: 7484
  Synthetic polypeptide

SEQ ID NO: 39954 - protein, 838 aa, Artificial Sequence
  Synthetic polypeptide
MAAQPRGGDYRGFFLLSILLGTPWEAWAGRILYSVSEETDKGSFVGDIAKDLGLEPRELAERGVRIISRGRTQLFALNQRSGSLVTAGRIDREEICAQSARCLVNFNILMEDKMNLYPIDVEIIDINDNVPRFLTEEINVKIMENTAPGVRFPLSEAGDPDVGTNSLQSYQLSPNRHFSLAVQSGDDETKYPELVLERVLDREEERVHHLVLTASDGGDPPRSSTAHIQVTVVDVNDHTPVFSLPQYQVTVPENVPVGTRLLTVHAIDLDEGVNGEVTYSFRKITPKLPKMFHLNSLTGEISTLEGLDYEETAFYEMEVQAQDGPGSLTKAKVLITVLDVNDNAPEVTMTSLSSSIPEDTPLGTVIALFYLQDRDSGKNGEVTCTIPENLPFKLEKSIDNYYRLVTTKNLDRETLSLYNITLKATDGGTPPLSRETHIFMQVADTNDNPPTFPHSSYSVYIAENNPRGASIFLVTAQDHDSEDNAQITYSLAEDTIQGAPVSSYVSINSDTGVLYALQSFDYEQLRELQLRVTAHDSGDPPLSSNMSLSLFVLDQNDNPPEILYPALPTDGSTGMELAPRSAEPGYLVTKVVAVDKDSGQNAWLSYLLLKASEPGLFAVGLYTGEVRTARALLDRDALKQSLVVAVQDHGQPPLSATVTLTVAVADSIPEVLADLGSLEPSDGPYNYDLTLYLVVAVATVSCVFLAFVLVLLALRLRRWHKSRLLQASEGGLANVPTSHFVGMDGVQAFLQTYSHEVSLTADSRKSHLIFPQPNYVDMLISQESCEKNDSLLTSVDFQECKENLPSIQPGMVLQAVAHLHGRLRQEDSLNPRIGGPPR

SEQ ID NO: 39955 - protein, 12 aa, Artificial Sequence
  Synthetic polypeptide
METDLECSDSRL

SEQ ID NO: 39956 - protein, 137 aa, Artificial Sequence
  Synthetic polypeptide
MVNKDMNGFPVKKCSAFQFFKKRVRRWIKSPMVSVDKHQSPSLKYTGSSMVHIPPGEPDFESSLCQTCLGEHAFQRGVLPQENESCSWETQSGCEVREPCNHANILTKPDPRTFWTNDDPGLEVLVPEGGVLPETQQ

SEQ ID NO: 39957 - protein, 1047 aa, Artificial Sequence
  Synthetic polypeptide
MAPPTGVLSSLLLLVTIAGCARKQCSEGRTYSNAVISPNLETTRIMRVSHTFPVVDCTAACCDLSSCDLAWWFEGRCYLVSCPHKENCEPKKMGPIRSYLTFVLRPVQRPAQLLDYGDMMLNRGSPSGIWGDSPEDIRKDLTFLGKDWGLEEMSEYSDDYRELEKDLLQPSGKQEPRGSAEYTDWGLLPGSEGAFNSSVGDSPAVPAETQQDPELHYLNESASTPAPKLPERSVLLPLPTTPSSGEVLEKEKASQLQEQSSNSSGKEVLMPSHSLPPASLELSSVTVEKSPVLTVTPGSTEHSIPTPPTSAAPSESTPSELPISPTTAPRTVKELTVSAGDNLIITLPDNEVELKAFVAPAPPVETTYNYEWNLISHPTDYQGEIKQGHKQTLNLSQLSVGLYVFKVTVSSENAFGEGFVNVTVKPARRVNLPPVAVVSPQLQELTLPLTSALIDGSQSTDDTEIVSYHWEEINGPFIEEKTSVDSPVLRLSNLDPGNYSFRLTVTDSDGATNSTTAALIVNNAVDYPPVANAGPNHTITLPQNSITLNGNQSSDDHQIVLYEWSLGPGSEGKHVVMQGVQTPYLHLSAMQEGDYTFQLKVTDSSRQQSTAVVTVIVQPENNRPPVAVAGPDKELIFPVESATLDGSSSSDDHGIVFYHWEHVRGPSAVEMENIDKAIATVTGLQVGTYHFRLTVKDQQGLSSTSTLTVAVKKENNSPPRARAGGRHVLVLPNNSITLDGSRSTDDQRIVSYLWIRDGQSPAAGDVIDGSDHSVALQLTNLVEGVYTFHLRVTDSQGASDTDTATVEVQPDPRKSGLVELTLQVGVGQLTEQRKDTLVRQLAVLLNVLDSDIKVQKIRAHSDLSTVIVFYVQSRPPFKVLKAAEVARNLHMRLSKEKADFLLFKVLRVDTAGCLLKCSGHGHCDPLTKRCICSHLWMENLIQRYIWDGESNCEWSIFYVTVLAFTLIVLTGGFTWLCICCCKRQKRTKIRKKTKYTILDNMDEQERMELRPKYEEEIRTCRETSGARRHRGKIMGGHGKKAAIYKPR

SEQ ID NO: 39958 - protein, 13 aa, Artificial Sequence
  Synthetic polypeptide
MEQFVQVYNWIDV

SEQ ID NO: 39959 - protein, 14 aa, Artificial Sequence
  Synthetic polypeptide
MLEKLEFEDEVPGP

SEQ ID NO: 39960 - protein, 313 aa, Artificial Sequence
  Synthetic polypeptide
MDDDIAALVVDNGSGMCKAGFAGDDAPRAVFPSIVGRPRHQGVMVGMGQKDSYVGDEAQSKRGILTLKYPIEHGIVTNWDDMEKIWHHTFYNELRVAPEEHPVLLTEAPLNPKANREKMTQIMFETFNTPAMYVAIQAVLSLYASGRTTGIVMDSGDGVTHTVPIYEGYALPHAILRLDLAGRDLTDYLMKILTERGYSFTTTAEREIVRDIKEKLCYVALDFEQEMATAASSSSLEKSYELPDGQVITIGNERFRCPEALFQPSFLGMESCGIHETTFNSIMKCDVDIRKDLYANTVMSVELNAASGTRWAP

SEQ ID NO: 39961 - protein, 212 aa, Artificial Sequence; identical to SEQ ID NO: 8995
  Synthetic polypeptide

SEQ ID NO: 39962 - protein, 46 aa, Artificial Sequence; identical to SEQ ID NO: 9149
  Synthetic polypeptide

SEQ ID NO: 39963 - protein, 20 aa, Artificial Sequence
  Synthetic polypeptide
MMVNCHAHFWVSTYLSPHLL

SEQ ID NO: 39964 - protein, 11 aa, Artificial Sequence
  Synthetic polypeptide
MGISIVKQCMT

SEQ ID NO: 39965 - protein, 657 aa, Artificial Sequence
  Synthetic polypeptide
MALLAMHSWRWAAAAAAFEKRRHSAILIRPLVSVSGSGPQWRPHQLGALGTARAYQALQVWPLIEKRTCWHGHAGGGLHTDPKEGLKDVDTRKIIKAMLSYVWPKDRPDLRARVAISLGFLGGAKAMNIVVPFMFKYAVDSLNQMSGNMLNLSDAPNTVATMATAVLIGYGVSRAGAAFFNEVRNAVFGKVAQNSIRRIAKNVFLHLHNLDLGFHLSRQTGALSKAIDRGTRGISFVLSALVFNLLPIMFEVMLVSGVLYYKCGAQFALVTLGTLGTYTAFTVAVTRWRTRFRIEMNKADNDAGNAAIDSLLNYETVKYFNNERYEAQRYDGFLKTYETASLKSTSTLAMLNFGQSAIFSVGLTAIMVLASQGIVAGTLTVGDLVMVNGLLFQLSLPLNFLGTVYRETRQALIDMNTLFTLLKVDTQIKDKVMASPLQITPQTATVAFDNVHFEYIEGQKVLSGISFEVPAGKKVAIVGGSGSGKSTIVRLLFRFYEPQKGSIYLAGQNIQDVSLESLRRAVGVVPQDAVLFHNTIYYNLLYGNISASPEEVYAVAKLAGLHDAILRMPHGYDTQVGERGLKLSGGEKQRVAIARAILKDPPVILYDEATSSLDSITEETILGAMKDVVKHRTSIFIAHRLSTVVDADEIIVLDQEK

SEQ ID NO: 39966 - protein, 43 aa, Artificial Sequence
  Synthetic polypeptide
GRARWLTPVIPAFWEAEAGGSRGQEIQTILANTCIPRKDKGCI

SEQ ID NO: 39967 - protein, 77 aa, Artificial Sequence
  Synthetic polypeptide
ARHGGSRLSSQHLGGQEPEQLPEKRRTSKAFWNSPRRSGWRVPLKWTGPTISQSWPFTSCPLSSGEPHVWKSCGGCW

SEQ ID NO: 39968 - protein, 96 aa, Artificial Sequence
  Synthetic polypeptide
LFPFTSSLLICEVEGRMPTSQGHREDQMSSWSISTSVQPSGRAAASASRPTGSLSVAGAAASAGAPSTSTVPALPAPGSTGPATMSSAPTLKSPRF

SEQ ID NO: 39969 - protein, 28 aa, Artificial Sequence
  Synthetic polypeptide
PQNSTASVSEAERKAQVYYRACMNETRI

SEQ ID NO: 39970 - protein, 109 aa, Artificial Sequence; identical to SEQ ID NO: 39688
  Synthetic polypeptide

SEQ ID NO: 39971 - protein, 28 aa, Artificial Sequence
  Synthetic polypeptide
ALELGVVSQPSVYRWWSHAHRHLSGWSR

SEQ ID NO: 39972 - protein, 46 aa, Artificial Sequence
  Synthetic polypeptide
AQWLTPVIPALWEAEAGESPERPRRQCGWRRRRRPRRCGRSSSRSA

SEQ ID NO: 39973 - protein, 40 aa, Artificial Sequence
  Synthetic polypeptide
VRLAVNSPPVEPPEQHSRSQRALFQAGDRRCAEAYQQFTL

SEQ ID NO: 39974 - protein, 54 aa, Artificial Sequence; identical to SEQ ID NO: 12712
  Synthetic polypeptide

SEQ ID NO: 39975 - protein, 1624 aa, Artificial Sequence; identical to SEQ ID NO: 12739
  Synthetic polypeptide

SEQ ID NO: 39976 - protein, 53 aa, Artificial Sequence; identical to SEQ ID NO: 12800
  Synthetic polypeptide

SEQ ID NO: 39977 - protein, 27 aa, Artificial Sequence
  Synthetic polypeptide
SLTLERPVELKFCRLLNGLGEEIKQLQ

SEQ ID NO: 39978 - protein, 131 aa, Artificial Sequence
  Synthetic polypeptide
MGVVAHTCNPNTLGGQGIEMHQRLSNIERNWPYYFGFGLPLAFLTAMQSSYIISGCLFSILFPLFIISANEAKPGKAYLFQLRLFSLVVFLSNRLFHKTVYLQSALSSSTSAEKFPSPHPSPAKLKATAGH

SEQ ID NO: 39979 - protein, 17 aa, Artificial Sequence
  Synthetic polypeptide
ATQKTDDSLGLGLKTMV

SEQ ID NO: 39980 - protein, 61 aa, Artificial Sequence
  Synthetic polypeptide
SQILGMQSLALVAQSGVQWRDLSSLQPPPPGFKRFSCLSLPNRCNPERFTWCCTSTFCDRQ

SEQ ID NO: 39981 - protein, 64 aa, Artificial Sequence
  Synthetic polypeptide
MELSAQFAATTTTPPRPLGRAWCGSGRTTMAPGRPTTWKWASPSSMPMRSSTPGSTSLPLALAT

SEQ ID NO: 39982 - protein, 25 aa, Artificial Sequence
  Synthetic polypeptide
QIGCYQGFAFAWKCLLHSCTTEKDR

SEQ ID NO: 39983 - protein, 14 aa, Artificial Sequence
  Synthetic polypeptide
RVAASSPIMRKQMP

SEQ ID NO: 39984 - protein, 21 aa, Artificial Sequence
  Synthetic polypeptide
MLGTRPHGRSWKDIFDHQIHV

SEQ ID NO: 39985 - protein, 66 aa, Artificial Sequence; identical to SEQ ID NO: 15043
  Synthetic polypeptide

SEQ ID NO: 39986 - protein, 21 aa, Artificial Sequence
  Synthetic polypeptide
KLILCLNDCKRCQRMCSRMCK

SEQ ID NO: 39987 - protein, 21 aa, Artificial Sequence
  Synthetic polypeptide
MGAVAHTCNPSTLGGQGKEVI

SEQ ID NO: 39988 - protein, 41 aa, Artificial Sequence
  Synthetic polypeptide
KHTDLQATAIGKSCGGIPLVWTSAAGRGPEAPCRNSTTQSR

SEQ ID NO: 39989 - protein, 31 aa, Artificial Sequence
  Synthetic polypeptide
RDLVSTKQLKKKLGVGSDSEVEERSGLVFLQ

SEQ ID NO: 39990 - protein, 68 aa, Artificial Sequence
  Synthetic polypeptide
GGRHCHALMPKEPVAVSSHVVTISSLLPATAYNCSVTSFSHDSPSVPTFIAVSTMGSVELVHLSILHP

SEQ ID NO: 39991 - protein, 16 aa, Artificial Sequence
  Synthetic polypeptide
LQVSRGLPSHAELIRF

SEQ ID NO: 39992 - protein, 74 aa, Artificial Sequence
  Synthetic polypeptide
MTCKQHGFKLHESLMHGFSSASATPGTARPTLPLPPLLSLLGVKTMRMKTFTMIHFHLITRKMLAGGASKDIYA

SEQ ID NO: 39993 - protein, 32 aa, Artificial Sequence
  Synthetic polypeptide
TLEVEGKKKEMRKMIQTMTQRRIKTQQSASSS

SEQ ID NO: 39994 - protein, 42 aa, Artificial Sequence; identical to SEQ ID NO: 17039
  Synthetic polypeptide

SEQ ID NO: 39995 - protein, 14 aa, Artificial Sequence
  Synthetic polypeptide
LLITAEDQSMWIQS

SEQ ID NO: 39996 - protein, 338 aa, Artificial Sequence; identical to SEQ ID NO: 17227
  Synthetic polypeptide

SEQ ID NO: 39997 - protein, 61 aa, Artificial Sequence
  Synthetic polypeptide
KLRKCVTRNSLCKKCKRKFFKLSKMIPRNLDLLEGMESTQMPKCLCPSTDFGHQKEILQHL

SEQ ID NO: 39998 - protein, 314 aa, Artificial Sequence; identical to SEQ ID NO: 17399
  Synthetic polypeptide

SEQ ID NO: 39999 - protein, 46 aa, Artificial Sequence
  Synthetic polypeptide
RLKMGETLKDKVMGLVIPDVPKSEEGSKYTHCGQCEECSPKYISSC

SEQ ID NO: 40000 - protein, 87 aa, Artificial Sequence
  Synthetic polypeptide
MASAWEGGAWRRRRGEERGVGVVGRSVASAWGATTPATRWWWMGKSTTSTCCPAASSTPRPCPSLATGWSSTCQACLRKQRRMKRKA

SEQ ID NO: 40001 - protein, 50 aa, Artificial Sequence
  Synthetic polypeptide
MAVSYEVTHRLTMGSTGCDRPLDKGLSGWDGSALTMVTQTMHRSSRAESP

SEQ ID NO: 40002 - protein, 75 aa, Artificial Sequence
  Synthetic polypeptide
MLDNLMYDYELNWVRQAPGKGLEWVANIKQDGSEKYYVDSVKGRFTISRDNAKNSLYLQMNSLRAEDTAVYYCAR

SEQ ID NO: 40003 - protein, 605 aa, Artificial Sequence
  Synthetic polypeptide
MVILESMVSLTQELCPVAMRVAEGHNKMLSNVAERVTVPRNFIRGALLEQAGQDIQNKLDEVKLSVVTYLTSSIVDEILQELYHSHKSLARHLTQLRTLSDPPGCPGQGQDLSSRGRGRNHDHEETTDDELGTNIDTMAIKKQKRCRKIRPVSAFISGSPQDMESQLGNLGIPPGWFSGLGGSQPTASGSWEGLSELPTHGYKLRHQTQGRPRPPRTTPPGPGRPSMPAPGTRQENGMATRLDEGLEDFFSRRVLEESSSYPRTLRTVRPGLSEAPLPPLQKKRRRGLFHFRRPRSFKGDRGPGSPTTGLLLPPPPPPPPTQESPPSPDPPSLGNNSSPCWSPEEESSLLPGFGGGRGPSFRRKMGTEGSEPGEGGPAPGTAQQPRVHGVALPGLERAKGWSFDGKREGPGPDQEGSTQAWQKRRSSDDAGPGSWKPPPPPQSTKPSFSAMRRAEATWHIAEESAPNHSCQSPSPASQDGEEEKEGTLFPERTLPARNAKLQDPALAPWPPKPVAVPRGRQPPQEPGVREEAEAGDAAPGVNKPRLRLSSQQDQEEPEVQGPPDPGRRTAPLKPKRTRRAQSCDKLEPDRRRPPDPTGTSEPGTD

SEQ ID NO: 40004 - protein, 57 aa, Artificial Sequence; identical to SEQ ID NO: 17927
  Synthetic polypeptide

SEQ ID NO: 40005 - protein, 30 aa, Artificial Sequence; identical to SEQ ID NO: 17960
  Synthetic polypeptide

SEQ ID NO: 40006 - protein, 110 aa, Artificial Sequence
  Synthetic polypeptide
TITDAELPIYRNIPGFLRTLMDALRKDKIIFPNDENVKFLSSPLLILHGEDDRTVPLEYGKKLYEIARNAYRNKERVKMVIFPPGFQHNLLCKSPTLLITVRDFLSKQWS

SEQ ID NO: 40007 - protein, 31 aa, Artificial Sequence; identical to SEQ ID NO: 18130
  Synthetic polypeptide

SEQ ID NO: 40008 - protein, 778 aa, Artificial Sequence
  Synthetic polypeptide
GQEFKTSLAKMVKPHIYQKYKKLDGHAGDLDIEDDMKAQMNCFYLKALDGFVMVLTDDGDMIYISDNVNKYMGLTQFELTGHSVFDFTHPCDHEEMREMLTHRNGLVKKGKEQNTQRSFFLRMKCTLTSRGRTMNIKSATWKVLHCTGHIHVYDTNSNQPQCGYKKPPMTCLVLICEPIPHPSNIEIPLDSKTFLSRHSLDMKFSYCDERITELMGYEPEELLGRSIYEYYHALDSDHLTKTHHDMFTKGQVTTGQYRMLAKRGGYVWVETQATVIYNTKNSQPQCIVCVNYVVSGIIQHDLIFSLQQTECVLKPVESSDMKMTQLFTKVESEDTSSLFDKLKKEPDALTLLAPAAGDTIISLDFGSNDTETDDQQLEEVPLYNDVMLPSPNEKLQNINLAMSPLPTAETPKPLRSSADPALNQEVALKLEPNPESLELSFTMPQIQDQTPSPSDGSTRQSSPEPNSPSEYCFYVDSDMVNEFKLELVEKLFAEDTEAKNPFSTQDTDLDLEMLAPYIPMDDDFQLRSFDQLSPLESSSASPESASPQSTVTVFQQTQIQEPTANATTTTATTDELKTVTKDRMEDIKILIASPSPTHIHKETTSATSSPYRDTQSRTASPNRAGKGVIEQTEKSHPRSPNVLSVALSQRTTVPEEELNPKILALQNAQRKRKMEHDGSLFQAVGIGTLLQQPDDHAATTSLSWKRVKGCKSSEQNGMEQKTIILIPSDLACRLLGQSMDESGLPQLTSYDCEVNAPIQGSRNLLQGEELLRALDQVN

SEQ ID NO: 40009 - protein, 23 aa, Artificial Sequence
  Synthetic polypeptide
MVAGPTYLGDLCPPKWSNCSSYQ

SEQ ID NO: 40010 - protein, 341 aa, Artificial Sequence; identical to SEQ ID NO: 18535
  Synthetic polypeptide

SEQ ID NO: 40011 - protein, 57 aa, Artificial Sequence
  Synthetic polypeptide
IVATETTKPKTRTISPFTGKFQGPANQKTSSTGSSLLPITWGPPSCYQNGTLPKTSE

SEQ ID NO: 40012 - protein, 279 aa, Artificial Sequence; identical to SEQ ID NO: 18982
  Synthetic polypeptide

SEQ ID NO: 40013 - protein, 45 aa, Artificial Sequence
  Synthetic polypeptide
SFLIWEGGLRMPILTTTQSYWRFQKTQSLGVDEVTIVNILTNRSN

SEQ ID NO: 40014 - protein, 39 aa, Artificial Sequence
  Synthetic polypeptide
GQDFKTSLGNMINDKERVAAAMENPNLREIVEQCVLEPD

SEQ ID NO: 40015 - protein, 22 aa, Artificial Sequence
  Synthetic polypeptide
RQRIFTYQICKATNKCTERQLL

SEQ ID NO: 40016 - protein, 30 aa, Artificial Sequence
  Synthetic polypeptide
AGGSGSVVIWTVPTGSWQKSARWPRCMRRS

SEQ ID NO: 40017 - protein, 36 aa, Artificial Sequence; identical to SEQ ID NO: 19426
  Synthetic polypeptide

SEQ ID NO: 40018 - protein, 54 aa, Artificial Sequence
  Synthetic polypeptide
PDQWLTPVIPTLSEAEVGTLLDTRNLEASWATRDAIEKLFPDAIRLRFEDIQQN

SEQ ID NO: 40019 - protein, 100 aa, Artificial Sequence
  Synthetic polypeptide
ITLGKLLPPCQPGSSLSSKVLEDDVSAVEFRQTGYMLRCSLSHAITLAQPYCSGEMCPGTSELKTPRNFIRMEMGVRMWGFITSPKESTDSACPSLVCTK

SEQ ID NO: 40020 - protein, 54 aa, Artificial Sequence; identical to SEQ ID NO: 19939
  Synthetic polypeptide

SEQ ID NO: 40021 - protein, 23 aa, Artificial Sequence
  Synthetic polypeptide
GQEFETSLANMETPGRFTAEADQ

SEQ ID NO: 40022 - protein, 37 aa, Artificial Sequence
  Synthetic polypeptide
PGVVAYACSPKPLRRLRQEDPLNLTCPSCGITFAPKS

SEQ ID NO: 40023 - protein, 38 aa, Artificial Sequence; identical to SEQ ID NO: 20282
  Synthetic polypeptide

SEQ ID NO: 40024 - protein, 378 aa, Artificial Sequence
  Synthetic polypeptide
ATVWLGSGDEKKMERVSEPCPGSKKQLKFEELQCDVSMEEDSRQEWTFTLYDFDNNGKVTREDITSLLHTIYEVVDSSVNHSPTSSKMLRVKLTVAPDGSQSKRSVLVNQADLQSARPRAETKPTEDLRSWEKKQRAPLRFQGDSRLEQSGCYHHCVDENIERRNHYLDLAGIENYTSQFGPGSPSVAQKSELPPRTSNPTRSRSHEPEAIHIPHRKPQGVDPASFHFLDTPIAKVSELQQRLRGTQDGSKHFVRSPKAQGKSVGVGHVARGARNKPPLGPAIPAVSPSAHLAASPALLPSLAPLGHKKHKHRAKESQQGCRGLQAPLASGGPVLGREHLRELPALVVYESQAGQPVQRHEHHHHHEHHHHYHHFYQT

SEQ ID NO: 40025 - protein, 28 aa, Artificial Sequence
  Synthetic polypeptide
WQIYSGPLPTSPGAACLPCFSCGAKVFR

SEQ ID NO: 40026 - protein, 345 aa, Artificial Sequence
  Synthetic polypeptide
SQGSGLNFIDLMVRQGNIDNPPKTPLVPGFECSGIVEALGDSVKGYEIGDRVMAFVNYNAWAEVVCTPVEFVYKIPDDMSFSEAAAFPMNFVTAYVMLFEVANLREGMSVLVHSAGGGVGQAVAQLCSTVPNVTVFGTASTFKHEAIKDSVTHLFDRNADYVQEVKRISAEGVDIVLDCLCGDNTGKGLSLLKPLGTYILYGSSNMVTGETKSFFSFAKSWWQVEKVNPIKLYEENKVIAGFSLLNLLFKQGRAGLIRGVVEKLIGLYNQKKIKPVVDSLWALEEVKEAMQRIHDRGNIGKLILDVEKTPTPLMANDSTETSEAGEEEEDHEGDSENKERMPFIQ

SEQ ID NO: 40027 - protein, 28 aa, Artificial Sequence
  Synthetic polypeptide
MLLTTFVIHGRRRSLQTKADQQVKQQEI

SEQ ID NO: 40028 - protein, 17 aa, Artificial Sequence
  Synthetic polypeptide
WRELLHGTEGGEHRAGV

SEQ ID NO: 40029 - protein, 117 aa, Artificial Sequence; identical to SEQ ID NO: 21624
  Synthetic polypeptide

SEQ ID NO: 40030 - protein, 24 aa, Artificial Sequence
  Synthetic polypeptide
MGAVTHIWNPRTLGGQDPDHRHHS

SEQ ID NO: 40031 - protein, 49 aa, Artificial Sequence
  Synthetic polypeptide
VQEFETSLGNIQMSTKIKICKVWWHAPVVPTAREAEAGESLKPGRWRLQ

SEQ ID NO: 40032 - protein, 18 aa, Artificial Sequence
  Synthetic polypeptide
LLSSLFSEPTCLILVSPQ

SEQ ID NO: 40033 - protein, 22 aa, Artificial Sequence
  Synthetic polypeptide
IQEAEVAVKQMKLKDSRIKLMS

SEQ ID NO: 40034 - protein, 18 aa, Artificial Sequence
  Synthetic polypeptide
MGGATSPLLSSAKSGSHG

SEQ ID NO: 40035 - protein, 605 aa, Artificial Sequence
  Synthetic polypeptide
MVWVGTIGSGPKGRNLCATFQNTETFEFQDEVGALLLSVCQTVSQGILCFLPSYKLLEKLKERWLSTGLWHNLELVKTVIVEPQGGEKTNFDELLQVYYDAIKYKGEKDGALLVAVCRGKVSEGLDFSDDNARAVITIGIPFPNVKDLQVELKRQYNDHHSKLRGLLPGRQWYEIQAYRALNQALGRCIRHRNDWGALILVDDRFRNNPSRYISGLSKWVRQQIQHHSTFESALESLAEFSKKHQKVLNVSIKDRTNIQDNESTLEVTSLKYSTSPYLLEAASHLSPENFVEDEAKICVQELQCPKIITKNSPLPSSIISRKEKNDPVFLEEAGKAEKIVISRSTSPTFNKQTKRVSWSSFNSLGQYFTGKIPKATPELGSSENSASSPPRFKTEKMESKTVLPFTDKCESSNLTVNTSFGSCPQSETIISSLKIDATLTRKNHSEHPLCSEEALDPDIELSLVSEEDKQSTSNRDFETEAEDESIYFTPELYDPEDTDEEKNDLAETDRGNRLANNSDCILAKDLFEIRTIKEVDSAREVKAEDCIDTKLNGILHIEESKIDDIDGNVKTTWINELELGKTHEIEIKNFKPSPSKNKGMFPGFK

SEQ ID NO: 40036 - protein, 12 aa, Artificial Sequence
  Synthetic polypeptide
IPTVTPGAASSC

SEQ ID NO: 40037 - protein, 55 aa, Artificial Sequence
  Synthetic polypeptide
NLPLTLVPARKLAPALLSAMIFAVLWSTRGAMNLLLFLVRVRIRDPTLISSPLYC

SEQ ID NO: 40038 - protein, 44 aa, Artificial Sequence
  Synthetic polypeptide
SQLLRRLRQENHLNPGGRGYSETRLHHWTPAWAAEKQRLPRGHP

SEQ ID NO: 40039 - protein, 51 aa, Artificial Sequence
  Synthetic polypeptide
TQEAEVANAASKLLGQNWVQNAFDGSCNFFRWLEHLRLLRVIGKTTELATF

SEQ ID NO: 40040 - protein, 87 aa, Artificial Sequence
  Synthetic polypeptide
AHLNERNTLQEENKKLSEQLQQKIENDQQHQAAELECEEDVIPDSPITAFSFSGVNRLRRKENPHVRYIEQTHTKLEHSVCANEMRK

SEQ ID NO: 40041 - protein, 1557 aa, Artificial Sequence; identical to SEQ ID NO: 23190
  Synthetic polypeptide

SEQ ID NO: 40042 - protein, 189 aa, Artificial Sequence; identical to SEQ ID NO: 23218
  Synthetic polypeptide

SEQ ID NO: 40043 - protein, 104 aa, Artificial Sequence
  Synthetic polypeptide
GNLQICCKMNLDVLSEMGHSCKDNTDSVVFEDVAVNFTQEEWALLGPSQKKLYRDVMQETFVNLASIGENWEEKNIEDHKNQGRKLRDGVLPCCPDWSQTPELK

SEQ ID NO: 40044 - protein, 231 aa, Artificial Sequence
  Synthetic polypeptide
GWARWLTPVIPALWEAKASGSLEGPFVTWRSMSVLPAHAAREVPVWMGKMASAASARLAPCPHSASPRAIPVPMSPAVTASAMMHLAGSAVCVSLAGVAPAAARAWPETPVSPSRAGPVGHAAAMEWVSTAPARLVSRDVSVNSSPPAPRTPVSMGAAASLPLASCLSAPAPRAGKAHDASRMWTSVLAPHPVALMVSAPTWQGVSAAPAMEGTLALPAIRTSMTVTPTHA

SEQ ID NO: 40045 - protein, 49 aa, Artificial Sequence
  Synthetic polypeptide
GAPLPGQPPRPGGRWGGQAPPGQPPRPGGRRTTMTRTKPLPPQLSTSGA

SEQ ID NO: 40046 - protein, 32 aa, Artificial Sequence
  Synthetic polypeptide
GRRRRRWPEEARAAAVAAKAEAVSPAKSTLAH

SEQ ID NO: 40047 - protein, 42 aa, Artificial Sequence
  Synthetic polypeptide
TELNIVPVPREIWGRLHGTPGTEARGHAVWSRGHTGGPCGQG

SEQ ID NO: 40048 - protein, 37 aa, Artificial Sequence
  Synthetic polypeptide
TAELPKPSISSNNSNPKEDKDAVAFTCEPEIHSTTCL

SEQ ID NO: 40049 - protein, 330 aa, Artificial Sequence; identical to SEQ ID NO: 24498
  Synthetic polypeptide

SEQ ID NO: 40050 - protein, 40 aa, Artificial Sequence
  Synthetic polypeptide
SQLLGRLRQEQLLEPRMQRKHSLGLGHPRSLRGPHQPTPS

SEQ ID NO: 40051 - protein, 13 aa, Artificial Sequence
  Synthetic polypeptide
MSLCILSMKSTMG

SEQ ID NO: 40052 - protein, 18 aa, Artificial Sequence
  Synthetic polypeptide
AWEAEIMVKYLLFMWEIK

SEQ ID NO: 40053 - protein, 203 aa, Artificial Sequence
  Synthetic polypeptide
MVLLVRMENEVALEDLALRVLLERMVKLDLRDPQGLLGLVVTKETQDPLVHKDYKACLVQVVLQEKMENLGNQVQRVMPVHLELQEARVMLVPLVNVDLLDWQGPQDLEVELVPLVPKEERVLLVLLGHLVLLVLLVCKECLEKEEVLEVLVQRVTRVNQAVQVLMVSQGKMAQGVLLVLLVLLAQLASLEIRVKVVPPDFQV

SEQ ID NO: 40054 - protein, 25 aa, Artificial Sequence
  Synthetic polypeptide
MGTVADTCDPSTLGGGVCDTAYRCR

SEQ ID NO: 40055 - protein, 22 aa, Artificial Sequence
  Synthetic polypeptide
MGAVTHTCNPSTLEGRDLPMMG

SEQ ID NO: 40056 - protein, 20 aa, Artificial Sequence
  Synthetic polypeptide
PPWLLCPMDRQSLSEELKCT

SEQ ID NO: 40057 - protein, 43 aa, Artificial Sequence
  Synthetic polypeptide
FLLIHSFLPPQFWLPAANCGLKIDMISCVWKDWFEDFRSSKKG

SEQ ID NO: 40058 - protein, 78 aa, Artificial Sequence
  Synthetic polypeptide
MAQWLMPVIPALWEAQIHFILLFSRQGKLRLQKWYITLPDKERKKITREIVQIILSRGHRTSSFVDWKELKLVYKRCL

SEQ ID NO: 40059 - protein, 1597 aa, Artificial Sequence
  Synthetic polypeptide
KARKQQMLVCFVNLDVNKDECSTEHLQQKLVNVSPDLPKLISSMNVQQPKENEIVVLSGLASGNLQADFEVSQCPWLPDICLVQCARGNRPNSTNCIIFEINKFLIGLELVQERQLHLETNILKLEDDTNCSLSSIEEDFLTASEHLEEESEVDESRNDYENINVSANVLESKQLKGATQVEWNCNKEKWLYALEDKYINKYPTPLIKTERSPENLTKNTALQSLDPSAKPSQWKREAVGNGRQATHYYHSEAFKGQMEKSQALYIPKDAYFSMMDKDVPSACAVAEQRSNLNPGDHEDTRNALPPRQDGEVTTGKYATNLAESVLQDAFIRLSQSQSTLPQESAVSVSVGSSLLPSCYSTKDTVVSRSWNELPKIVVVQSPDGSDAAPQPGISSWPEMEVSVETSSILSGENSSRQPQSALEVALACAATVIGTISSPQATERLKMEQVVSNFPPGSSGALQTQAPQGLKEPSINEYSFPSALCGMTQVASAVAVCGLGEREEVTCSVAPSGSLPPAAEASEAMPPLCGLASMELGKEAIAKGLLKEAALVLTRPNTYSSIGDFLDSMNRRIMETASKSQTLCSENVVRNELAHTLSNVILRHSIDEVHHKNMIIDPNDNRHSSEILDTLMESTNQLLLDVICFTFKKMSHIVRLGECPAVLSKETIRRRETEPSCQPSDPGASQAWTKATESSSSSPLSNSHNTSLVINNLVDGMYSKQDKGGVRPGLFKNPTLQSQLSRSHRVPDSSTATTSSKEIYLKGIAGEDTKSPHHSENECRASSEGQRSPTVSQSRSGSQEAEESIHPNTQEKYNCATSRINEVQVNLSLLGDDLLLPAQSTLQTKHPDIYCITDFAEELADTVVSMATEIAAICLDNSSGKQPWFCAWKRGSEFLMTPNVPCRSLKRKKESQGSGTAVRKHKPPRLSEIKRKTDEHPELKEKLMNRVVDESMNLEDVPDSVNLFANEVAAKIMNLTEFSMVDGMWQAQGYPRNRLLSGDRWSRLKASSCESIPEEDSEARAYVNSLGLMSTLSQPVSRASSVSKQSSCESITDEFSRFMVNQMENEGRGFELLLDYYAGKNASSILNSAMQQACRKSDHLSVRPSCPSKQSSTESITEEFYRYMLRDIERDSRESASSRRSSQDWTAGLLSPSLRSPVCHRQSSMPDSRSPCSRLTVNVPIKANSLDGFAQNCPQDFLSVQPVSSASSSGLCKSDSCLYRRGGTDHITNMLIHETWASSIEALMRKNKIIVDDAEEADTEPVSGGSPSQAEKCANRLAASRMCSGPTLLVQESLDCPRKDSVTECKQPPVSSLSKTASLTNHSPLDSKKETSSCQDPVPINHKRRSLCSREVPLIQIETDQREACAGEPEPFLSKSSLLEEAEGHSNDKNIPDVVRGGDTAVSACQIHSDSLDTRDVPEAEASTEARAPDEAPNPPSSSEESTGSWTQLANEEDNPDDTSSFLQLSERSMSELVEEKKILKGQSESTEAPASGPPTGTASPQRSLLVINFDLEPECPDAELRATLQWIAASELGIPTIYFKKSQENRIEKFLDVVQLVHRKSWKVGDIFHAVVQYCKMHEEQKDGRLSLFDWLLELG

SEQ ID NO: 40060 - protein, 14 aa, Artificial Sequence
  Synthetic polypeptide
CNPSTLGDQAEKLG

SEQ ID NO: 40061 - protein, 108 aa, Artificial Sequence
  Synthetic polypeptide
IVESGDTPKDPAVISKSPSMAQDSGASELLPNGDLEKRSEPQPEEGSPAGGQKGGAPAEGEGAAETLPEASRAVENGCCTPKEGRGAPAEAGESSAPGAASSGPTSIP

SEQ ID NO: 40062 - protein, 50 aa, Artificial Sequence
  Synthetic polypeptide
ASKPFPWVFGSSFLKALVNLSFVTGVSSMTFMMGNICRSPIAEAVFRKLV

SEQ ID NO: 40063 - protein, 150 aa, Artificial Sequence; identical to SEQ ID NO: 26567
  Synthetic polypeptide

SEQ ID NO: 40064 - protein, 32 aa, Artificial Sequence
  Synthetic polypeptide
ICHFLSVTGSLLRNYQNIEITNLLSFLKRKTQ

SEQ ID NO: 40065 - protein, 50 aa, Artificial Sequence
  Synthetic polypeptide
SPVTMEQLICKVGSHQGSAAVDLGQISLSPSAACSLKILQLITANSIIVT

SEQ ID NO: 40066 - protein, 60 aa, Artificial Sequence
  Synthetic polypeptide
MKHLEDYMEHTPPPRRPGPSSRRTICAVPSASAWPRPTCGCWWTASFATPPRTCGSSATP

SEQ ID NO: 40067 - protein, 57 aa, Artificial Sequence; identical to SEQ ID NO: 27241
  Synthetic polypeptide

SEQ ID NO: 40068 - protein, 48 aa, Artificial Sequence; identical to SEQ ID NO: 27244
  Synthetic polypeptide

SEQ ID NO: 40069 - protein, 13 aa, Artificial Sequence
  Synthetic polypeptide
MLSTSWTLPRKLH

SEQ ID NO: 40070 - protein, 429 aa, Artificial Sequence; identical to SEQ ID NO: 27458
  Synthetic polypeptide

SEQ ID NO: 40071 - protein, 69 aa, Artificial Sequence
  Synthetic polypeptide
MGTVAHACNTSTLGGQEHCEGLRCTLWDDPPGGHEVGTYRHQVPPAGISEQTSELGIGTVPAHGAGHGH

SEQ ID NO: 40072 - protein, 51 aa, Artificial Sequence
  Synthetic polypeptide
VKLAKHRKTNYAASSYLSLTPEQWKSHRSYSCQVTHEGSTVEKTVAPTECS

SEQ ID NO: 40073 - protein, 75 aa, Artificial Sequence; identical to SEQ ID NO: 28646
  Synthetic polypeptide

SEQ ID NO: 40074 - protein, 10 aa, Artificial Sequence
  Synthetic polypeptide
MTKLLSPIRM

SEQ ID NO: 40075 - protein, 178 aa, Artificial Sequence; identical to SEQ ID NO: 28915
  Synthetic polypeptide

SEQ ID NO: 40076 - protein, 572 aa, Artificial Sequence
  Synthetic polypeptide
MQLDQICISFDEGKTTMNFIEAALLIQGSACVYSKKVEYLYSLVYQALDFISGKRRAKQLSSVQEDRANGVASSGVPQEAENEFLSLDDFPDSRTNVDLKNDQTPSEVLIIPLLPMALVAPDEMEKNNNPLYSRQGEVLASRKDFRMNTCVPHPRGAFMLEPEGMSPMEPAGVSPMPGTQKDTGRTEEQPMEVSVCRSPVPALGFSQEPGPSPEGPMPLGGGEDEDAEEAVELPEASAPKAALEPKESRSPQQSAALPRRYMLREREGAPEPASCVKETPDPWQSLDPFDSLESKPFKKGRPYSVPPCVEEALGQKRKRKGAAKLQDFHQWYLAAYADHADSRRLRRKGPSFADMEVLYWTHVKEQLETLRKLQRREVAEQWLRPAEEDHLEDSLEDLGAAADDFLEPEEYMEPEGADPREAADLDAVPMSLSYEELVRRNVELFIATSQKFVQETELSQRIRDWEDTVQPLLQEQEQHVPFDIHTYGDQLVSRFPQLNEWCPFAELVAGQPAFEVCRSMLASLQLANDYTVEITQQPGLEMAVDTMSLRLLTHQRAHKRFQTYAAPSMAQP

SEQ ID NO: 40077 - protein, 56 aa, Artificial Sequence; identical to SEQ ID NO: 29368
  Synthetic polypeptide

SEQ ID NO: 40078 - protein, 26 aa, Artificial Sequence
  Synthetic polypeptide
MLPPFVLAVTMGLSVVKVAKVSSKGV

SEQ ID NO: 40079 - protein, 65 aa, Artificial Sequence
  Synthetic polypeptide
GWAQWLTPVIPALWEAEVDGSRGQEIKIILANTFSKKSDGHIKDQRLGGRAKSRSQNNSVCSKTI

SEQ ID NO: 40080 - protein, 56 aa, Artificial Sequence
  Synthetic polypeptide
MGAVAHTCNPSTLEGQDCPCGRPRRQRKDGHHHRATGSPVQGPGTDLWETERGKLL

SEQ ID NO: 40081 - protein, 153 aa, Artificial Sequence; identical to SEQ ID NO: 39849
  Synthetic polypeptide

SEQ ID NO: 40082 - protein, 45 aa, Artificial Sequence
  Synthetic polypeptide
MAVVAHACNLNSFGGQGPAWFLRYPNHRHRPDGEPLGGHHLLQGH

SEQ ID NO: 40083 - protein, 81 aa, Artificial Sequence
  Synthetic polypeptide
DLDRILKQKKVISGKTENLGSILSWWHNKWHNSMPPHHPLKRRRRRKLKSRTKRNLRKTRKLVLVLPRKIPTRKPNQSLTF

SEQ ID NO: 40084 - protein, 10 aa, Artificial Sequence
  Synthetic polypeptide
SQVMDVDTLY

SEQ ID NO: 40085 - protein, 34 aa, Artificial Sequence
  Synthetic polypeptide
LNEGASGLDGKPGSRGTDGPMGPHGPAGPKGERG

SEQ ID NO: 40086 - protein, 18 aa, Artificial Sequence
  Synthetic polypeptide
MLQPSQEVGTISKHLDWH

SEQ ID NO: 40087 - protein, 404 aa, Artificial Sequence
  Synthetic polypeptide
MDGQMMDTGVDKLVDGAGDFSEFFEWQKKMQAKDREEQLAASECRRLQGKLSHEEAVLARQSLMQENKQRVEQQKEQMAKLMLQRAERRLREDRSRKELVEQVIEGQKNAKAAQTKLAKGRQQTVQEAIEESRGLLQRRAQAAQEEQRRRCELISQLRALETQPTRKGKLVDLTQIPGYGLEGEMSIVELRERLALLKENQRRKEEEKRDQIIQGKHTKSQELQNMVEQISLCRAAMGRSAALRWEEKKALAAAPAAPSQDERVQQLRRRISERAAERSRQAALLHVSAPRTARPKPRVSPDWWEEPGRLKAGAGWGWRARRAGTGVPGRGWRGDRVRSAAGRYAAAGAGGGGGVPARADAFPGLQAQLEAQHWLELERSRERRLQALQQGGSGPGPARRLEAA

SEQ ID NO: 40088 - protein, 215 aa, Artificial Sequence
  Synthetic polypeptide
EQSKLSVLREAIALCHFFFNISGILLWYPIPFTRLPIRMAKGLGNISAKYRWFAVFYLIIFFFLIPLTVFGLSLAGWRVLVGVGVPVVFIIILVLCLRLLQSRCPRVLPKKLQNWNFLPLWMRSLKPWDAVVSKFTGCFQMRCCCCCRVCCRACCLLCDCPKCCRCSKCCEDLEEAQEGQDVPVKAPETFDNITISREAQGEVPASDSKTECTAL

SEQ ID NO: 40089 - protein, 23 aa, Artificial Sequence
  Synthetic polypeptide
KKPDAKEYIVPMLTGLQPIMIIQ

SEQ ID NO: 40090 - protein, 27 aa, Artificial Sequence
  Synthetic polypeptide
MYMAHGLTQSTKENVFLGRWAEAEGLA

SEQ ID NO: 40091 - protein, 60 aa, Artificial Sequence; identical to SEQ ID NO: 39863
  Synthetic polypeptide

SEQ ID NO: 40092 - protein, 16 aa, Artificial Sequence
  Synthetic polypeptide
SRKLYARLLINRMVTL

SEQ ID NO: 40093 - protein, 97 aa, Artificial Sequence; identical to SEQ ID NO: 33138
  Synthetic polypeptide

SEQ ID NO: 40094 - protein, 24 aa, Artificial Sequence
  Synthetic polypeptide
DKDAAALLLANEARTPGGLVGHKQ

SEQ ID NO: 40095 - protein, 10 aa, Artificial Sequence
  Synthetic polypeptide
GLFSQAEIRC

SEQ ID NO: 40096 - protein, 492 aa, Artificial Sequence
  Synthetic polypeptide
GQEFKTSLANMVGMFKVHPEIPESMSAEAKAFILKCFEPDPDKRACANDLLVDEFLKVSSKKKKTQPKLSALSAGSNEYLRSISLPVPVLVEDTSSSSEYGSVSPDTELKVDPFSFKTRAKSCGERDVKGIRTLFLGIPDENFEDHSAPPSPEEKDSGFFMLRKDSERRATLHRILTEDQDKIVRNLMESLAQGAEEPKLKWEHITTLIASLREFVRSTDRKIIATTLSKLKLELDFDSHGISQVQVVLFGFQDAVNKVLRNHNIKPHWMFALDSIIRKAVQTAITILVPELRPHFSLASESDTADQEDLDVEDDHEEQPSNQTVRRPQAVIEDAVATSGVSTLSSTVSHDSQSAHRSLNVQLGRMKIETNRLLEELVRKEKELQALLHRAIEEKDQEIKHLKLKSQPIEIPELPVFHLNSSGTNTEDSELTDWLRVNGADEDTISRFLAEDYTLLDVLYYVTRDDLKCLRLRGGMLCTLWKAIIDFRNKQT

SEQ ID NO: 40097 - protein, 15 aa, Artificial Sequence
  Synthetic polypeptide
MILSSIRKEDIHTTK

SEQ ID NO: 40098 - protein, 53 aa, Artificial Sequence; identical to SEQ ID NO: 33473
  Synthetic polypeptide

SEQ ID NO: 40099 - protein, 1377 aa, Artificial Sequence; identical to SEQ ID NO: 33682
  Synthetic polypeptide

SEQ ID NO: 40100 - protein, 548 aa, Artificial Sequence; identical to SEQ ID NO: 33747
  Synthetic polypeptide

SEQ ID NO: 40101 - protein, 27 aa, Artificial Sequence
  Synthetic polypeptide
WARWLTLVIPALWEAKVGGSRVLGGDQ

SEQ ID NO: 40102 - protein, 42 aa, Artificial Sequence
  Synthetic polypeptide
AVAHAYNLSTLRGQVIGEIDEETDSALDLGNIRAEPLNSVAH

SEQ ID NO: 40103 - protein, 23 aa, Artificial Sequence
  Synthetic polypeptide
NTQLTMWLPQLIWTKRTSSLLPR

SEQ ID NO: 40104 - protein, 23 aa, Artificial Sequence
  Synthetic polypeptide
APVSDEKDTTEPKIPAYQIKTGH

SEQ ID NO: 40105 - protein, 99 aa, Artificial Sequence
  Synthetic polypeptide
FSPLFFILLTSALLVPETRKAFLAMIHSVSSMKSGSRRPNSCFKCSRSILKNKLVLTENLRRPFQLNNVLPRKLGVNFQRKMQNNSSMLLNSKAWFRNS

SEQ ID NO: 40106 - protein, 131 aa, Artificial Sequence
  Synthetic polypeptide
GHEFETSLANMVIQLLKAGKAKEVSYNALASHIISEDGDNPEVGEAREVFDLPVVKPSWVILSVQCGTLLPVNGFSPESCQIFFGITACLSQGVDTSWSSLLESSRALPGRGREGSLSSRSWEAQRSSAFF

SEQ ID NO: 40107 - protein, 28 aa, Artificial Sequence
  Synthetic polypeptide
QAWRLMPVIPAHWEAEVKKAQTPSPPAL

SEQ ID NO: 40108 - protein, 129 aa, Artificial Sequence; identical to SEQ ID NO: 35792
  Synthetic polypeptide

SEQ ID NO: 40109 - protein, 447 aa, Artificial Sequence; identical to SEQ ID NO: 39901
  Synthetic polypeptide

SEQ ID NO: 40110 - protein, 13 aa, Artificial Sequence
  Synthetic polypeptide
AGFYEQMNGPVAG

SEQ ID NO: 40111 - protein, 63 aa, Artificial Sequence; identical to SEQ ID NO: 37096
  Synthetic polypeptide

SEQ ID NO: 40112 - protein, 25 aa, Artificial Sequence
  Synthetic polypeptide
VCSQHLKIKNLQLSAHLLTSSLKMN

SEQ ID NO: 40113 - protein, 62 aa, Artificial Sequence
  Synthetic polypeptide
VILVNLGSSAEWVFQRLLHSLGMTRTPSPATVAVRQLALRVCPAWSLATTCGPARMAAMSWA

SEQ ID NO: 40114 - protein, 236 aa, Artificial Sequence
  Synthetic polypeptide
MAHLLPNVSEETVSPTRARNMKDFENQITELKKENFNLKLRIYFLEERMQQEFHGPTEHIYKTNIELKVEVESLKRELQEREQLLIKASKAVESLAEAGGSEIQRVKEDARKKVQQVEDLLTKRILLLEKDVTAAQAELEKAFAGTETEKALRLRLESKLSEMKKMHEGDLAMALVLDEKDRLIEELKLSLKSKEALIQCLKEEKSQMACPDENVSSGELRGLCAAPREEKERETE

SEQ ID NO: 40115 - protein, 60 aa, Artificial Sequence; identical to SEQ ID NO: 37411
  Synthetic polypeptide

SEQ ID NO: 40116 - protein, 85 aa, Artificial Sequence; identical to SEQ ID NO: 37444
  Synthetic polypeptide

SEQ ID NO: 40117 - protein, 146 aa, Artificial Sequence
  Synthetic polypeptide
MNSLSIRGAQEEDPPDPQLMRLDNMLLAEGVSGPEKGGGSAAAAAAAAASGGSSDNSIEHSDYRAKLTQIRQIYHTELEKYEQACNEFTTHVMNLLREQSRTRPISPKEIERMVGIIHRKFSSIQMQLKQSTCEAVMILRSRFLDA

SEQ ID NO: 40118 - protein, 1300 aa, Artificial Sequence
  Synthetic polypeptide
LQFYGRHLENSSGYQEVEGVVWKQVSAERQETPMAADEGSAEKQAGEAHMAADGETNGSCENSDASSHANAAKHTQDSARVNPQDGTNTLTRIAENGVSERDSEAAKQNHVTADDFVQTSVIGSNGYILNKPALQAQPLRTTSTLASSLPGHAAKTLPGGAGKGRTPSAFPQTPAAPPATLGEGSADTEDRKLPAPGADVKVHRARKTMPKSVVGLHAASKDPREVREARDHKEPKEEINKNISDFGRQQLLPPFPSLHQSLPQNQCYMATTKSQTACLPFVLAAAVSRKKKRRMGTYSLVPKKKTKVLKQRTVIEMFKSITHSTVGSKGEKDLGASSLHVNGESLEMDSDEDDSEELEEDDGHGAEQAAAFPTEDSRTSKESMSEADRAQKMDGESEEEQESVDTGEEEEGGDESDLSSESSIKKKFLKRKGKTDSPWIKPARKRRRRSRKKPSGALGSESYKSSAGSAEQTAPGDSTGYMEVSLDSLDLRVKGILSSQAEGLANGPDVLETDGLQEVPLCSCRMETPKSREITTLANNQCMATESVDHELGRCTNSVVKYELMRPSNKAPLLVLCEDHRGRMVKHQCCPGCGYFCTAGNFMECQPESSISHRFHKDCASRVNNASYCPHCGEESSKAKEVTIAKADTTSTVTPVPGQEKGSALEGRADTTTGSAAGPPLSEDDKLQGAASHVPEGFDPTGPAGLGRPTPGLSQGPGKETLESALIALDSEKPKKLRFHPKQLYFSARQGELQKVLLMLVDGIDPNFKMEHQNKRSPLHAAAEAGHVDICHMLVQAGANIDTCSEDQRTPLMEAAENNHLEAVKYLIKAGALVDPKDAEGSTCLHLAAKKGHYEVVQYLLSNGQMDVNCQDDGGWTPMIWATEYKHVDLVKLLLSKGSDINIRDNEENICLHWAAFSGCVDIAEILLAAKCDLHAVNIHGDSPLHIAARENRYDCVVLFLSRDSDVTLKNKEGETPLQCASLNSQVWSALQMSKALQDSAPDRPSPVERIVSRDIARGYERIPIPCVNAVDSEPCPSNYKYVSQNCVTSPMNIDRNITHLQYCVCIDDCSSSNCMCGQLSMRCWYDKDGRLLPEFNMAEPPLIFECNHACSCWRNCRNRVVQNGLRARLQLYRTRDMGWGVRSLQDIPPGTFVCEYVGELISDSEADVREEDSYLFDLDNKDGEVYCIDARFYGNVSRFINHHCEPNLVPVRVFMAHQDLRFPRIAFFSTRLIEAGEQLGFDYGERFWDIKGKLFSCRCGSPKCRHSSAALAQRQASAAQEAQEDGLPDTSSAAAADPL

SEQ ID NO: 40119 - protein, 60 aa, Artificial Sequence
  Synthetic polypeptide
PGVVAHACNPSTLGGQGRRIACAREFETSLGLWQAMRARLPSYGPRLKREKHCDKVWNMT

SEQ ID NO: 40120 - protein, 149 aa, Artificial Sequence
  Synthetic polypeptide
MSDPVFLSLSLLVCETGDHEKRNGRVSLSDGSDSESSSASSPLHHEPPPPLLKTNNNQILEVKSPIKQSKSDKQIKNGECDKAYLDELVELHRRLMTLRERHILQQIVNLIEETGHFHITNTTFDFDLCSLDKTTVRKLQSYLETSGTS

SEQ ID NO: 40121 - protein, 53 aa, Artificial Sequence
  Synthetic polypeptide
SQLLWRLRWEDRLNLGDGGCYEPRLHHCTPAWLTERILNFLLTTPIHHLPSDS

SEQ ID NO: 40122 - protein, 405 aa, Artificial Sequence
  Synthetic polypeptide
SSGAQGEYAGLATIRAYLNQKGEGHRTVCLIPKSAHGTNPASAHMAGMKIQPVEVDKYGNIDAVHLKAMVDKHKENLAAIMITYPSTNGVFEENISDVCDLIHQHGGQVYLDGANMNAQVGICRPGDFGSDVSHLNLHKTFCIPHGGGGPGMGPIGVKKHLAPFLPNHPVISLKRNEDACPVGTVSAAPWGSSSILPISWAYIKMMGGKGLKQATETAILNANYMAKRLETHYRILFRGARGYVGHEFILDTRPFKKSANIEAVDVAKRLQDYGFHAPTMSWPVAGTLMVEPTESEDKAELDRFCDAMISIRQEIADIEEGRIDPRVNPLKMSPHSLTCVTSSHWDRPYSREVAAFPLPFVKPENKFWPTIARIDDIYGDQHLVCTCPPMEVYESPFSEQKRASS

SEQ ID NO: 40123 - protein, 25 aa, Artificial Sequence
  Synthetic polypeptide
AEIALLHSSLGNREKLVKKEPSVTG

SEQ ID NO: 40124 - protein, 979 aa, Artificial Sequence
  Synthetic polypeptide
LSLSEDTDNSSLSPPPAKLSVVSFAPSSNEVETTSLNDVTLSLLPSNETEKTKITIVKTFNASGVKPQRNICNLSSICNDSAFFRGEIMFQYDKESTVPQNQHITNGTLTGVLSLSELKRSELNKTLQTLSETYFIMCATAEAQSTLNCTFTIKLNNTMNACAVIAALERVKIRPMEHCCCSVRIPCPSSPEELEKLQCDLQDPIVCLADHPRGPPFSSSQSIPVVPRATVLSQVPKATSFAEPPDYSPVTHNVPSPIGEIQPLSPQPSAPIASSPAIDMPPQSETISSPMPQTHVSGTPPPVKASFSSPTVSAPANVNTTSAPPVQTDIVNTSSISDLENQVLQMEKALSLGSLEPNLAGEMINQVSRLLHSPPDMLAPLAQRLLKVVDDIGLQLNFSNTTISLTSPSLALAVIRVNASSFNTTTFVAQDPANLQVSLETQAPENSIGTITLPSSLMNNLPAHDMELASRVQFNFFETPALFQDPSLENLSLISYVISSSVANLTVRNLTRNVTVTLKHINPSQDELTVRCVFWDLGRNGGRGGWSDNGCSVKDRRLNETICTCSHLTSFGVLLDLSRTSVLPAQMMALTFITYIGCGLSSIFLSVTLVTYIAFEKIRRDYPSKILIQLCAALLLLNLVFLLDSWIALYKMQGLCISVAVFLHYFLLVSFTWMGLEAFHMYLALVKVFNTYIRKYILKFCIVGWGVPAVVVTIILTISPDNYGLGSYGKFPNGSPDDFCWINNNAVFYITVVGYFCVIFLLNVSMFIVVLVQLCRIKKKKQLGAQRKTSIQDLRSIAGLTFLLGITWGFAFFAWGPVNVTFMYLFAIFNTLQGFFIFIFYCVAKENVRKQWRRYLCCGKLRLAENSDWSKTATNGLKKQTVNQGVSSSSNSLQSSSNSTNSTTLLVNNDCSVHASGNGNASTERNGVSFSVQNGDVCLHDFTGKQHMFNEKEDSCNGKGRMALRRTSKRGSLHFIEQM

SEQ ID NO: 40125 - protein, 21 aa, Artificial Sequence
  Synthetic polypeptide
LQDSTGSWEKNWNSICSQSYN

SEQ ID NO: 40126 - protein, 94 aa, Artificial Sequence
  Synthetic polypeptide
SQHFGRTRQVDHLRSRVQDHPGQHGEAIGKMQQQGIPGGIFFHCERFDQPIGEDSLCSILEELWQDNDQLEQRQENQNNLLSHVKVLIKERGYE

SEQ ID NO: 40127 - protein, 17 aa, Artificial Sequence
  Synthetic polypeptide
MLLTHWLNLADHWRFHR

SEQ ID NO: 40128 - protein, 62 aa, Artificial Sequence
  Synthetic polypeptide
MAKISSPTETERCIESLIAVFQKYAGKDGYNYTLSKTEFLSFMNTELAAFTKKMRYKGVIII

SEQ ID NO: 40129 - protein, 193 aa, Artificial Sequence
  Synthetic polypeptide
MASGSKASVPADSFRTISPDRRGEKSASAVSGDTAAATTLKGTAIPVRSVVASPRPVKGKAGRETARLRLQRLPAAQAEDTGEAAAAAAEEPLLPVPEDEEEAQPLPPVCVSRMRGMWRDEKVSLYCDEVLQDCKAEDADEVMGKYLSEKLKLKDKWLGVWKTNPSVFFVKYEEASIPFVGILVEKEPGWINQ

SEQ ID NO: 40130 - protein, 74 aa, Artificial Sequence
  Synthetic polypeptide
MGFLQLVRLDSNSRPQAEDADEVMGKYLSEKLKLKDKWLGVWKTNPSVFFVKYEEASIPFVGILVEKEPGWINQ

SEQ ID NO: 40131 - protein, 100 aa, Artificial Sequence
  Synthetic polypeptide
MSQGLPAAGSVLQRSVAAPGNQPQPQPQQQSPEDDDRKVRRREKNRVAAQRSRKKQTQKADKLHELMERTIFLITQIRSLGFILSHSFSLRPHAYTCIIL

SEQ ID NO: 40132 - protein, 67 aa, Artificial Sequence
  Synthetic polypeptide
MWLEILLTSVLGFAIYWFISRDKEETLPLEDGWWGPGTRSAAREDDSIRPFKVETSDEEIHKKFADS

SEQ ID NO: 40133 - protein, 29 aa, Artificial Sequence
  Synthetic polypeptide
LLDASQFGRMITRTDGSLEPKSSRQAWAT

SEQ ID NO: 40134 - protein, 132 aa, Artificial Sequence
  Synthetic polypeptide
MAAAAQLSLTQLSSGNPVYEKYYRQEQSSSPAMEQSWMENDFDKLTELGFRRSVITNFSELKEDVRTHCKEAKILEKRLDEWLIRINSVEKTLHDLMELKTMARELRDASTSFSSQFDQVEEKVSVVEARMK

SEQ ID NO: 40135 - protein, 20 aa, Artificial Sequence
  Synthetic polypeptide
MIVMNDQMDSSLKAGSMPCS

SEQ ID NO: 40136 - protein, 49 aa, Artificial Sequence
  Synthetic polypeptide
MEAYTPKLTQLLKTLRQENHLNLEGRGYSELTPRHCTPAWATRAKLHLK

SEQ ID NO: 40137 - protein, 512 aa, Artificial Sequence; identical to SEQ ID NO: 1734
  Synthetic polypeptide

SEQ ID NO: 40138 - protein, 127 aa, Artificial Sequence; identical to SEQ ID NO: 1735
  Synthetic polypeptide

SEQ ID NO: 40139 - protein, 331 aa, Artificial Sequence
  Synthetic polypeptide
MEDSDSAAKQLGLAEAAAVAAAAAVAAAAAAAAGGEAEEPVLSRDEDSEEDADSEAERETPRVTAVAVMAAEPGHMDMGAEALPGPDEAAAAAAFAEVTTVTVANVGAAADNVFTTSVANAASISGHVLSGRTALQIGDSLNTEKATLIVVHTDGSIVETTGLKGPAAPLTPGPQSPPTPLAPGQEKGGTKYNWDPSVYDSELPVRCRNISGTLYKNRLGSGGRGRCIKQGENWYSPTEFEAMAGRASSKDWKRSIRYAGRPLQCLIQDGILNPHAASCTCAACCDDMTLLLRRLTQNHLNLGGGGCSKPRWRHCTPAWAARVKLRLKKEK

SEQ ID NO: 40140 - protein, 489 aa, Artificial Sequence
  Synthetic polypeptide
MSRQSSVSFRSGGSRSFSTASAITPSVSRTSFTSVSRSGGGGGGGFGRVSLAGACGVGGYGSRSLYNLGGSKRISISTSGGSFRNRFGAGAGGGYGFGGGAGSGFGFGGGAGGGFGLGGGAGFGGGFGGPGFPVCPPGGIQEVTVNQSLLTPLNLQIDPSIQRVRTEEREQIKTLNNKFASFIDKVRFLEQQNKVLDTKWTLLQEQGTKTVRQNLEPLFEQYINNLRRQLDSIVGERGRLDSELRNMQDLVEDFKNKYEDEINKRTTAENEFVMLKKDVDAAYMNKVELEAKVDALMDEINFMKMFFDAELSQMQTHVSDTSVVLSMDNNRNLDLDSIIAEVKAQYEEIANRSRTEAESWYQTKYEELQQTAGRHGDDLRNTKHEISEMNRMIQRLRAEIDNVKKQCANLQNAIADAEQRGELALKDARNKLAELEEALQKAKQDMARLLREYQELMNTKLALDVEIATYRKLLEGEECRNLASKKRLE

SEQ ID NO: 40141 - protein, 115 aa, Artificial Sequence
  Synthetic polypeptide
MEEMRDPSKIKWGDAGAEYVVESTGVFTTMEKAGAHLQGGAKRVIISAPSADAPMFVMGVNHEKYDNSLKIISNASCTTNCLAPLAKVIHDNFGIVEGLMTVTPKCTINTRQFHY

SEQ ID NO: 40142 - protein, 190 aa, Artificial Sequence
  Synthetic polypeptide
MGKVKVGVNGFGRIGRLVTRAAFNSGKVDIVAINDPFIDLNYMVYMFQYDSTHGKFHGTVKAENGKLVINGNPITIFQERDPSKIKWGDAGAEYVVESTGVFTTMEKAGAHLQGGAKRVIISAPSADAPMFVMGVNHEKYDNSLKIISNASCTTNCLAPLAKVIHDNFGIVEGLMTVTPKCTINTRQFHY

SEQ ID NO: 40143 - protein, 148 aa, Artificial Sequence
  Synthetic polypeptide
MVYMFQYDSTHGKFHGTVKAENGKLVINGNPITIFQERDPSKIKWGDAGAEYVVESTGVFTTMEKAGAHLQGGAKRVIISAPSADAPMFVMGVNHEKYDNSLKIISNASCTTNCLAPLAKVIHDNFGIVEGLMTVTPKCTINTRQFHY

SEQ ID NO: 40144 - protein, 490 aa, Artificial Sequence
  Synthetic polypeptide
MDAQTWPVGFRCLLLLALVGSARSEGVQTCEEVRKLFQWRLLGAVRGLPDSPRAGPDLQVCISKKPTCCTRKMEERYQIAARQDMQQFLQTSSSTLKFLISRNAAAFQETLETLIKQAENYTSILFCSTYRNMALEAAASVQEFFTDVGLYLFGADVNPEEFVNRFFDSLFPLVYNHLINPGVTDSSLEYSECIRMARRDVSPFGNIPQRVMGQMGRSLLPSRTFLQALNLGIEVINTTDYLHFSKECSRALLKMQYCPHCQGLALTKPCMGYCLNVMRGCLAHMAELNPHWHAYIRSLEELSDAMHGTYDIGHVLLNFHLLVNDAVLQAHLNGQKLLEQVNRICGRPVRTPTQSPRCSFDQSKEKHGMKTTTRNSEETLANRRKEFINSLRLYRSFYGGLADQLCANELAAADGLPCWNGEDIVKSYTQRVVGNGIKAQSGNPEVKVKGIDPVINQIIDKLKHVVQGIQIIRMLENRTKLIKRMNLSSK

SEQ ID NO: 40145 - protein, 28 aa, Artificial Sequence
  Synthetic polypeptide
YFDYWGQGTLVTQSPPSKAPVQTAGVAS

SEQ ID NO: 40146 - protein, 51 aa, Artificial Sequence
  Synthetic polypeptide
MELGLSWIFLLAILKGVQCEVQLVESGGGLVQPGRSLRLSWRGSGKITKGH

SEQ ID NO: 40147 - protein, 125 aa, Artificial Sequence
  Synthetic polypeptide
MEFGLSWVFLVAIIKGVQCQVQLVESGGGLVKPGGSLRLSCAASGFTFSDYYMSWIRQAPGKGLEWVSYISSSGSTIYYADSVKGRFTISRDNAKNSLYLQMNSLRAEDTATSCRAKENFSTPHL

SEQ ID NO: 40148 - protein, 51 aa, Artificial Sequence
  Synthetic polypeptide
MEFGLSWVFLVALLRGVQCQVQLVESGGGVVQPGRSLRLSWRGSGKITKGH

SEQ ID NO: 40149 - protein, 69 aa, Artificial Sequence
  Synthetic polypeptide
MQFVLSWVFLVGILKGVQCEVQLVESGGGLVQPRGSLRLSCAASGFTLRSFRTAWQHGEMLSIHKRRNS

SEQ ID NO: 40150 - protein, 99 aa, Artificial Sequence
  Synthetic polypeptide
MDLMCKKMKHLWFFLLLVAAPRWVLSQLQLQESGPGLVKPSETLSLTCTVSGGSISSSSYYWGWIRQPPGKGLEWIGTKDQSGAAVNQCMSRITSHLHK

SEQ ID NO: 40151 - protein, 78 aa, Artificial Sequence
  Synthetic polypeptide
MEFWLSWVFLVAILKGVQCEVQLVESGGGLIQPGGSLRLSCAASGFTVKNNYTLGRVYTIQVMNVLKSQNLLLYNSSI

SEQ ID NO: 40152 - protein, 78 aa, Artificial Sequence
  Synthetic polypeptide
MEFGLSWVFLVAILKGVQCEVQLVESGGGLIQPGGSLRLSCAASGFTVKNNYTLGRVYTIQVMNVLKSQNLLLYNSSI

SEQ ID NO: 40153 - protein, 89 aa, Artificial Sequence
  Synthetic polypeptide
MDWTWRFLFVVAAATGVQSQVQLVQSGAEVKKPGSSVKVSCKASGGTFSSYAISWVRQAPGQGLEWMGGIIPIFGTRNYRKTRGNFEGT

SEQ ID NO: 40154 - protein, 1811 aa, Artificial Sequence
  Synthetic polypeptide
MADVDPDTLLEWLQMGQGDERDMQLIALEQLCMLLLMSDNVDRCFETCPPRTFLPALCKIFLDESAPDNVLEVTARAITYYLDVSAECTRRIVGVDGAIKALCNRLVVVELNNRTSRDLAEQCVKVLELICTRESGAVFEAGGLNCVLTFIRDSGHLVHKDTLHSAMAVVSRLCGKMEPQDSSLEICVESLSSLLKHEDHQVSDGALRCFASLADRFTRRGVDPAPLAKHGLTEELLSRMAAAGGTVSGPSSACKPGRSTTGAPSTTADSKLSNQVSTIVSLLSTLCRGSPVVTHDLLRSELPDSIESALQGDERCVLDTMRLVDLLLVLLFEGRKALPKSSAGSTGRIPGLRRLDSSGERSHRQLIDCIRSKDTDALIDAIDTGAFEVNFMDDVGQTLLNWASAFGTQEMVEFLCERGADVNRGQRSSSLHYAACFGRPQVAKTLLRHGANPDLRDEDGKTPLDKARERGHSEVVAILQSPGDWMCPVNKGDDKKKKDTNKDEEECNEPKGDPEMAPIYLKRLLPVFAQTFQQTMLPSIRKASLALIRKMIHFCSEALLKEVCDSDVGHNLPTILVEITATVLDQEDDDDGHLLALQIIRDLVDKGGDIFLDQLARLGVISKVSTLAGPSSDDENEEESKPEKEDEPQEDAKELQQGKPYHWRDWSIIRGRDCLYIWSDAAALELSNGSNGWFRFILDGKLATMYSSGSPEGGSDSSESRSEFLEKLQRARGQVKPSTSSQPILSAPGPTKLTVGNWSLTCLKEGEIAIHNSDGQQATILKEDLPGFVFESNRGTKHSFTAETSLGSEFVTGWTGKRGRKLKSKLEKTKQKVRTMARDLYDDHFKAVESMPRGVVVTLRNIATQLESSWELHTNRQCIESENTWRDLMKTALENLIVLLKDENTISPYEMCSSGLVQALLTVLNNSMDLDMKQDCSQLVERINVFKTAFSENEDDESRPAVALIRKLIAVLESIERLPLHLYDTPGSTYNLQILTRRLRFRLERAPGETALIDRTGRMLKMEPLATVESLEQYLLKMVAKQWYDFDRSSFVFVRKLREGQNFIFRHQHDFDENGIIYWIGTNAKTAYEWVNPAAYGLVVVTSSEGRNLPYGRLEDILSRDNSALNCHSNDDKNAWFAIDLGLWVIPSAYTLRHARGYGRSALRNWVFQVSKDGQNWTSLYTHVDDCSLNEPGSTATWPLDPPKDEKQGWRHVRIKQMGKNASGQTHYLSLSGFELYGTVNGVCEDQLGKAAKEAEANLRRQRRLVRSQVLKYMVPGARVIRGLDWKWRDQDGSPQGEGTVTGELHNGWIDVTWDAGGSNSYRMGAEGKFDLKLAPGYDPDTVASPKPVSSTVSGTTQSWSSLVKNNCPDKTSAAAGSSSRKGSSSSVCSVASSSDISLGSTKTERRSEIVMEHSIVSGADVHEPIVVLSSAENVPQTEVGSSSSASTSTLTAETGSENAERKLGPDSSVRTPGESSAISMGIVSVSSPDVSSVSELTNKEAASQRPLSSSASNRLSVSSLLAAGAPMSSSASVPNLSSRETSSLESFVRRVANIARTNATNNMNLSRSSSDNNTNTLGRNVMSTATSPLMGAQSFPNLTTPGTTSTVTMSTSSVTSSSNVATATTVLSVGQSLSNTLTTSLTSTSSESDTGQEAEYSLYDFLDSCRASTLLAELDDDEDLPEPDEEDDENEDDNQEDQEYEEVMILRRPSLQRRAGSRSDVTHHAVTSQLPQVPAGAGSRPIGEQEEEEYETKGGRRRTWDDDYVLKRQFSALVPAFDPRPGRTNVQQTTDLEIPPPGTVGYCAVKEIIF

SEQ ID NO: 40155 - protein, 1238 aa, Artificial Sequence
  Synthetic polypeptide
VFAQTFQQTMLPSIRKASLALIRKMIHFCSEALLKEVCDSDVGHNLPTILVEITATVLDQEDDDDGHLLALQIIRDLVDKGGDIFLDQLARLGVISKVSTLAGPSSDDENEEESKPEKEDEPQEDAKELQQGKPYHWRDWSIIRGRDCLYIWSDAAALELSNGSNGWFRFILDGKLATMYSSGSPEGGSDSSESRSEFLEKLQRARGQVKPSTSSQPILSAPGPTKLTVGNWSLTCLKEGEIAIHNSDGQQATILKEDLPGFVFESNRGTKHSFTAETSLGSEFVTGWTGKRGRKLKSKLEKTKQKVRTMARDLYDDHFKAVESMPRGVVVTLRNIATQLESSWELHTNRQCIESENTWRDLMKTALENLIVLLKDENTISPYEMCSSGLVQALLTVLNNSMDLDMKQDCSQLVERINVFKTAFSENEDDESRPAVALIRKLIAVLESIERLPLHLYDTPGSTYNLQILTRRLRFRLERAPGETALIDRTGRMLKMEPLATVESLEQYLLKMVAKQWYDFDRSSFVFVRKLREGQNFIFRHQHDFDENGIIYWIGTNAKTAYEWVNPAAYGLVVVTSSEGRNLPYGRLEDILSRDNSALNCHSNDDKNAWFAIDLGLWVIPSAYTLRHARGYGRSALRNWVFQVSKDGQNWTSLYTHVDDCSLNEPGSTATWPLDPPKDEKQGWRHVRIKQMGKNASGQTHYLSLSGFELYGTVNGVCEDQLGKAAKEAEANLRRQRRLVRSQVLKYMVPGARVIRGLDWKWRDQDGSPQGEGTVTGELHNGTTQSWSSLVKNNCPDKTSAAAGSSSRKGSSSSVCSVASSSDISLGSTKTERRSEIVMEHSIVSGADVHEPIVVLSSAENVPQTEVGSSSSASTSTLTAETGSENAERKLGPDSSVRTPGESSAISMGIVSVSSPDVSSVSELTNKEAASQRPLSSSASNRLSVSSLLAAGAPMSSSASVPNLSSRETSSLESFVRRVANIARTNATNNMNLSRSSSDNNTNTLGRNVMSTATSPLMGAQSFPNLTTPGTTSTVTMSTSSVTSSSNVATATTVLSVGQSLSNTLTTSLTSTSSESDTGQEAEYSLYDFLDSCRASTLLAELDDDEDLPEPDEEDDENEDDNQEDQEYEEVMILRRPSLQRRAGSRSDVTHHAVTSQLPQVPAGAGSRPIGEQEEEEYETKGGRRRTWDDDYVLKRQFSALVPAFDPRPGRTNVQQTTDLEIPPPGTVGYCAVKEIIF

SEQ ID NO: 40156 - protein, 8 aa, Artificial Sequence
  Synthetic polypeptide
MSVLGELS

SEQ ID NO: 40157 - protein, 750 aa, Artificial Sequence
  Synthetic polypeptide
MVEGRVSEFLKKLGFSGGGRQYQALEKDEEEALIDEQSELKAIEKEKKVTALPPKEACKCQKEDLARAFCVDLHTGLSEFSVTQRRLAHGWNEFVADNSEPVWKKYLDQFKNPLILLLLGSALVSVLTKEYEDAVSIATAVLVVVTVAFIQEYRSEKSLEELTKMVPPECNCLREGKLQHLLARELVPGDVVSLSIGDRIPADIRLTEVTDLLVDESSFTGEAEPCSKTDSPLTGGGDLTTLSNIVFMGTLVQYGRGQGVVIGTGESSQFGEVFKMMQAEETPKTPLQKSMDRLGKQLTLFSFGIIGLIMLIGWSQGKQLLSMFTIGVSLAVAAIPEGLPIVVMVTLVLGVLRMAKKRVIVKKLPIVETLGCCSVLCSDKTGTLTANEMTVTQLVTSDGLRAEVSGVGYDGQGTVCLLPSKEVIKEFSNVSVGKLVEAGCVANNAVIRKNAVMGQPTEGALMALAMKMDLSDIKNSYIRKKEIPFSSEQKWMAVKCSLKTEDQEDIYFMKGALEEVIRYCTMYNNGGIPLPLTPQQRSFCLQEEKRMGSLGLRVLALASGPELGRLTFLGLVGIIDPPRVGVKEAVQVLSESGVSVKMITGDALETALAIGRNIGLCNGKLQAMSGEEVDSVEKGELADRVGKVSVFFRTSPKHKLKIIKALQESGAIVAMTGDGVNDAVALKSADIGIAMGQTGTDVSKEAANMILVDDDFSAIIIGKNYFKVHMEAKKSPHRQVNPKPKEQSWRHHTT

SEQ ID NO: 40158 - protein, 261 aa, Artificial Sequence; identical to SEQ ID NO: 4458
  Synthetic polypeptide

SEQ ID NO: 40159 - protein, 331 aa, Artificial Sequence; identical to SEQ ID NO: 4836
  Synthetic polypeptide

SEQ ID NO: 40160 - protein, 67 aa, Artificial Sequence; identical to SEQ ID NO: 5151
  Synthetic polypeptide

SEQ ID NO: 40161 - protein, 23 aa, Artificial Sequence
  Synthetic polypeptide
MATVYFTRATSQCKCSINYHLNI

SEQ ID NO: 40162 - protein, 17 aa, Artificial Sequence
  Synthetic polypeptide
MALSQCGPGKPKGWTLL

SEQ ID NO: 40163 - protein, 19 aa, Artificial Sequence
  Synthetic polypeptide
MAAAALRDPAQSRTDSHKW

SEQ ID NO: 40164 - protein, 18 aa, Artificial Sequence
  Synthetic polypeptide
MLETLTLISSLGGLRSGV

SEQ ID NO: 40165 - protein, 48 aa, Artificial Sequence
  Synthetic polypeptide
MVPSSPRALFLLLLILACPEPRASQASVPPASLPCPSRLSPLSLPPLS

SEQ ID NO: 40166 - protein, 347 aa, Artificial Sequence
  Synthetic polypeptide
MGLPRGPEGQGLPEVETREDEEQNVKLTEILELLVAAGYFRARIKGLSPFDKVVGGMTWCITTCNFDVDVDLLFQENSTIGQKIALSEKIVSVLPRMKCPHQLEPHQIQGMDFIHIFPVVQWLVKRAIETKEEMGDYIRSYSVSQFQKTYSLPEDDDFIKRKEKAIKTVVDLSEVYKPRRKYKRHQGAEELLDEESRIHATLLEYGRRYGFSRQSKMEKAEDKKTALPAGLSATEKADAHEEDELRAAEEQRIQSLMTKMTAMANEESRLTASSVGQIVGLCSAEIKQIVSEYAEKQSELSAEESPEKLGTSQLHRRKVISLNKQIAQKTKHLEEATVAELSSCRRP

SEQ ID NO: 40167 - protein, 346 aa, Artificial Sequence
  Synthetic polypeptide
MGLPRGPEGQGLPEVETREDEEQNVKLTEILELLVAAGYFRARIKGLSPFDKVVGGMTWCITTCNFDVDVDLLFQENSTIGQKIALSEKIVSVLPRMKCPHQLEPHQIQGMDFIHIFPVVQWLVKRAIETKEEMGDYIRSYSVSQFQKTYSLPEDDDFIKRKEKAIKTVVDLSEVYKPRRKYKRHQGAEELLDEESRIHATLLEYGRYGFSRQSKMEKAEDKKTALPAGLSATEKADAHEEDELRAAEEQRIQSLMTKMTAMANEESRLTASSVGQIVGLCSAEIKQIVSEYAEKQSELSAEESPEKLGTSQLHRRKVISLNKQIAQKTKHLEEATVAELSSCRRP

SEQ ID NO: 40168 - protein, 13 aa, Artificial Sequence
  Synthetic polypeptide
MISSTSVYAPKHY

SEQ ID NO: 40169 - protein, 24 aa, Artificial Sequence
  Synthetic polypeptide
MAACLGLPKCRDCSLCPAATPSGK

SEQ ID NO: 40170 - protein, 44 aa, Artificial Sequence
  Synthetic polypeptide
MWSGLPSRGLPIFKKLRRKRKMSHDTMETNQQNPKCKTFYRTND

SEQ ID NO: 40171 - protein, 81 aa, Artificial Sequence
  Synthetic polypeptide
MDMRVPAQLLGLLLLWFPGSRCDIQMTQSPSSVSASVGDRVTITCRASQGISSWLAWYQQKPGKAPKLLIYAASNGHSGQQ

SEQ ID NO: 40172 - protein, 79 aa, Artificial Sequence
  Synthetic polypeptide
MEPWKPQHSFFFLLLLWLPDTTGEIVMTQSPATLSLSPGERATLSCRASQSVSSSYLSWYQQKPGQAPRLLIYAAATRS

SEQ ID NO: 40173 - protein, 95 aa, Artificial Sequence
  Synthetic polypeptide
MTLATDGTADMFGIRFKRRGCSKKDYRVINHLLRESLLRKLSSHQPLHLVPCVASGWKLLSPTSESVCRFHRLSLGSRIDQINISRIMGAGFLTA

SEQ ID NO: 40174 - protein, 13 aa, Artificial Sequence
  Synthetic polypeptide
APVTGWQELKMPF

SEQ ID NO: 40175 - protein, 676 aa, Artificial Sequence
  Synthetic polypeptide
MADRRRAWNTEDDLPVYLARPGSAAQTPRQKYGGMFAAVEGAYENKTIDFDAYSVGRRGSARTPRSAGRPDAVGLPGPGGSEDTASDVSEPSGSAVSSPGERDERPPTLRIRRPAPRDLPLGRDNGQSDRLLIKGGRIINDDQSLYADVYLEDGLIKQIGENLIVPGGVKTIEANGRMVIPGGIDVNTYLQKPSQGMTAADDFFQGTRAALVGGTTMIIDHVVPEPGSSLLTSFEKWHEAADTKSCCDYSLHVDITSWYDGVREELEVLVQDKGVNSFQVYMAYKDVYQMSDSQLYEAFTFLKGLGAVILVHAENGDLIAQEQKRILEMGITGPEGHALSRPEELEAEAVFRAITIAGRINCPVYITKVMSKSAADIIALARKKGPLVFGEPIAASLGTDGTHYWSKNWAKAAAFVTSPPLSPDPTTPDYLTSLLACGDLQVTGSGHCPYSTAQKAVGKDNFTLIPEGVNGIEERMTVVWDKAVATGKMDENQFVAVTSTNAAKIFNLYPRKGRIAVGSDADVVIWDPDKLKTITAKSHKSAVEYNIFEGMECHGSPLVVISQGKIVFEDGNINVNKGMGRFIPRKAFPEHLYQRVKIRNKVFGLQGVSRGMYDGPVYEVPATPKYATPAPSAKSSPSKHQPPPIRNLHQSNFSLSGEAKYPPRLNPILELACPAT

SEQ ID NO: 40176 - protein, 560 aa, Artificial Sequence
  Synthetic polypeptide
MQKMNNEVVDKSDRLLIKGGRIINDDQSLYADVYLEDGLIKQIGENLIVPGGVKTIEANGRMVIPGGIDVNTYLQKPSQGMTAADDFFQGTRAALVGGTTMIIDHVVPEPGSSLLTSFEKWHEAADTKSCCDYSLHVDITSWYDGVREELEVLVQDKGVNSFQVYMAYKDVYQMSDSQLYEAFTFLKGLGAVILVHAENGDLIAQEQKRILEMGITGPEGHALSRPEELEAEAVFRAITIAGRINCPVYITKVMSKSAADIIALARKKGPLVFGEPIAASLGTDGTHYWSKNWAKAAAFVTSPPLSPDPTTPDYLTSLLACGDLQVTGSGHCPYSTAQKAVGKDNFTLIPEGVNGIEERMTVVWDKAVATGKMDENQFVAVTSTNAAKIFNLYPRKGRIAVGSDADVVIWDPDKLKTITAKSHKSAVEYNIFEGMECHGSPLVVISQGKIVFEDGNINVNKGMGRFIPRKAFPEHLYQRVKIRNKVFGLQGVSRGMYDGPVYEVPATPKYATPAPSAKSSPSKHQPPPIRNLHQSNFSLSGEAKYPPRLNPILELACPAT

SEQ ID NO: 40177 - protein, 562 aa, Artificial Sequence
  Synthetic polypeptide
MSYQGKKSIPHITSDRLLIKGGRIINDDQSLYADVYLEDGLIKQIGENLIVPGGVKTIEANGRMVIPGGIDVNTYLQKPSQGMTAADDFFQGTRAALVGGTTMIIDHVVPEPGSSLLTSFEKWHEAADTKSCCDYSLHVDITSWYDGVREELEVLVQDKGVNSFQVYMAYKDVYQMSDSQLYEAFTFLKGLGAVILVHAENGDLIAQEQKRILEMGITGPEGHALSRPEELEAEAVFRAITIAGRINCPVYITKVMSKSAADIIALARKKGPLVFGEPIAASLGTDGTHYWSKNWAKAAAFVTSPPLSPDPTTPDYLTSLLACGDLQVTGSGHCPYSTAQKAVGKDNFTLIPEGVNGIEERMTVVWDKAVATGKMDENQFVAVTSTNAAKIFNLYPRKGRIAVGSDADVVIWDPDKLKTITAKSHKSAVEYNIFEGMECHGSPLVVISQGKIVFEDGNINVNKGMGRFIPRKAFPEHLYQRVKIRNKVFGLQGVSRGMYDGPVYEVPATPKYATPAPSAKSSPSKHQPPPIRNLHQSNFSLSGEAKYPPRLNPILELACPAT

SEQ ID NO: 40178 - protein, 345 aa, Artificial Sequence
  Synthetic polypeptide
MATITCTRFTEEYQLFEELGKGAFSVVRRCVKVLAGQEYAAKIINTKKLSARDHQKLEREARICRLLKHPNIVRLHDSISEEGHHYLIFDLVTGGELFEDIVAREYYSEADASHCIQQILEAVLHCHQMGVVHRDLKPENLLLASKLKGAAVKLADFGLAIEVEGEQQAWFGFAGTPGYLSPEVLRKDPYGKPVDLWACGVILYILLVGYPPFWDEDQHRLYQQIKAGAYDFPSPEWDTVTPEAKDLINKMLTINPSKRITAAEALKHPWISHRSTVASCMHRQETVDCLKKFNARRKLKGAILTTMLATRNFSDAVASLDPRSCDSRLELRGASTLRLEEKALP

SEQ ID NO: 40179 - protein, 255 aa, Artificial Sequence
  Synthetic polypeptide
MAASGSGMAQKTWELANNMQEAQSIDEIYKYDKKQQQEILAAKPWTKDHHYFKYCKISALALLKMVMHARSGGNLEVMGLMLGKVDGETMIIMDSFALPVEGTETRVNAQAAAYEYMAAYIENAKQVGRLENAIGWYHSHPGYGCWLSGIDVSTQMLNQQFQEPFVAVVIDPTRTISAGKVNLGAFRTYPKGYKPPDEGPSEYQTIPLNKIEDFGVHCKQMTSHLTKNKILSPYHRLHTSVWSGSYSLCELMSYH

SEQ ID NO: 40180 - protein, 520 aa, Artificial Sequence; identical to SEQ ID NO: 9485
  Synthetic polypeptide

SEQ ID NO: 40181 - protein, 482 aa, Artificial Sequence; identical to SEQ ID NO: 9491
  Synthetic polypeptide

SEQ ID NO: 40182 - protein, 348 aa, Artificial Sequence; identical to SEQ ID NO: 9486
  Synthetic polypeptide

SEQ ID NO: 40183 - protein, 416 aa, Artificial Sequence; identical to SEQ ID NO: 9487
  Synthetic polypeptide

SEQ ID NO: 40184 - protein, 488 aa, Artificial Sequence; identical to SEQ ID NO: 9484
  Synthetic polypeptide

SEQ ID NO: 40185 - protein, 300 aa, Artificial Sequence; identical to SEQ ID NO: 9490
  Synthetic polypeptide

SEQ ID NO: 40186 - protein, 500 aa, Artificial Sequence; identical to SEQ ID NO: 9489
  Synthetic polypeptide

SEQ ID NO: 40187 - protein, 133 aa, Artificial Sequence; identical to SEQ ID NO: 9488
  Synthetic polypeptide

SEQ ID NO: 40188 - protein, 281 aa, Artificial Sequence
  Synthetic polypeptide
MEDHNCEQLCVNVPGSFVCQCYSGYALAEDGKRCVAVDYCASENHGCEHECVNADGSYLCQCHEGFALNPDKKTCTKIDYCASSNHGCQHECVNTDDSYSCHCLKGFTLNPDKKTCRRINYCALNKPGCEHECVNMEESYYCRCHRGYTLDPNGKTCSRVDHCAQQDHGCEQLCLNTEDSFVCQCSEGFLINEDLKTCSRVDYCLLSDHGCEYSCVNMDRSFACQCPEGHVLRSDGKTCAMAQNIPEGQKLDILLNKCESCILQGGCVGESGKPSWPQTST

SEQ ID NO: 40189 - protein, 565 aa, Artificial Sequence
  Synthetic polypeptide
MEKMLAGCFLLILGQIVLLPAEARERSRGRSISRGRHARTHPQTALLESSCENKRADLVFIIDSSRSVNTHDYAKVKEFIVDILQFLDIGPDVTRVGLLQYGSTVKNEFSLKTFKRKSEVERAVKRMRHLSTGTMTGLAIQYALNIAFSEAEGARPLRENVPRVIMIVTDGRPQDSVAEVAAKARDTGILIFAIGVGQVDFNTLKSIGSEPHEDHVFLVANFSQIETLTSVFQKKLCTAHMCSTLEHNCAHFCINIPGSYVCRCKQGYILNSDQTTCRIQDLCAMEDHNCEQLCVNVPGSFVCQCYSGYALAEDGKRCVAVDYCASENHGCEHECVNADGSYLCQCHEGFALNPDKKTCTKIDYCASSNHGCQHECVNTDDSYSCHCLKGFTLNPDKKTCRRINYCALNKPGCEHECVNMEESYYCRCHRGYTLDPNGKTCSRVDHCAQQDHGCEQLCLNTEDSFVCQCSEGFLINEDLKTCSRVDYCLLSDHGCEYSCVNMDRSFACQCPEGHVLRSDGKTCAMAQNIPEGQKLDILLNKCESCILQGGCVGESGKPSWPQTST

SEQ ID NO: 40190 - protein, 524 aa, Artificial Sequence
  Synthetic polypeptide
MEKMLAGCFLLILGQIVLLPAEARERSRGRSISRGRHARTHPQTALLESSCENKRADLVFIIDSSRSVNTHDYAKVKEFIVDILQFLDIGPDVTRVGLLQYGSTVKNEFSLKTFKRKSEVERAVKRMRHLSTGTMTGLAIQYALNIAFSEAEGARPLRENVPRVIMIVTDGRPQDSVAEVAAKARDTGILIFAIGVGQVDFNTLKSIGSEPHEDHVFLVANFSQIETLTSVFQKKLCTAHMCSTLEHNCAHFCINIPGSYVCRCKQGYILNSDQTTCRIQDLCAMEDHNCEQLCVNVPGSFVCQCYSGYALAEDGKRCVAVDYCASENHGCEHECVNADGSYLCQCHEGFALNPDKKTCTRINYCALNKPGCEHECVNMEESYYCRCHRGYTLDPNGKTCSRVDHCAQQDHGCEQLCLNTEDSFVCQCSEGFLINEDLKTCSRVDYCLLSDHGCEYSCVNMDRSFACQCPEGHVLRSDGKTCAMAQNIPEGQKLDILLNKCESCILQGGCVGESGKPSWPQTST

SEQ ID NO: 40191 - protein, 32 aa, Artificial Sequence; identical to SEQ ID NO: 9656
  Synthetic polypeptide

SEQ ID NO: 40192 - protein, 346 aa, Artificial Sequence; identical to SEQ ID NO: 9756
  Synthetic polypeptide

SEQ ID NO: 40193 - protein, 31 aa, Artificial Sequence
  Synthetic polypeptide
MSGKVTKPKEEKDASKGVSLHKLSVCLLSST

SEQ ID NO: 40194 - protein, 41 aa, Artificial Sequence
  Synthetic polypeptide
QRPLCCDEQPHQTAFGPKRCIQALLADSGCRTVPARFSGYH

SEQ ID NO: 40195 - protein, 1530 aa, Artificial Sequence; identical to SEQ ID NO: 10704
  Synthetic polypeptide

SEQ ID NO: 40196 - protein, 1570 aa, Artificial Sequence; identical to SEQ ID NO: 10703
  Synthetic polypeptide

SEQ ID NO: 40197 - protein, 694 aa, Artificial Sequence; identical to SEQ ID NO: 11028
  Synthetic polypeptide

SEQ ID NO: 40198 - protein, 723 aa, Artificial Sequence [sequence omitted]

SEQ ID NO: 40199 - protein, 53 aa, Artificial Sequence
  Synthetic polypeptide
EVRSLRPAATPSGKYPFLAQWVTREWFIFPRILITMTIGLALGLGQSMTSISF

SEQ ID NO: 40200 - protein, 46 aa, Artificial Sequence
  Synthetic polypeptide
SHLLGRLSQENHWNLIKYFDKRRDYLKFKEKFEAGQFEPSETTAKS

SEQ ID NO: 40201 - protein, 42 aa, Artificial Sequence
  Synthetic polypeptide
PAAVALACNPSTLRGRGMPRRIGNAFRSISFLQHFTHSRIIV

SEQ ID NO: 40202 - protein, 27 aa, Artificial Sequence
  Synthetic polypeptide
KATHFILQKPLKVLGVGSTRLTCEPSM

SEQ ID NO: 40203 - protein, 9 aa, Artificial Sequence
  Synthetic polypeptide
SLNLYNCNS

SEQ ID NO: 40204 - protein, 232 aa, Artificial Sequence
  Synthetic polypeptide
YVLAAPEWTEEDLSQLTRSMVKFPGGTPGRWEKIAHELGRSVTDVTTKAKQLKDSVTCSPGMVRLSELKSTVQNSRPIKTATTLPDDMITQREDAEGVAAEEEQEGDSGEQETGATDARPRRRKPARLLEATAKPEPEEKSRAKRQKDFDIAEQNESSDEESLRKERARSAEEPWTQNQQKLLELALQQYPRGSSDRWDKIARCVPSKSKEDCIARYKLLVELVQKKKQAKS

SEQ ID NO: 40205 - protein, 36 aa, Artificial Sequence; identical to SEQ ID NO: 13212
  Synthetic polypeptide

SEQ ID NO: 40206 - protein, 96 aa, Artificial Sequence
  Synthetic polypeptide
ICKAMLELLEDPVLCALAKKHKRTPALIALRYQLQRGVVVLAKSYNEQRIRQNVQVFEFQLTSEEMKAIDGLNRNVRYLTLDIFAGPPNYPFSDEY

SEQ ID NO: 40207 - protein, 588 aa, Artificial Sequence; identical to SEQ ID NO: 13564
  Synthetic polypeptide

SEQ ID NO: 40208 - protein, 24 aa, Artificial Sequence
  Synthetic polypeptide
LLPVIPELWEAEMRKRKQRKLIMN

SEQ ID NO: 40209 - protein, 24 aa, Artificial Sequence
  Synthetic polypeptide
FQTSGLQNCSFKRWSMILKTMKVE

SEQ ID NO: 40210 - protein, 36 aa, Artificial Sequence
  Synthetic polypeptide
TVEQGVGVWRGPQFQQSRCSHGPNQGGRCHPSSGGV

SEQ ID NO: 40211 - protein, 30 aa, Artificial Sequence
  Synthetic polypeptide
TVEQGVGVWRGPQFQQSRCSHGPNQGSAPG

SEQ ID NO: 40212 - protein, 8 aa, Artificial Sequence
  Synthetic polypeptide
MTDGGLAL

SEQ ID NO: 40213 - protein, 32 aa, Artificial Sequence
  Synthetic polypeptide
GGDWLIQVFKGSLSLSTKILWWSQGKIYCLLL

SEQ ID NO: 40214 - protein, 12 aa, Artificial Sequence
  Synthetic polypeptide
QLLCIVSNQKIV

SEQ ID NO: 40215 - protein, 77 aa, Artificial Sequence
  Synthetic polypeptide
QLLCIVSNQKIVSASPSTLARLVSRLAMPAGSSTAWNTASSPMARCQVTRPLGEEMIPSTPSSVKRVLASMCPGQCL

SEQ ID NO: 40216 - protein, 20 aa, Artificial Sequence
  Synthetic polypeptide
KFRDDSEPGMPVLPPRCMVA

SEQ ID NO: 40217 - protein, 17 aa, Artificial Sequence
  Synthetic polypeptide
KFRDDSEPGMPVLPPRI

SEQ ID NO: 40218 - protein, 27 aa, Artificial Sequence
  Synthetic polypeptide
WVYEVQAGAARDALQGFKITQNNAMKI

SEQ ID NO: 40219 - protein, 32 aa, Artificial Sequence
  Synthetic polypeptide
WVYEVQAGAARDALQGFKITQNNAMKISFAKK

SEQ ID NO: 40220 - protein, 172 aa, Artificial Sequence
  Synthetic polypeptide
IVGNMFNQMAKWVKQDNETGIYYETWNVKASPEKGAETWFDSYDCSKFVLRTFNKLAEFGAEFKNIETNYTRIFLYSGEPTYLGNETSVFGPTGNKTLGLAIKRFYYPFKPHLPTKEFLLSLLQIFDAVIVHKQFYLFYNFEYWFLPMKFPFIKITYEEIPLPIRNKTLSGL

SEQ ID NO: 40221 - protein, 112 aa, Artificial Sequence
  Synthetic polypeptide
MSPQLLTPGSGAHSQVQLVQSGAEVKKPGASVKVSCKASGYTFTSYGISWVRQAPGQGLEWMGWISAYNGNTNYAQKLQGRVTMTTDTSTSTAYMELRSLRSDDTAVYYCAR

SEQ ID NO: 40222 - protein, 350 aa, Artificial Sequence; identical to SEQ ID NO: 17742
  Synthetic polypeptide

SEQ ID NO: 40223 - protein, 231 aa, Artificial Sequence; identical to SEQ ID NO: 17744
  Synthetic polypeptide

SEQ ID NO: 40224 - protein, 31 aa, Artificial Sequence; identical to SEQ ID NO: 18019
  Synthetic polypeptide

SEQ ID NO: 40225 - protein, 60 aa, Artificial Sequence
  Synthetic polypeptide
PPPLPTREQPPLTVIFHYLPKSYKTAPPLSPLADSLCGLSPPAPRFTGTFQDFYVHLWMP

SEQ ID NO: 40226 - protein, 238 aa, Artificial Sequence
  Synthetic polypeptide
GQAQWLTPVVIPAPWEAKAGGSRGQEIKTILANTEWTYPMRREMQEILPGLFLGPYSSAMKSKLPVLQKHGITHIICIRQNIEANFIKPNFQQLFRYLVLDIADNPVENIIRFFPMTKEFIDGSLQMGGKVLVHGNAGISRSAAFVIAYIMETFGMKYRDAFAYVQERRFCINPNAGFVHQLQEYEAIYLAKLTIQMMSPLQIERSLSVHSGTTGSLKRTHEEEDDFGTMQVATAQNG

SEQ ID NO: 40227 - protein, 237 aa, Artificial Sequence
  Synthetic polypeptide
GRAWWLTPVIPALWEVEVGGSRGQEIKTILANTEWTYPMRREMQEILPGLFLGPYSSAMKSKLPVLQKHGITHIICIRQNIEANFIKPNFQQLFRYLVLDIADNPVENIIRFFPMTKEFIDGSLQMGGKVLVHGNAGISRSAAFVIAYIMETFGMKYRDAFAYVQERRFCINPNAGFVHQLQEYEAIYLAKLTIQMMSPLQIERSLSVHSGTTGSLKRTHEEEDDFGTMQVATAQNG

SEQ ID NO: 40228 - protein, 237 aa, Artificial Sequence; identical to SEQ ID NO: 18064
  Synthetic polypeptide

SEQ ID NO: 40229 - protein, 32 aa, Artificial Sequence
  Synthetic polypeptide
KTAWLTCLLPSAFGQMSPSQRLFPGQPMVSNK

SEQ ID NO: 40230 - protein, 35 aa, Artificial Sequence
  Synthetic polypeptide
SQLLRRLRHEKYLSPEAEVAVSRDCATALQPGVKG

SEQ ID NO: 40231 - protein, 41 aa, Artificial Sequence
  Synthetic polypeptide
GLPSHTELSMICSRASMTPLWGRPPWPRSTRQCCMMGGRWP

SEQ ID NO: 40232 - protein, 14 aa, Artificial Sequence
  Synthetic polypeptide
TDSREAEFPQKKKN

SEQ ID NO: 40233 - protein, 37 aa, Artificial Sequence
  Synthetic polypeptide
FLGLGFFICNMRRKMMTLKKEIFQSTRDLQHLSTSQR

SEQ ID NO: 40234 - protein, 63 aa, Artificial Sequence
  Synthetic polypeptide
FRASCLRSLGLSFHICIIEAAGRGGEAVKTGEAAGGAGEAAGEGEAAGRGGGAPGAGEASATG

SEQ ID NO: 40235 - protein, 52 aa, Artificial Sequence; identical to SEQ ID NO: 19800
  Synthetic polypeptide

SEQ ID NO: 40236 - protein, 85 aa, Artificial Sequence; identical to SEQ ID NO: 19793
  Synthetic polypeptide

SEQ ID NO: 40237 - protein, 59 aa, Artificial Sequence; identical to SEQ ID NO: 19798
  Synthetic polypeptide

SEQ ID NO: 40238 - protein, 26 aa, Artificial Sequence
  Synthetic polypeptide
MSLGLSIHHLSDGSGIKHASIARPAR

SEQ ID NO: 40239 - protein, 275 aa, Artificial Sequence
  Synthetic polypeptide
GPTLSQFSDLYKLLEILGATIENSRIVLQIDNARLAADDFRTKFETEQALRMSVEADINGLRRVLDELTLARTDLEMQIEGLKEELAYLKKNHEEEISTLRGQVGGQVSVEVDSAPGTDLAKILSDMRSQYEVMAEQNRKDAEAWFTSRTEELNREVAGHTEQLQMSRSEVTDLRRTLQGLEIELQSQLSMKAALEDTLAETEARFGAQLAHIQALISGIEAQLGDVRADSERQNQEYQRLMDIKSRLEQEIATYRSLLEGQEDHYNNLSASKVL

SEQ ID NO: 40240 - protein, 23 aa, Artificial Sequence
  Synthetic polypeptide
VTGSLQDGMTTGPPRRRLSGPTR

SEQ ID NO: 40241 - protein, 131 aa, Artificial Sequence
  Synthetic polypeptide
LPIDGDRKPQWSLKRRSADGEEEISGWWEEKCRKSLDFSWKYDSGIRQKPSQTFHRARGGTGTDSATEQTFPERKGPSPSGAEPRLCLPPGPALREPVPGQQHLRQWLPGVPGQWQLGRPRELLRVPGDPQ

SEQ ID NO: 40242 - protein, 171 aa, Artificial Sequence
  Synthetic polypeptide
LPIDGDRKPQWSLKRRSADGEEEISGWWEEKCRKSLDFSWKYDSGIRQKPSQTFHRARGGTGTDSATEQTFPERKGPSPSGAEPRLCLPPGPALREPVPGQQHLRTAVQRIRGPHWHLLAPQPCGAASGSALPCLFLWCPLQYHKQWLPGVPGQWQLGRPRELLRVPGDPQ

SEQ ID NO: 40243 - protein, 20 aa, Artificial Sequence
  Synthetic polypeptide
ALEPGRGSEEAKCSITSCTR

SEQ ID NO: 40244 - protein, 31 aa, Artificial Sequence
  Synthetic polypeptide
AQKVLILCQHEALVKFPQVSEPPSLCCKWSI

SEQ ID NO: 40245 - protein, 33 aa, Artificial Sequence; identical to SEQ ID NO: 22327
  Synthetic polypeptide

SEQ ID NO: 40246 - protein, 120 aa, Artificial Sequence; identical to SEQ ID NO: 22326
  Synthetic polypeptide

SEQ ID NO: 40247 - protein, 74 aa, Artificial Sequence
  Synthetic polypeptide
QNYRVRKQELSILTMQVPPCSPRASSKASLVISWKTLMVILTARTSAASSPMTLWSRCATESWRTSTPPQKTTL

SEQ ID NO: 40248 - protein, 60 aa, Artificial Sequence
  Synthetic polypeptide
AACSSLLPVCRVYVCFSKSVLSLLCSFVVLFVRLRIPNSKNLDNLPSRLSIRNKVWLLIL

SEQ ID NO: 40249 - protein, 74 aa, Artificial Sequence
  Synthetic polypeptide
IIIKAPAVLLPVIDGTFSKVLKFSSHSEMVIITTITSNSQGEAARSHPWTPMKMETMEQSKLRSQPCKPAAGAV

SEQ ID NO: 40250 - protein, 17 aa, Artificial Sequence
  Synthetic polypeptide
GQLRPHTWLSIRSTRRY

SEQ ID NO: 40251 - protein, 155 aa, Artificial Sequence; identical to SEQ ID NO: 23227
  Synthetic polypeptide

SEQ ID NO: 40252 - protein, 56 aa, Artificial Sequence; identical to SEQ ID NO: 23226
  Synthetic polypeptide

SEQ ID NO: 40253 - protein, 90 aa, Artificial Sequence; identical to SEQ ID NO: 23223
  Synthetic polypeptide

SEQ ID NO: 40254 - protein, 80 aa, Artificial Sequence; identical to SEQ ID NO: 23302
  Synthetic polypeptide

SEQ ID NO: 40255 - protein, 27 aa, Artificial Sequence
  Synthetic polypeptide
ESFSDFSSSILKRRTNMKKKLNFCLTN

SEQ ID NO: 40256 - protein, 26 aa, Artificial Sequence
  Synthetic polypeptide
SQLLERPRQENRLNLGASRKLSFRSQ

SEQ ID NO: 40257 - protein, 35 aa, Artificial Sequence
  Synthetic polypeptide
SQLLERPRQENRLNLGASRKLSFRSQRTCRRFPRH

SEQ ID NO: 40258 - protein, 37 aa, Artificial Sequence
  Synthetic polypeptide
SQLLERPRQENRLNLGASRKLSFRSQRTCRRFPRHMW

SEQ ID NO: 40259 - protein, 52 aa, Artificial Sequence
  Synthetic polypeptide
SQLLERPRQENRLNLGASRKLSFRSQRTCRRFPRHMWSAPSLSTAVHLASPS

SEQ ID NO: 40260 - protein, 54 aa, Artificial Sequence
  Synthetic polypeptide
SQLLERPRQENRLNLGASRKLSFRSQRTCRRFPRHMWSAPSLSTAVHLASPSSP

SEQ ID NO: 40261 - protein, 25 aa, Artificial Sequence
  Synthetic polypeptide
SFVGAGSSFFFRLDSQYVERFPCHC

SEQ ID NO: 40262 - protein, 339 aa, Artificial Sequence
  Synthetic polypeptide
DLFRATVLFYSYKPKILNLKSDEHIFKFLKAKFGLGATRDFDANLYLCEEAFGLLPFNTFGRLSDTLLFYAYIFVLSITVIVAFVVAFHNLSDSTNQQSVGKMEKGTVDLKPETAYNLIHTILFGFLALSTMRMKYLWTSHMCVFASFGLCSPEIWELLLKSVHLYNPKRICIMRYSVPILILLYLCYKFWPGMMDELSELREFYDPDTVELMNWINSNTPRKAVFAGSMQLLAGVKLCTGRTLTNHPHYEDSSLRERTRAVYQIYAKRAPEEVHALLRSFGTDYVILEDSICYERRHRRGCRLRDLLDIANGHKPSLGTLVTATGAGQGRDDGWPRRE

SEQ ID NO: 40263 - protein, 367 aa, Artificial Sequence
  Synthetic polypeptide
DLFRATVLFYSYKPKILNLKSDEHIFKFLKAKFGLGATRDFDANLYLCEEAFGLLPFNTFGRLSDTLLFYAYIFVLSITVIVAFVVAFHNLSDSTNQQSVGKMEKGTVDLKPETAYNLIHTILFGFLALSTMRMKYLWTSHMCVFASFGLCSPEIWELLLKSVHLYNPKRICIMRYSVPILILLYLCYKFWPGMMDELSELREFYDPDTVELMNWINSNTPRKAVFAGSMQLLAGVKLCTGRTLTNHPHYEDSSLRERTRAVYQIYAKRAPEEVHALLRSFGTDYVILEDSICYERRHRRGCRLRDLLDIANGHMMDGPGENDPDLKPADHPRFCEEIKRNLPPYVAYFTRVFQNKTFHVYKLSRNK

SEQ ID NO: 40264 - protein, 193 aa, Artificial Sequence
  Synthetic polypeptide
DLFRATVLFYSYKPKILNLKSDEHIFKFLKAKFGLGATRDFDANLYLCEEAFGLLPFNTFGRLSDTLLFYAYIFVLSITVIVAFVVAFHNLSDSTNQQSVGKMEKGTVDLKPETAYNLIHTILFGFLALSTMRMKYLWTSHMCVFASFGLCSPEIWELLLKSVHLYNPKRICIMRYSVPILILLYLCYKNQKS

SEQ ID NO: 40265 - protein, 41 aa, Artificial Sequence
  Synthetic polypeptide
KSLLFLLYPWEKIILSLSSRTVKISSEQLFCFTLINPKFLT

SEQ ID NO: 40266 - protein, 192 aa, Artificial Sequence
  Synthetic polypeptide
VTLGISSPVKKTEMDKSPFNSPSPQDSPRLSSFTQHHRPVIAVHSGIARSPHPSSALHFPTTSILPQTASTYFPHTAIRYPPHLNPQDPLKDLVSLACDPASQQPGPLNGSGQLKMPSHCLSAQMLAPPPPGLPRLALPPATKPATTSEGGATSPTSPSYSPPDTSPANRSFVGLGPRDPAGIYQAQSWYLG

SEQ ID NO: 40267 - protein, 123 aa, Artificial Sequence
  Synthetic polypeptide
VTLGISSPVKKTEMDKSPFNSPSPQDSPRLSSFTQHHRPVIAVHSGIARSPHPSSALHFPTTSILPQTASTYFPHTAIRYPPHLNPQDPLKDLVSLACDPASQQPGPPTLRPTRPLQTVPLWD

SEQ ID NO: 40268 - protein, 112 aa, Artificial Sequence
  Synthetic polypeptide
VTLGISSPVKKTEMDKSPFNSPSPQDSPRLSSFTQHHRPVIAVHSGIARSPHPSSALHFPTTSILPQTASTYFPHTAIRYPPHLNPQDPLKDLVSLACDPASQQPGPSWYLG

SEQ ID NO: 40269 - protein, 36 aa, Artificial Sequence
  Synthetic polypeptide
PGVVAHACNPSTLGGRDLHGMVQLPPAEGRHTDREH

SEQ ID NO: 40270 - protein, 96 aa, Artificial Sequence
  Synthetic polypeptide
ARHGSSHLSSQHFGRPRQADHEVRSSRPAWPTWCLPPGPGRAEPVARYSCRPWATTWPPSSFPRPSGRAGQHRAPDPLSPGGHAAAGCTAEGQIPS

SEQ ID NO: 40271 - protein, 13 aa, Artificial Sequence
  Synthetic polypeptide
AEIAPLNSSLGRS

SEQ ID NO: 40272 - protein, 90 aa, Artificial Sequence
  Synthetic polypeptide
SQQLGRLRQENRLNPGGGGCSELRWRHGTPAWLIQVLLEDETTESAVKLSLPMGQEALITLKDGQQFVIQISDVPQSSEDIYFRENNANV

SEQ ID NO: 40273 - protein, 416 aa, Artificial Sequence; identical to SEQ ID NO: 25177
  Synthetic polypeptide

SEQ ID NO: 40274 - protein, 39 aa, Artificial Sequence; identical to SEQ ID NO: 25181
  Synthetic polypeptide

SEQ ID NO: 40275 - protein, 32 aa, Artificial Sequence; identical to SEQ ID NO: 25179
  Synthetic polypeptide

SEQ ID NO: 40276 - protein, 106 aa, Artificial Sequence; identical to SEQ ID NO: 25270
  Synthetic polypeptide

SEQ ID NO: 40277 - protein, 146 aa, Artificial Sequence; identical to SEQ ID NO: 25269
  Synthetic polypeptide

SEQ ID NO: 40278 - protein, 1243 aa, Artificial Sequence; identical to SEQ ID NO: 25264
  Synthetic polypeptide

SEQ ID NO: 40279 - protein, 1242 aa, Artificial Sequence; identical to SEQ ID NO: 25267
  Synthetic polypeptide

SEQ ID NO: 40280 - protein, 1242 aa, Artificial Sequence; identical to SEQ ID NO: 25266
  Synthetic polypeptide

SEQ ID NO: 40281 - protein, 1303 aa, Artificial Sequence; identical to SEQ ID NO: 25263
  Synthetic polypeptide

SEQ ID NO: 40282 - protein, 1251 aa, Artificial Sequence; identical to SEQ ID NO: 25262
  Synthetic polypeptide

SEQ ID NO: 40283 - protein, 688 aa, Artificial Sequence; identical to SEQ ID NO: 25268
  Synthetic polypeptide

SEQ ID NO: 40284 - protein, 1236 aa, Artificial Sequence; identical to SEQ ID NO: 25261
  Synthetic polypeptide

SEQ ID NO: 40285 - protein, 1259 aa, Artificial Sequence; identical to SEQ ID NO: 25265
  Synthetic polypeptide

SEQ ID NO: 40286 - protein, 20 aa, Artificial Sequence
  Synthetic polypeptide
STNVLCTLFMLNLPDLEEKV

SEQ ID NO: 40287 - protein, 115 aa, Artificial Sequence
  Synthetic polypeptide
LKIIKLSVLSQPKAAPSVTLFPPSSEELQANKATLVCLISDFYPGAVTVAWKADSSPVKAGVETTTPSKQSNNKYAASSYLSLTPEQWKSHRSYSCQVTHEGSTVEKTVAPTECS

SEQ ID NO: 40288 - protein, 40 aa, Artificial Sequence
  Synthetic polypeptide
AVALYEGTLSLCSEDLKHTHPDSVKSKRSRLNHVASCGNP

SEQ ID NO: 40289 - protein, 40 aa, Artificial Sequence; identical to SEQ ID NO: 26672
  Synthetic polypeptide

SEQ ID NO: 40290 - protein, 64 aa, Artificial Sequence
  Synthetic polypeptide
GSLPTRIKCFAYKIKKIKAASNQISGVPSRFSGSGSGTEFTLTISSLQPDDFATYYCQQYNSYS

SEQ ID NO: 40291 - protein, 44 aa, Artificial Sequence
  Synthetic polypeptide
SNLNTGVPSRFSGSGSGTDYTLTISSLQPEDFATYYCQQYYSTP

SEQ ID NO: 40292 - protein, 44 aa, Artificial Sequence
  Synthetic polypeptide
SNLNTGVPSRFSGSGSGTDFTLTISCLQSEDFATYYCQQYYSFP

SEQ ID NO: 40293 - protein, 48 aa, Artificial Sequence; identical to SEQ ID NO: 39814
  Synthetic polypeptide

SEQ ID NO: 40294 - protein, 54 aa, Artificial Sequence
  Synthetic polypeptide
DLGQVISLDLHIFICEVSRVPMIRSQNCCQLGGTTIKTCMSSGMSIRMGPESSL

SEQ ID NO: 40295 - protein, 76 aa, Artificial Sequence
  Synthetic polypeptide
GNPRGSPGIAARHPSFRPAMTVWVGKWCENFGCGTWRRRNTKWGSALGVVSTADAQQSHCLVHIPEGSLRLSRHRS

SEQ ID NO: 40296 - protein, 641 aa, Artificial Sequence; identical to SEQ ID NO: 27498
  Synthetic polypeptide

SEQ ID NO: 40297 - protein, 633 aa, Artificial Sequence; identical to SEQ ID NO: 27497
  Synthetic polypeptide

SEQ ID NO: 40298 - protein, 442 aa, Artificial Sequence
  Synthetic polypeptide
LGGSSCLVAYKKTPPPVPPRTTSKPFISVTVQSSTESAQDTYLDSQDHKSEVTSQSGLSNSSDSLDSSTRPPSVTRGGVAPAPEAPEPPPKHAALKSEQGTLTSSESHPEAAPKRKLSSIGIQERTRRNGSHLSEDNGPKAIDVMAPSSESSVPSHSMSSRRDTDSDTQDANDSSCKSSERSLPDCTPHPNSISIDAGPRQAPKIAQIKRNLSYGDNSDPALEASSLPPPDPWLETSSSSPAEPAQPGACRRDGYWFLKLLQAETERLEGWCCQMDKETKENNLSEEVLGKVLSAVGSAQLLMSQKFQQFRGLCEQNLNPDANPRPTAQDLAGFWDLLQLSIEDISMKFDELYHLKANSWQLVETPEKRKEEKKPPPPVPKKPAKSKPAVSRDKASDASDKQRQEARKRLLAAKRAASVRQNSATESADSIEIYVPEAQTRL

SEQ ID NO: 40299 - protein, 445 aa, Artificial Sequence
  Synthetic polypeptide
LGGSSCLVAYKKTPPPVPPRTTSKPFISVTVQSSTESAQDTYLDSQDHKSEVTSQSGLSNSSDSLDSSTRPPSVTRGGVAPAPEAPEPPPKHAALKSEQGTLTSSESHPEAAPKRKLSSIGIQVDCIQPVPKEEPSPATKFQSIGVQVEDDWRSSVPSHSMSSRRDTDSDTQDANDSSCKSSERSLPDCTPHPNSISIDAGPRQAPKIAQIKRNLSYGDNSDPALEASSLPPPDPWLETSSSSPAEPAQPGACRRDGYWFLKLLQAETERLEGWCCQMDKETKENNLSEEVLGKVLSAVGSAQLLMSQKFQQFRGLCEQNLNPDANPRPTAQDLAGFWDLLQLSIEDISMKFDELYHLKANSWQLVETPEKRKEEKKPPPPVPKKPAKSKPAVSRDKASDASDKQRQEARKRLLAAKRAASVRQNSATESADSIEIYVPEAQTRL

SEQ ID NO: 40300 - protein, 78 aa, Artificial Sequence
  Synthetic polypeptide
GAPLPSHPVWEVRSASSWPSSRLGSEERLCLAAHRLGCGERLCPAATLSERFKHCLPVGPDNHSQHLGSDAHSLPHQA

SEQ ID NO: 40301 - protein, 31 aa, Artificial Sequence
  Synthetic polypeptide
QPPRPNQLCRRKVQRLVKYILALKELSTQNL

SEQ ID NO: 40302 - protein, 22 aa, Artificial Sequence
  Synthetic polypeptide
RTFTGGAVIVQKFWWACALLAV

SEQ ID NO: 40303 - protein, 55 aa, Artificial Sequence
  Synthetic polypeptide
EFKTSLGNMCVIQSWVTSGTAKARCTSRRTSFPSTKKKWCRLQTLSRPTSLRPSY

SEQ ID NO: 40304 - protein, 76 aa, Artificial Sequence
  Synthetic polypeptide
KTHSQHHTEWAKAGSIHFENHHKTRMPSLNTSRPSGVPDRFSGSKSGTSASLAISGLRSEDEADYYCAAWDDSLSG

SEQ ID NO: 40305 - protein, 76 aa, Artificial Sequence
  Synthetic polypeptide
KTHSQHHTEWAKAGSIHFENHHKTRMPSLNTSRPSGVPDRFSGSKSGTSASLAISGLQSEDEADYYCAAWDDSLNG

SEQ ID NO: 40306 - protein, 10 aa, Artificial Sequence
  Synthetic polypeptide
MTKLLSPIRM

SEQ ID NO: 40307 - protein, 139 aa, Artificial Sequence
  Synthetic polypeptide
QFWNHFVCIVEETEADVNPKAYPLADAHLTKKLLDLVQQSCNYKQLRKGANEATKTLNRGISEFIVMAADAEPLEIILHLPLLCEDKNVPYVFVRSKQALGRACGVSRPVIACSVTIKEGSQLKQQIQSIQQSIERLLV

SEQ ID NO: 40308 - protein, 17 aa, Artificial Sequence
  Synthetic polypeptide
RDIVRSDLEGKRVKEGL

SEQ ID NO: 40309 - protein, 549 aa, Artificial Sequence
  Synthetic polypeptide
MGAVAQACNPSTLGGQGKPAPEIRCPIPAFPDSVKPEKPLAASVRKAEDEQEEGQPVRMATFPGPGSSPARAHQPAFLQPPEEDAPHSLRSDLPTSSDSKDFSTSIPKQEKLLSLAGDSLFWSEADVVQATDDFNQNRKISQGTFADVYRGHRHGKPFVFKKLRETACSSPGSIERFFQAELQICLRCCHPNVLPVLGFCAARQFHSFIYPYMANGSLQDRLQGQGGSDPLPWPQRVSICSGLLCAVEYLHGLEIIHSNVKSSNVLLDQNLTPKLAHPMAHLCPVNKRSKYTMMKTHLLRTSAAYLPEDFIRVGQLTKRVDIFSCGIVLAEVLTGIPAMDNNRSPVYLKDLLLSDIPSSTASLCSRKTGVENVMAKEICQKYLEKGAGRLPEDCAEALATAACLCLRRRNTSLQEVCGSVAAVEERLRGRETLLPWSGLSEGTGSSSNTPEETDDVDNSSLDASSSMSVAPWAGAATPLLPTENGEGRLRVIVGREADSSSEACVGLEPPQDVTETSWQIEINEAKRKLMENILLYKEEKVDSIELFGP

SEQ ID NO: 40310 - protein, 98 aa, Artificial Sequence
  Synthetic polypeptide
GRSQDGRIGTAPVYSSQCERHRRQVLQHPWKCQRALGVSRWPGVSQQSCPALSLPALPSLTSMSFGWSLLSPMPTNLNRSSCIRVDRCLMVPPGSTVG

SEQ ID NO: 40311 - protein, 84 aa, Artificial Sequence
  Synthetic polypeptide
FLLSKRKNFRVRHCTVPSIWRAASITPALGGSRLLITTSAGGRHFPPSTCGPGSCRPWLASSMPRPLWPTTSTLSTCCGPHPGS

SEQ ID NO: 40312 - protein, 29 aa, Artificial Sequence
  Synthetic polypeptide
KYKKKIFRACLAEGRHQYKMGSHTMGQED

SEQ ID NO: 40313 - protein, 14 aa, Artificial Sequence
  Synthetic polypeptide
ASVTLIRIIQIINS

SEQ ID NO: 40314 - protein, 12 aa, Artificial Sequence
  Synthetic polypeptide
HRRQISTAMPVK

SEQ ID NO: 40315 - protein, 20 aa, Artificial Sequence
  Synthetic polypeptide
HRRQVISAFPTEISTAMPVK

SEQ ID NO: 40316 - protein, 51 aa, Artificial Sequence
  Synthetic polypeptide
DQPDQHGETPSLLKIQNSQVGIAVQQKAGMRSFLLPLCCIQQHSTHLQASP

SEQ ID NO: 40317 - protein, 792 aa, Artificial Sequence; identical to SEQ ID NO: 30892
  Synthetic polypeptide

SEQ ID NO: 40318 - protein, 16 aa, Artificial Sequence
  Synthetic polypeptide
GLEFETSLANMHGKKY

SEQ ID NO: 40319 - protein, 69 aa, Artificial Sequence
  Synthetic polypeptide
NKTQTPKCGSAYLLQCHLIPLFFLTTMVFSFLKSIKLFPTSGSAHCFPLPGKLFSIHLLSALGPKWISN

SEQ ID NO: 40320 - protein, 37 aa, Artificial Sequence; identical to SEQ ID NO: 31450
  Synthetic polypeptide

SEQ ID NO: 40321 - protein, 16 aa, Artificial Sequence
  Synthetic polypeptide
VCTWTPFNPVTVRSII

SEQ ID NO: 40322 - protein, 20 aa, Artificial Sequence
  Synthetic polypeptide
VCTWTPFNPVTVRSIICRGR

SEQ ID NO: 40323 - protein, 85 aa, Artificial Sequence
  Synthetic polypeptide
VCTWTPFNPVTVRSIICYRLSDQFHDILIRKFDRQGRGQIAFDDFIQGCIVLQRLTDIFRRYDTDQDGWIQVSYEQYLSMVFSIV

SEQ ID NO: 40324 - protein, 136 aa, Artificial Sequence
  Synthetic polypeptide
VCTWTPFNPVTVRSIISMFDRENKAGVNFSEFTGVWKYITDWQNVFRTYDRDNSGMIDKNELKQALSGYRLSDQFHDILIRKFDRQGRGQIAFDDFIQGCIVLQRLTDIFRRYDTDQDGWIQVSYEQYLSMVFSIV

SEQ ID NO: 40325 - protein, 422 aa, Artificial Sequence; identical to SEQ ID NO: 32602
  Synthetic polypeptide

SEQ ID NO: 40326 - protein, 15 aa, Artificial Sequence
  Synthetic polypeptide
MILSSIRKEDIHTTK

SEQ ID NO: 40327 - protein, 92 aa, Artificial Sequence
  Synthetic polypeptide
PGMMAHACNPSTLGGRGGWIMRGRSIGTGTHRSTRPRHRLTERACGTCAATTTRARPGLTPSRACTAATWGRTGASSAGMTSTPTTARITSP

SEQ ID NO: 40328 - protein, 87 aa, Artificial Sequence
  Synthetic polypeptide
NGKFPSLLTHNENMVAKVDEVKSTIKFQMKKVLCLAVAVGHVKMTDDELVYNIHLAVNFLVSLLKKNWQNVRALYIKSTMGKPQRLY

SEQ ID NO: 40329 - protein, 14 aa, Artificial Sequence
  Synthetic polypeptide
SCIFTISKIDDRGC

SEQ ID NO: 40330 - protein, 25 aa, Artificial Sequence
  Synthetic polypeptide
SQHFGRPRQVDYLRGQRWLRERRRP

SEQ ID NO: 40331 - protein, 189 aa, Artificial Sequence; identical to SEQ ID NO: 34611
  Synthetic polypeptide

SEQ ID NO: 40332 - protein, 163 aa, Artificial Sequence; identical to SEQ ID NO: 34612
  Synthetic polypeptide

SEQ ID NO: 40333 - protein, 191 aa, Artificial Sequence; identical to SEQ ID NO: 34613
  Synthetic polypeptide

SEQ ID NO: 40334 - protein, 303 aa, Artificial Sequence; identical to SEQ ID NO: 34609
  Synthetic polypeptide

SEQ ID NO: 40335 - protein, 223 aa, Artificial Sequence; identical to SEQ ID NO: 34826
  Synthetic polypeptide

SEQ ID NO: 40336 - protein, 895 aa, Artificial Sequence; identical to SEQ ID NO: 34823
  Synthetic polypeptide

SEQ ID NO: 40337 - protein, 17 aa, Artificial Sequence
  Synthetic polypeptide
VVSKVEFVHFLAFIKNH

SEQ ID NO: 40338 - protein, 35 aa, Artificial Sequence
  Synthetic polypeptide
MGPSSCRKTSSGLPLILHYAMTETPLSMCLWEKDS

SEQ ID NO: 40339 - protein, 37 aa, Artificial Sequence; identical to SEQ ID NO: 35408
  Synthetic polypeptide

SEQ ID NO: 40340 - protein, 49 aa, Artificial Sequence; identical to SEQ ID NO: 35413
  Synthetic polypeptide

SEQ ID NO: 40341 - protein, 71 aa, Artificial Sequence
  Synthetic polypeptide
MGVVAHACNSSTLGGQDPLDLLHLPGVRGYPSAAIYDQQDWGGRDHHHPLPVLPGPLSCFVSCQLDLALLL

SEQ ID NO: 40342 - protein, 48 aa, Artificial Sequence
  Synthetic polypeptide
GQEFKTSLGNIVRLHLYKKQMTQVTMPGEPVDVACGVDHMVTLAKSFI

SEQ ID NO: 40343 - protein, 54 aa, Artificial Sequence
  Synthetic polypeptide
GIPSQVELAWHWKRRKFKQLTSGEKILQAMKLSTTMQRMISILRKMTVSQAARG

SEQ ID NO: 40344 - protein, 16 aa, Artificial Sequence
  Synthetic polypeptide
LPRTGIGAPRTRNTSG

SEQ ID NO: 40345 - protein, 20 aa, Artificial Sequence
  Synthetic polypeptide
MQVSLHPKCKADKWAYQGRT

SEQ ID NO: 40346 - protein, 63 aa, Artificial Sequence
  Synthetic polypeptide
HCGRPRQVDCLGPGVPDQPGQHDITRSGAKAACGSTWGTCACRQGCCRTPWCITTCRWSCCVL

SEQ ID NO: 40347 - protein, 17 aa, Artificial Sequence
  Synthetic polypeptide
NLGSVWWLEVAELTNPS

SEQ ID NO: 40348 - protein, 201 aa, Artificial Sequence; identical to SEQ ID NO: 36725
  Synthetic polypeptide

SEQ ID NO: 40349 - protein, 218 aa, Artificial Sequence; identical to SEQ ID NO: 36723
  Synthetic polypeptide

SEQ ID NO: 40350 - protein, 234 aa, Artificial Sequence; identical to SEQ ID NO: 36720
  Synthetic polypeptide

SEQ ID NO: 40351 - protein, 146 aa, Artificial Sequence; identical to SEQ ID NO: 40117
  Synthetic polypeptide

SEQ ID NO: 40352 - protein, 166 aa, Artificial Sequence
  Synthetic polypeptide
MNSLSIRGAQEEDPPDPQLMRLDNMLLAEGVSGPEKGGGSAAAAAAAAASGGSSDNSIEHSDYRAKLTQIRQIYHTELEKYEQACNEFTTHVMNLLREQSRTRPISPKEIERMVGIIHRKFSSIQMQLKQSTCEAVMILRSRFLDARRKRRNFSKQATEILNEYFY

SEQ ID NO: 40353 - protein, 366 aa, Artificial Sequence
  Synthetic polypeptide
MNSLSIRGAQEEDPPDPQLMRLDNMLLAEGVSGPEKGGGSAAAAAAAAASGGSSDNSIEHSDYRAKLTQIRQIYHTELEKYEQACNEFTTHVMNLLREQSRTRPISPKEIERMVGIIHRKFSSIQMQLKQSTCEAVMILRSRFLDARRKRRNFSKQATEILNEYFYSHLSNPYPSEEAKEELAKKCSITVSQSLVKDPKERGSKGSDIQPTSVVSNWFGNKRIRYKKNIGKFQEEANLYAAKTAVTAAHAVAAAVQNNQTNSPTTPNSGSSGSFNLPNSGDMFMNMQSLNGDSYQGSQVGANVQSQVDTLRHVINQTGGYSDGLGGNSLYSPHNLNANGGWQDATTPSSVTSPTEGPGSVHSDTSN

SEQ ID NO: 40354 - protein, 262 aa, Artificial Sequence
  Synthetic polypeptide
MNSLSIRGAQEEDPPDPQLMRLDNMLLAEGVSGPEKGGGSAAAAAAAAASGGSSDNSIEHSDYRAKLTQIRQIYHTELEKYEQACNEFTTHVMNLLREQSRTRPISPKEIERMVGIIHRKFSSIQMQLKQSTCEAVMILRSRFLDARRKRRNFSKQATEILNEYFYSHLSNPYPSEEAKEELAKKCSITVSQVSNWFGNKRIRYKKNIGKFQEEANLYAAKTAVTAAHAVAAAVQNNQTNSPTTPNSGGYPPSCYQSDGRLQ

SEQ ID NO: 40355 - protein, 345 aa, Artificial Sequence
  Synthetic polypeptide
MNSLSIRGAQEEDPPDPQLMRLDNMLLAEGVSGPEKGGGSAAAAAAAAASGGSSDNSIEHSDYRAKLTQIRQIYHTELEKYEQACNEFTTHVMNLLREQSRTRPISPKEIERMVGIIHRKFSSIQMQLKQSTCEAVMILRSRFLDARRKRRNFSKQATEILNEYFYSHLSNPYPSEEAKEELAKKCSITVSQVSNWFGNKRIRYKKNIGKFQEEANLYAAKTAVTAAHAVAAAVQNNQTNSPTTPNSGSSGSFNLPNSGDMFMNMQSLNGDSYQGSQVGANVQSQVDTLRHVINQTGGYSDGLGGNSLYSPHNLNANGGWQDATTPSSVTSPTEGPGSVHSDTSN

SEQ ID NO: 40356 - protein, 137 aa, Artificial Sequence; identical to SEQ ID NO: 37455
  Synthetic polypeptide

SEQ ID NO: 40357 - protein, 170 aa, Artificial Sequence; identical to SEQ ID NO: 37453
  Synthetic polypeptide

SEQ ID NO: 40358 - protein, 1106 aa, Artificial Sequence
  Synthetic polypeptide
GLILLEQDTAVQNMHKKVEKLETEHMDCSDLLRRQTSELEFSTQREERLRKEFEATTLRVRKLEENIEAERAAHLESKFNSEIIQLRIRDLEGALQVEKASQAEAVADLEIIKNEFKEVESAYEREKHNAQESFAKLNLLEKEYFSKNKKLNEDIEEQKKVIIDLSKRLQYNEKSCSELQEELVMAKKHQAFLVETCENNVKELESILDSFTVSGQWTSGIHKDKDKPPSFSVVLERLRRTLTDYQNKLEDASNEEKACNELDSTKQKIDSHTKNIKELQDKLADVNKELSHLHTKCADREALISTLKVELQNVLHCWEKEKAQAAQSESELQKLSQAFHKDAEEKLTFLHTLYQHLVAGCVLIKQPEGMLDKFSWSELCAVLQENVDALIADLNRANEKIRHLEYICKNKSDTMRELQQTQEDTFTKVAEQIKAQESCWHRQKKELELQYSELFLEVQKRAQKFQEIAEKNMEKLNHIEKSHEQLVLENSHFKKLLSQTQREQMSLLAACALMAGALYPLYSRSCALSTQRDFLQEQVNTFELFKLEIRTLAQALSTVEEKKQEEAKMKKKTFKGLIRIFRKGVIAVLAANRLKILGQSCASLFTWMESFKEGIGMLVCTGEPQDKHKFPKHQKEQLRCLQALSWLTSSDLLAAIISSMAELQDVIGKADPNSRICGHLLIGAAKNSFAKLMDKISLVMECIPLHSSRSITYVEKDSLVQRLAHGLHKVNTLALKYGLRGHVPITKSTASLQKQILGFTQRLHAAEVERRSLRLEVTEFKRSVNEMKKELDKAQGLQMQLNEFKQSKLITHEKFESACEELNNALLREEQAQMLLNEQAQQLQELNYKLELHSSEEADKNQTLGEAVKSLSEAKMELRRKDQSLRQLNRHLTQLEQDKRRLEENIHDAESALRMAAKDKECVANHMRAVENTLHKVRDQISLSWSAASRNDFTLQLPKLHLETFAMEGLKGGPEVVACQAMIKSFMDVYQLASTRIMTLEKEMTSHRSHIAALKSELHTACLRENASLQSIGSRDHSNLSIPSRAPLPADTTGIGDFLPLKAELDTTYTFLKETFINTVPHALTSSHSSPVTMSANANRPTQIGL

SEQ ID NO: 40359 - protein, 1009 aa, Artificial Sequence
  Synthetic polypeptide
GLILLEQDTAVQNMHKKVEKLETEHMDCSDLLRRQTSELEFSTQREERLRKEFEATTLRVRKLEENIEAERAAHLESKFNSEIIQLRIRDLEGALQVEKASQAEAVADLEIIKNEFKEVESAYEREKHNAQESFAKLNLLEKEYFSKNKKLNEDIEEQKKVIIDLSKRLQYNEKSCSELQEELVMAKKHQAFLVETCENNVKELESILDSFTVSGQWTSGIHKDKDKPPSFSVVLERLRRTLTDYQNKLEDASNEEKACNELDSTKQKIDSHTKNIKELQDKLADVNKELSHLHTKCADREALISTLKVELQNVLHCWEKEKAQAAQSESELQKLSQAFHKDAEEKLTFLHTLYQHLVAGCVLIKQPEGMLDKFSWSELCAVLQENVDALIADLNRANEKIRHLEYICKNKSDTMRELQQTQEDTFTKVAEQIKAQESCWHRQKKELELQYSELFLEVQKRAQKFQEIAEKNMEKLNHIEKSHEQLVLENSHFKKLLSQTQREQMSLLAACALMAGALYPLYSRSCALSTQRDFLQEQVNTFELFKLEIRTLAQALSTVEEKKQEEAKMKKKTFKGLIRIFRKGVIAVLAANRLKILGQSCASLFTWMESFKEGIGMLVCTGEPQDKHKFPKHQKEQLRCLQALSWLTSSDLLAAIISSMAELQDVIGKADPNSRICGHLLIGAAKNSFAKLMDKISLVMECIPLHSSRSITYVEKDSLVQRLAHGLHKVNTLALKYGLRGHVPITKSTASLQKQILGFTQRLHAAEVERRSLRLEVTEFKRSVNEMKKELDKAQGLQMQLNEFKQSKLITHEKFESACEELNNALLREEQAQMLLNEQAQQLQELNYKLELHSSEEADKNQTLGEAVKSLSEAKMELRRKDQSLRQLNRHLTQLEQDKRRLEENIHDAESALRMAAKDKECVANHMRAVENTLHKVRDQISLSWSAASRNDFTLQLPKLHLETFAMEGLKGGPEVVACQVRVQWCDHSSLQSQMPGLKQSSCLSLLST

SEQ ID NO: 40360 - protein, 97 aa, Artificial Sequence
  Synthetic polypeptide
GLILLEQDTAVQNMHKKVEKLETEHMDCSDLLRRQTSELEFSTQREERLRKEFEATTLRVRKLEENIEAERAAHLESKFNSEIIQVKCKQIFWPAFS

SEQ ID NO: 40361 - protein, 38 aa, Artificial Sequence; identical to SEQ ID NO: 37717
  Synthetic polypeptide

SEQ ID NO: 40362 - protein, 96 aa, Artificial Sequence
  Synthetic polypeptide
IWETEVTVSRDRAIALQPGQQRETREERTFRNWMNSLGVNPHVNHLYADLQDALVILQLYERIKVPVDWSKVNKPPYPKLGANMKKLENCNYAVEL

SEQ ID NO: 40363 - protein, 257 aa, Artificial Sequence
  Synthetic polypeptide
IWETEVTVSRDRAIALQPGQQRETREERTFRNWMNSLGVNPHVNHLYADLQDALVILQLYERIKVPVDWSKVNKPPYPKLGANMKKLENCNYAVELGKHPAKFSLVGIGGQDLNDGNQTLTLALVWQLMRRYTLNVLEDLGDGQKANDDIIVNWVNRTLSEAGKSTSIQSFKDKTISSSLAVVDLIDAIQPGCINYDLVKSGNLTEDDKHNNAKYAVSMARRIGARVYALPEDLVEVKPKMVMTVFACLMGRGMKRV

SEQ ID NO: 40364 - protein, 105 aa, Artificial Sequence; identical to SEQ ID NO: 38560
  Synthetic polypeptide

SEQ ID NO: 40365 - protein, 471 aa, Artificial Sequence
  Synthetic polypeptide
MVLESTMVCVDNSEYMRNGDFLPTRLQAQQDAVNIVCHSKTRSNPENNVGLITLANDCEVLTTLTPDTGRILSKLHTVQPKGKITFCTGIRVAHLALKHRQGKNHKMRIIAFVGSPVEDNEKDLVKLAKRLKKEKVNVDIINFGEEEVNTEKLTAFVNTLNGKDGTGSHLVTVPPGPSLADALISSPILAGEGGAMLGLGASDFEFGVDPSADPELALALRVSMEEQRQRQEEEARRAAAASAAEAGIATTGTEDSDDALLKMTISQQEFGRTGLPDLSSMTEEEQIAYAMQMSLQGAEFGQAESADIDASSAMDTSEPAKEEDDYDVMQDPEFLQSVLENLPGVDPNNEAIRNAMGSLASQATKDGKKDKKEEDKNFTPEASETTNPPGGTNNSRCAALRAVTLTAKVRGLTPEPPRPRTHQKEETPNTSEHQKEQTLDTLTLRTVTLTAKVCGFILEVSETKNPPIPDT

SEQ ID NO: 40366 - protein, 474 aa, Artificial Sequence
  Synthetic polypeptide
MVLESTMVCVDNSEYMRNGDFLPTRLQAQQDAVNIVCHSKTRSNPENNVGLITLANDCEVLTTLTPDTGRILSKLHTVQPKGKITFCTGIRVAHLALKHRQGKNHKMRIIAFVGSPVEDNEKDLVKLAKRLKKEKVNVDIINFGEEEVNTEKLTAFVNTLNGKDGTGSHLVTVPPGPSLADALISSPILAGEGGAMLGLGASDFEFGVDPSADPELALALRVSMEEQRQRQEEEARRAAAASAAEAGIATTGTEGERDSDDALLKMTISQQEFGRTGLPDLSSMTEEEQIAYAMQMSLQGAEFGQAESADIDASSAMDTSEPAKEEDDYDVMQDPEFLQSVLENLPGVDPNNEAIRNAMGSLASQATKDGKKDKKEEDKNFTPEASETTNPPGGTNNSRCAALRAVTLTAKVRGLTPEPPRPRTHQKEETPNTSEHQKEQTLDTLTLRTVTLTAKVCGFILEVSETKNPPIPDT

SEQ ID NO: 40367 - protein, 287 aa, Artificial Sequence
  Synthetic polypeptide
  misc_feature (1)..(1): Xaa can be any naturally occurring amino acid
XGSPVEDNEKDLVKLAKRLKKEKVNVDIINFGEEALRVSMEEQRQRQEEEARRAAAASAAEAGIATTGTEDSDDALLKMTISQQEFGRTGLPDLSSMTEEEQIAYAMQMSLQGAEFGQAESADIDASSAMDTSEPAKEEDDYDVMQDPEFLQSVLENLPGVDPNNEAIRNAMGSLASQATKDGKKDKKEEDKNFTPEASETTNPPGGTNNSRCAALRAVTLTAKVRGLTPEPPRPRTHQKEETPNTSEHQKEQTLDTLTLRTVTLTAKVCGFILEVSETKNPPIPDT

SEQ ID NO: 40368 - protein, 178 aa, Artificial Sequence
  Synthetic polypeptide
  misc_feature (1)..(1): Xaa can be any naturally occurring amino acid
XIDASSAMDTSEPAKSSINRVLSRPLYLEEDDYDVMQDPEFLQSVLENLPGVDPNNEAIRNAMGSLASQATKDGKKDKKEEDKNFTPEASETTNPPGGTNNSRCAALRAVTLTAKVRGLTPEPPRPRTHQKEETPNTSEHQKEQTLDTLTLRTVTLTAKVCGFILEVSETKNPPIPDT

SEQ ID NO: 40369 - protein, 47 aa, Artificial Sequence
  Synthetic polypeptide
MAWWKSWGPHRHSLHPTTTEYTFFLSVHRTYSQINHMLSHKASLNKF

SEQ ID NO: 40370 - protein, 100 aa, Artificial Sequence
  Synthetic polypeptide
MAGKAHRLSAEERDQLLPNLRAVGWNELEGRDAIFKQFHFKDFNRAFGFMTRVALQAEKLDHHPEWFNVSRLQASGVQQYHLLSWFSSLPTTDLGTCQPP

SEQ ID NO: 40371 - protein, 261 aa, Artificial Sequence; identical to SEQ ID NO: 2709
  Synthetic polypeptide

SEQ ID NO: 40372 - protein, 296 aa, Artificial Sequence; identical to SEQ ID NO: 2708
  Synthetic polypeptide

SEQ ID NO: 40373 - protein, 162 aa, Artificial Sequence; identical to SEQ ID NO: 2707
  Synthetic polypeptide

SEQ ID NO: 40374 - protein, 86 aa, Artificial Sequence
  Synthetic polypeptide
MSVLGEYERHCDSINSDFGSESGGCGDSSPGPSASQGPRAGGGAAEQEELHYIPIRVLGRGAFGEATLYRRTEIILRIKRRLCSVN

SEQ ID NO: 40375 - protein, 186 aa, Artificial Sequence; identical to SEQ ID NO: 2990
  Synthetic polypeptide

SEQ ID NO: 40376 - protein, 199 aa, Artificial Sequence; identical to SEQ ID NO: 2991
  Synthetic polypeptide

SEQ ID NO: 40377 - protein, 150 aa, Artificial Sequence; identical to SEQ ID NO: 2992
  Synthetic polypeptide

SEQ ID NO: 40378 - protein, 225 aa, Artificial Sequence; identical to SEQ ID NO: 2993
  Synthetic polypeptide

SEQ ID NO: 40379 - protein, 191 aa, Artificial Sequence
  Synthetic polypeptide
MSGPGNKRAAGDGGSGPPEKKLSREEKTTTTLIEPIRLGGISSTEEMDLKVLQFKNKKLAERLEQRQACEDELRERIEKLEKRQAQFSLLYNESLQVKTQLDEARGLLLATKNSHLRHIEHMESDELGLQKKLRTEVIQLEDTLAQVRKEYEMLRIEFEQNLAANEQAALSEAKVGGSLEARNLRPARATK

SEQ ID NO: 40380 - protein, 499 aa, Artificial Sequence
  Synthetic polypeptide
MSGPGNKRAAGDGGSGPPEKKLSREEKTTTTLIEPIRLGGISSTEEMDLKVLQFKNKKLAERLEQRQACEDELRERIEKLEKRQATDDATLLIVNRYWAQLDETVEALLRCHESQGELSSAPEAPGTQEGPTCDGTPLPEPGTSELRDPLLMQLRPPLSEPALAFVVALGASSSEEVELELQGRMEFSKAAVSRVVEASDRLQRRVEELCQRVYSRGDSEPLSEAAQAHTRELGRENRRLQDLATQLQEKHHRISLEYSELQDKVTSAETKVLEMETTVEDLQWDIEKLRKREQKLNKHLAEALEQLNSGYYVSGSSSGFQGGQITLSMQKFEMLNAELEENQELANSRMAELEKLQAELQGAVRTNERLKVALRSLPEEVVRETGEYRMLQAQFSLLYNESLQVKTQLDEARGLLLATKNSHLRHIEHMESDELGLQKKLRTEVIQLEDTLAQVRKEYEMLRIEFEQNLAANEQAALSEAKVGGSLEARNLRPARATK

SEQ ID NO: 40381 - protein, 399 aa, Artificial Sequence
  Synthetic polypeptide
MSGPGNKRAAGDGGSGPPEKKLSREEKTTTTLIEPIRLGGISSTEEMDLKVLQFKNKKLAERLEQRQACEDELRERIEKLEKRQATDDATLLIVNRYWAQLDETVEALLRCHESQGELSSAPEAPGTQEGPTCDGTPLPEPGTSELRDPLLMQLRPPLSEPALAFVVALGASSSEEVELELQGRMEFSKAAVSRVVEASDRLQRRVEELCQRVYSRGDSEPLSEAAQAHTRELGRENRRLQDLATQLQEKHHRISLEYSELQDKVTSAETKVLEMETTVEDLQWDIEKLRKREQKLNKHLAEALEQLNSGYYVSGSSSGFQGGQITLSMQKSDELGLQKKLRTEVIQLEDTLAQVRKEYEMLRIEFEQNLAANEQAALSEAKVGGSLEARNLRPARATK

SEQ ID NO: 40382 - protein, 459 aa, Artificial Sequence
  Synthetic polypeptide
MSGPGNKRAAGDGGSGPPEKKLSREEKTTTTLIEPIRLGGISSTEEMDLKVLQFKNKKLAERLEQRQACEDELRERIEKLEKRQATDDATLLIVNRYWAQLDETVEALLRCHESQGELSSAPEAPGTQEGPTCDGTPLPEPGTSELRDPLLMQLRPPLSEPALAFVVALGASSSEEVELELQGRMEFSKAAVSRVVEASDRLQRRVEELCQRVYSRGDSEPLSEAAQAHTRELGRENRRLQDLATQLQEKHHRISLEYSELQDKVTSAETKVLEMETTVEDLQWDIEKLRKREQKLNKHLAEALEQLNSGYYVSGSSSGFQGGQITLSMQKVALRSLPEEVVRETGEYRMLQAQFSLLYNESLQVKTQLDEARGLLLATKNSHLRHIEHMESDELGLQKKLRTEVIQLEDTLAQVRKEYEMLRIEFEQNLAANEQAALSEAKVGGSLEARNLRPARATK

SEQ ID NO: 40383 - protein, 58 aa, Artificial Sequence
  Synthetic polypeptide
MEEIGILVEKAQDEIPALSVSRPQTGLSFLGPEPEDLEDLYSRYKKLQQHSGAKKHLE

SEQ ID NO: 40384 - protein, 539 aa, Artificial Sequence; identical to SEQ ID NO: 5037
  Synthetic polypeptide

SEQ ID NO: 40385 - protein, 687 aa, Artificial Sequence; identical to SEQ ID NO: 5036
  Synthetic polypeptide

SEQ ID NO: 40386 - protein, 187 aa, Artificial Sequence; identical to SEQ ID NO: 6053
  Synthetic polypeptide

SEQ ID NO: 40387 - protein, 110 aa, Artificial Sequence; identical to SEQ ID NO: 6052
  Synthetic polypeptide

SEQ ID NO: 40388 - protein, 109 aa, Artificial Sequence; identical to SEQ ID NO: 6054
  Synthetic polypeptide

SEQ ID NO: 40389 - protein, 1197 aa, Artificial Sequence; identical to SEQ ID NO: 6390
  Synthetic polypeptide

SEQ ID NO: 40390 - protein, 253 aa, Artificial Sequence; identical to SEQ ID NO: 6738
  Synthetic polypeptide

SEQ ID NO: 40391 - protein, 19 aa, Artificial Sequence
  Synthetic polypeptide
MKRSLQALYCQLLTYVKPV

SEQ ID NO: 40392 - protein, 53 aa, Artificial Sequence
  Synthetic polypeptide
AKIAPFRSSLCKRRGTESSQHCPGIVSEMDRAPPGPLHSNKGRNRLDHQRAEK

SEQ ID NO: 40393 - protein, 56 aa, Artificial Sequence
  Synthetic polypeptide
NLSAHLPTLGLQGQRLNSIKTPNLMCFWIGEQLDILENIYNDEDPEGSVDPEGQGS

SEQ ID NO: 40394 - protein, 56 aa, Artificial Sequence
  Synthetic polypeptide
SSETGTSQPNLERPPSRLSPPEAAFQRMLAMELRSPDHPRAEYPDFSPSPGPVAGL

SEQ ID NO: 40395 - protein, 94 aa, Artificial Sequence
  Synthetic polypeptide
GWARWLTPVIPALWEAERQASLGTTGTSAAKPGARESPTTRSGSMSWGAQLPTPRLAPAASTQSVCGEVVLVKQGSSMLSTMHLITSWFVPRPW

SEQ ID NO: 40396 - protein, 60 aa, Artificial Sequence
  Synthetic polypeptide
GCPTCECHSLGHFCHCSPQACCMWKNELDKFIVFWFQSSKIIQHQFLMPCTCCHPACTLF

SEQ ID NO: 40397 - protein, 42 aa, Artificial Sequence
  Synthetic polypeptide
GCPTCECHSLGHFCHCSPQACCMWKNELDKFIVFWFQSSTLF

SEQ ID NO: 40398 - protein, 57 aa, Artificial Sequence
  Synthetic polypeptide
WWFIRYLPLKNVTSRKGKDVVLRQSLSLMAHGATRWKEVPSVPRHTPSLPSSMKTSR

SEQ ID NO: 40399 - protein, 282 aa, Artificial Sequence; identical to SEQ ID NO: 13397
  Synthetic polypeptide

SEQ ID NO: 40400 - protein, 124 aa, Artificial Sequence; identical to SEQ ID NO: 13399
  Synthetic polypeptide

SEQ ID NO: 40401 - protein, 185 aa, Artificial Sequence; identical to SEQ ID NO: 13398
  Synthetic polypeptide

SEQ ID NO: 40402 - protein, 308 aa, Artificial Sequence; identical to SEQ ID NO: 13394
  Synthetic polypeptide

SEQ ID NO: 40403 - protein, 272 aa, Artificial Sequence
  Synthetic polypeptide
KCVAPPPSLSLSLSLSCQPSEDMLTSPSPSFMMEQVGLAIRSKIADGSVKREDIFYTSKLWSNSHRPELVRPALERSLKNLQLDYVDLYLIHFPVSVKAMEKCKDAGLAKSIGVSNFNHRLLEMILNKPGLKYKPVCNQVECHPYFNQRKLLDFCKSKDIVLVAYSALGSHREEPWVDPNSPVLLEDPVLCALAKKHKRTPALIALRYQLQRGVVVLAKSYNEQRIRQNVQVFEFQLTSEEMKAIDGLNRNVRYLTLDIFAGPPNYPFSDEY

SEQ ID NO: 40404 - protein, 114 aa, Artificial Sequence
  Synthetic polypeptide
KCVAPPPSLSLSLSLSCQPSEDMLTSPSPSFMMEQVGLAIRSKIADGSVKREDIFYTSKLWSNSHRPELVRPALERSLKNLQLDYVDLYLIHFPVSVKEDIGILTWKKSPKHNS

SEQ ID NO: 40405 - protein, 175 aa, Artificial Sequence
  Synthetic polypeptide
KCVAPPPSLSLSLSLSCQPSEDMLTSPSPSFMMEQVGLAIRSKIADGSVKREDIFYTSKLWSNSHRPELVRPALERSLKNLQLDYVDLYLIHFPVSVKPGEEVIPKDENGKILFDTVDLCATWEAMEKCKDAGLAKSIGVSNFNHRLLEMILNKPGLKYKPVCNQVECHPYFNQR

SEQ ID NO: 40406 - protein, 298 aa, Artificial Sequence
  Synthetic polypeptide
KCVAPPPSLSLSLSLSCQPSEDMLTSPSPSFMMEQVGLAIRSKIADGSVKREDIFYTSKLWSNSHRPELVRPALERSLKNLQLDYVDLYLIHFPVSVKPGEEVIPKDENGKILFDTVDLCATWEAMEKCKDAGLAKSIGVSNFNHRLLEMILNKPGLKYKPVCNQVECHPYFNQRKLLDFCKSKDIVLVAYSALGSHREEPWVDPNSPVLLEDPVLCALAKKHKRTPALIALRYQLQRGVVVLAKSYNEQRIRQNVQVFEFQLTSEEMKAIDGLNRNVRYLTLDIFAGPPNYPFSDEY

SEQ ID NO: 40407 - protein, 78 aa, Artificial Sequence
  Synthetic polypeptide
EVRSVSARPPRLRSEETLRLATAPSEKSTICRSSGEVPHWPPRSLSRETTAMGPSVSSRPNSPQSWTAGSSGSSLKRL

SEQ ID NO: 40408 - protein, 184 aa, Artificial Sequence; identical to SEQ ID NO: 13842
  Synthetic polypeptide

SEQ ID NO: 40409 - protein, 50 aa, Artificial Sequence; identical to SEQ ID NO: 13872
  Synthetic polypeptide

SEQ ID NO: 40410 - protein, 26 aa, Artificial Sequence
  Synthetic polypeptide
GSTTDLFWTVKTKSLMYCSWETPWCS

SEQ ID NO: 40411 - protein, 62 aa, Artificial Sequence
  Synthetic polypeptide
EDRLRPEVQDQPGQHSKALSLSKKVKKNCQEAVLNGLVATEVLMWFYVGEIIGKRGIIGYDV

SEQ ID NO: 40412 - protein, 50 aa, Artificial Sequence
  Synthetic polypeptide
QNPVCTKNTKISREWWHAPVIPAAWEVEAREFLEPVLPRVLLKEELTTPK

SEQ ID NO: 40413 - protein, 57 aa, Artificial Sequence
  Synthetic polypeptide
PCTRHPSSLSLGFPTWAGRPCWCIGPWPSSPRPSSLSSSWTTPSASRSYASASQGCW

SEQ ID NO: 40414 - protein, 47 aa, Artificial Sequence
  Synthetic polypeptide
NFCSMKQTFKRWEGITAMAPTLQDLVDMASVHMKTKNLPMQEKLFLL

SEQ ID NO: 40415 - protein, 93 aa, Artificial Sequence
  Synthetic polypeptide
GVPNSRAVACLEPGCTAGEHLWLYQKKRCQMCTVFCRASPKDRLKKCRDRPGGSGKRTSSQLKPLPWPPCRLSMTGSIHMLPSPMKNGMTLLL

SEQ ID NO: 40416 - protein, 59 aa, Artificial Sequence; identical to SEQ ID NO: 14709
  Synthetic polypeptide

SEQ ID NO: 40417 - protein, 31 aa, Artificial Sequence
  Synthetic polypeptide
NGESTCGIYSPGSQRTQSSTIQIRLTCMMMC

SEQ ID NO: 40418 - protein, 65 aa, Artificial Sequence
  Synthetic polypeptide
NRPIERTDVTRYHLSAMLDLGEPLRQKIGGGCPGGQLLPQRQGHQEDLGQRGYRGGRRPAQQGYQ

SEQ ID NO: 40419 - protein, 67 aa, Artificial Sequence
  Synthetic polypeptide
AWTSFLAFLYLFPCLGRSGPGRNALGIGRGNRSARCVCETEKDRRPWSNLEGLSGGQTSKATKNERP

SEQ ID NO: 40420 - protein, 129 aa, Artificial Sequence
  Synthetic polypeptide
NGTRTYGITGIRPPTSVRPCHHCEPGRDEQPAARHLHPTADTHLGLLCHQGAGRADGFAVGFQDPGPGAKSGWGAVLGGRLASGRRAEQPRRAGRGRVHGPGEDREQLTPWGAPEAREPAGQHAGEPAV

SEQ ID NO: 40421 - protein, 103 aa, Artificial Sequence
  Synthetic polypeptide
NGTRTYGITGIRPPTSVRPCHHCEPGRDEQPAARHLHPTADTHLGLLCHQGAGRADGFAVGFQGLLAPGGGCTSCLHQLICPGGRKVPPSLCCQTPYPEPQES

SEQ ID NO: 40422 - protein, 95 aa, Artificial Sequence
  Synthetic polypeptide
NGTRTYGITGIRPPTSVRPCHHCEPGRDEQPAARHLHPTADTHLGLLCHQGAGRADGFAVGFQVHGPGEDREQLTPWGAPEAREPAGQHAGEPAV

SEQ ID NO: 40423 - protein, 44 aa, Artificial Sequence
  Synthetic polypeptide
LRDPRAGSCMLMGLMERAAKRTRRLQGATAMVRRQPKCRTSKTT

SEQ ID NO: 40424 - protein, 41 aa, Artificial Sequence
  Synthetic polypeptide
CQASCTARKTFLRKTKDLDQFLKSSQSIPFIQRNHWKEKSH

SEQ ID NO: 40425 - protein, 51 aa, Artificial Sequence
  Synthetic polypeptide
CQASCTARKTFLRKTKDLDQFLKSSQSIPFIQRNHWKEKSHSTVGHEPALS

SEQ ID NO: 40426 - protein, 57 aa, Artificial Sequence
  Synthetic polypeptide
CQASCTARKTFLRKTKDLDQFLKSSQSIPFIQRNHWKEKSHSTVGHEPALSRFTNGE

SEQ ID NO: 40427 - protein, 41 aa, Artificial Sequence
  Synthetic polypeptide
TMRLEDTPKHVESQCRAARAKSISPQYWVPWRFQSCPPTTY

SEQ ID NO: 40428 - protein, 32 aa, Artificial Sequence
  Synthetic polypeptide
SQLLERLRQENRLNPGGGGYNDFGNYNNQSSN

SEQ ID NO: 40429 - protein, 80 aa, Artificial Sequence
  Synthetic polypeptide
SQLLERLRQENRLNPGGGGYNDFGNYNNQSSNFGPMKGGNFGGRSSGPYGGGGQYFAKPRNQGGYGGSSSSSSYGSGRRF

SEQ ID NO: 40430 - protein, 113 aa, Artificial Sequence; identical to SEQ ID NO: 16555
  Synthetic polypeptide

SEQ ID NO: 40431 - protein, 94 aa, Artificial Sequence
  Synthetic polypeptide
PPYLMWPPSTSIYSTLLLTIYHNYFKHYVSIYLPVYYLSPNTRMEVPSSSTASSTECCGPASQVSCIRSHPPGGTQCHGNDVPVTPIGQAGEQP

SEQ ID NO: 40432 - protein, 72 aa, Artificial Sequence
  Synthetic polypeptide
EMQKEILQAEQNDTKKSGSTRRNGKHTNAQMSVPFNRFWAPKRNTSALVRTGIKSPSVDRKRLCYMNVALVI

SEQ ID NO: 40433 - protein, 39 aa, Artificial Sequence; identical to SEQ ID NO: 17363
  Synthetic polypeptide

SEQ ID NO: 40434 - protein, 37 aa, Artificial Sequence; identical to SEQ ID NO: 17502
  Synthetic polypeptide

SEQ ID NO: 40435 - protein, 70 aa, Artificial Sequence
  Synthetic polypeptide
KPLPIILPTGTPNLRTIYTKKHLHKNQKSVMLKVADHSGQVKTKCFEMTIPQFQNFYRQFKEIAAVIETV

SEQ ID NO: 40436 - protein, 83 aa, Artificial Sequence
  Synthetic polypeptide
KPLPIILPTGTPNLRTIYTKKHLHKNQKSVMLKVADHSGQVKTKCFEMTIPQFQPQLLATSSLLSASNFYRQFKEIAAVIETV

SEQ ID NO: 40437 - protein, 106 aa, Artificial Sequence
  Synthetic polypeptide
GYQGRSRKRAVLHNKRKNCLNGGVSGMSHRPGVEEESVKQGTGTSWDVGSSRSPARRTSHFLSRTPASLESDAPTVWPRQPDVSHHTGRRSCYRKTSDFASSRWLF

SEQ ID NO: 40438 - protein, 64 aa, Artificial Sequence
  Synthetic polypeptide
SRFLYKSQKLREQIKYPYPLQWEHQLQPLPQESSHHVSRHVQEPVLPEAELCDRRGHGRVLLCE

SEQ ID NO: 40439 - protein, 36 aa, Artificial Sequence
  Synthetic polypeptide
SQHFGRLKGVDHLRSGVRDQPGQHGMMRRQQLITRF

SEQ ID NO: 40440 - protein, 83 aa, Artificial Sequence; identical to SEQ ID NO: 18967
  Synthetic polypeptide

SEQ ID NO: 40441 - protein, 33 aa, Artificial Sequence
  Synthetic polypeptide
FTLATLKMRAKVIDATVKIASILVWMRSPLSTF

SEQ ID NO: 40442 - protein, 30 aa, Artificial Sequence; identical to SEQ ID NO: 19417
  Synthetic polypeptide

SEQ ID NO: 40443 - protein, 44 aa, Artificial Sequence
  Synthetic polypeptide
FSSKSRHQRENGFVKKFEPKSGWMTFLEVTGKICEMLSLLKQYC

SEQ ID NO: 40444 - protein, 774 aa, Artificial Sequence
  Synthetic polypeptide
LLSMTCKALPDLAGLAHLLGFSFHYFVLAYCRNTELLLFDGIECEFPIFFLYMMIDGVFRGNPKQVQEYQDLLTPVLHHTTEGYPVVPKYYYVPADFVEYEKNNPGSQKRFPSNCGRDGKLFLWGQALYIIAKLLADELISPKDIDPVQRYVPLKDQRNVSMRFSNQGPLENDLVVHVALIAESQRLQVFLNTYGIQTQTPQQVEPIQIWPQQELVKAYLQLGINEKLGLSGRPDRPIGCLGTSKIYRILGKTVVCYPIIFDLSDFYMSQDVFLLIDDIKNALQFIKQYWKMHGRPLFLVLIREDNIRGSRFNPILDMLAALKKGIIGGVKVHVDRLQTLISGAVVEQLDFLRISDTEELPEFKSFEELEPPKHSKVKRQSSTPSAPELGQQPDVNISEWKDKPTHEILQKLNDCSCLASQAILLGILLKREGPNFITKEGTVSDHIERVYRRAGSQKLWLAVRYGAAFTQKFSSSIAPHITTFLVHGKQVTLGAFGHEEEVISNPLSPRVIQNIIYYKCNTHDEREAVIQQELVIHIGWIISNNPELFSGMLKIRIGWIIHAMEYELQIRGGDKPALDLYQLSPSEVKQLLLDILQPQQNGRCWLNRRQIDGSLNRTPTGFYDRVWQILERTPNGIIVAGKHLPQQPTLSDMTMYEMNFSLLVEDTLGNIDQPQYRQIVVELLMVVSIVLERNPELEFQDKVDLDRLVKEAFNEFQKDQSRLKEIEKQDDMTSFYNTPPLGKRGTCSYLTKAVMNLLLEGEVKPNNDDPCLIS

SEQ ID NO: 40445 - protein, 774 aa, Artificial Sequence
  Synthetic polypeptide
LLSMTCKALPDLAGLAHLLGFSFHYFVLAYCRNTELLLFDGIECEFPIFFLYMMIDGVFRGNPKQVQEYQDLLTPVLHHTTEGYPVVPKYYYVPADFVEYEKNNPGSQKRFPSNCGRDGKLFLWGQALYIIAKLLADELISPKDIDPVQRYVPLKDQRNVSMRFSNQGPLENDLVVHVALIAESQRLQVFLNTYGIQTQTPQQVEPIQIWPQQELVKAYLQLGINEKLGLSGRPDRPIGCLGTSKIYRILGKTVVCYPIIFDLSDFYMSQDVFLLIDDIKNALQFIKQYWKMHGRPLFLVLIREDNIRGSRFNPILDMLAALKKGIIGGVKVHVDRLQTLISGAVVEQLDFLRISDTEELPEFKSFEELEPPKHSKVKRQSSTPSAPELGQQPDVNISEWKDKPTHEILQKLNDCSCLASQAILLGILLKREGPNFITKEGTVSDHIERVYRRAGSQKLWSVVRRAASLLSKVVDSLAPSITNVLVQGKQVTLGAFGHEEEVISNPLSPRVIQNIIYYKCNTHDEREAVIQQELVIHIGWIISNNPELFSGMLKIRIGWIIHAMEYELQIRGGDKPALDLYQLSPSEVKQLLLDILQPQQNGRCWLNRRQIDGSLNRTPTGFYDRVWQILERTPNGIIVAGKHLPQQPTLSDMTMYEMNFSLLVEDTLGNIDQPQYRQIVVELLMVVSIVLERNPELEFQDKVDLDRLVKEAFNEFQKDQSRLKEIEKQDDMTSFYNTPPLGKRGTCSYLTKAVMNLLLEGEVKPNNDDPCLIS

SEQ ID NO: 40446 - protein, 58 aa, Artificial Sequence
  Synthetic polypeptide
QAWQKSTDRTGSLREDVLQLCHEGGCCSGFEEERMGGGGVGPLCHELQSHHFQKGHHR

SEQ ID NO: 40447 - protein, 51 aa, Artificial Sequence
  Synthetic polypeptide
VSSPWLHIQSLGGHFKIFSIPGTAPQTNEIRISEALGNGYFLKTEQIRNIF

SEQ ID NO: 40448 - protein, 32 aa, Artificial Sequence
  Synthetic polypeptide
EVPFTSHHNSEPSPAIWNFSCMAPRMLPIQAV

SEQ ID NO: 40449 - protein, 138 aa, Artificial Sequence
  Synthetic polypeptide
GRVRWLMPVIPALWDPEAGGSPEVRSSRPAWPPWRNPISTKSIKIASYSTYGNPGSQGYGQASQVIHSPMVVMRIKSRAHIASNHIITRDSSKTWNHQEAKVEEHLPMTSQTMVNKIHMTSSQAMINIKAHMMSSQIM

SEQ ID NO: 40450 - protein, 151 aa, Artificial Sequence
  Synthetic polypeptide
KLPVILPMEIQAAKAMDKHHKAILAMGKRLIPLMDRTTAVTPVMDKVIHSPMVVMRIKSRAHIASNHIITRDSSKTWNHQEAKVEEHLPMTSQTMVNKIHMTSSQAMINIKAHMMSSQIMISSMIPIVKTSSPIIHKGKTTATTHKMTVVM

SEQ ID NO: 40451 - protein, 154 aa, Artificial Sequence
  Synthetic polypeptide
KLPVILPMEIQAAKAMDKHHKAILAMGKRLIPLMDRTTAVTPVMDKVSQVIHSPMVVMRIKSRAHIASNHIITRDSSKTWNHQEAKVEEHLPMTSQTMVNKIHMTSSQAMINIKAHMMSSQIMISSMIPIVKTSSPIIHKGKTTATTHKMTVVM

SEQ ID NO: 40452 - protein, 930 aa, Artificial Sequence
  Synthetic polypeptide
TREAEVARWLTEQRAQCPHCRAPLQLRELVNCRWAEEVTQQLDTLQLCSLTKHEENEKDKCENHHEKLSVFCWTCKKCICHQCALWGGMHGGHTFKPLAEIYEQHVTKVNEEVAKLRRRLMELISLVQEVERNVEAVRNAKDERVREIRNAVEMMIARLDTQLKNKLITLMGQKTSLTQETELLESLLQEVEHQLRSCSKSELISKSSEILMMFQQVHRKPMASFVTTPVPPDFTSELVPSYDSATFVLENFSTLRQRADPVYSPPLQVSGLCWRLKVYPDGNGVVRGYYLSVFLELSAGLPETSKYEYRVEMVHQSCNDPTKNIIREFASDFEVGECWGYNRFFRLDLLANEGYLNPQNDTVILRFQVRSPTFFQKSRDQHWYITQLEAAQTSYIQQINNLKERLTIELSRTQKSRDLSPPDNHLSPQNDDALETRAKKSACSDMLLEGGPTTASVREAKEDEEDEEKIQNEDYHHELSDGDLDLDLVYEDEVNQLDGSSSSASSTATSNTEENDIDEETMSGENDVEYNNMELEEGELMEDAAAAGPAGSSHGYVGSSSRISRRTHLCSAATSSLLDIDPLILIHLLDLKDRSSIENLWGLQPRPPASLLQPTASYSRKDKDQRKQQAMWRVPSDLKMLKRLKTQMAEVRCMKTDVKNTLSEIKSSSAASGDMQTSLFSADQAALAACGTENSGRLQDLGMELLAKSSVANCYIRNSTNKKSNSPKPARSSVAGSLSLRRAVDPGENSRSKGDCQTLSEGSPGSSQSGSRHSSPRALIHGSIGDILPKTEDRQCKALDSDAVVVAVFSGLPAVEKRRKMVTLGANAKGGHLEGLQMTDLENNSETGELQPVLPEGASAAPEEGMSSDSDIECDTENEEQEEHTSVGGFHDSFMVMTQPPDEDTHSSFPDGEQIGPEDLSFNTDENSGR

SEQ ID NO: 40453 - protein, 69 aa, Artificial Sequence
  Synthetic polypeptide
TREAEVARWLTEQRAQCPHCRAPLQLRELVNCRWAEEVTQQLDTLQLCSLTKHEENEKDKYVLNFFVQY

SEQ ID NO: 40454 - protein, 79 aa, Artificial Sequence
  Synthetic polypeptide
TREAEVARWLTEQRAQCPHCRAPLQLRELVNCRWAEEVTQQLDTLQLCSLTKHEENEKDNMADIPLNLWQKFMSNTSLK

SEQ ID NO: 40455 - protein, 24 aa, Artificial Sequence
  Synthetic polypeptide
TREAEVARWLTEQRAQCPHCRKGM

SEQ ID NO: 40456 - protein, 33 aa, Artificial Sequence
  Synthetic polypeptide
TREAEVARWLTEQRAQCPHCRVSLCRPGRSAMA

SEQ ID NO: 40457 - protein, 41 aa, Artificial Sequence
  Synthetic polypeptide
GAPLPGRDPVWELRSVSARPPPCLGDEERLCPAAPSEKHIF

SEQ ID NO: 40458 - protein, 81 aa, Artificial Sequence
  Synthetic polypeptide
NVAGQIQRKSGGSAQGCEAGAPRGPSGTQEMGPLSRTQERSSHGASGLAGDGAHARGLLAPQHPAPRLQGDPRAPGRPRLP

SEQ ID NO: 40459 - protein, 47 aa, Artificial Sequence; identical to SEQ ID NO: 24034
  Synthetic polypeptide

SEQ ID NO: 40460 - protein, 49 aa, Artificial Sequence; identical to SEQ ID NO: 24029
  Synthetic polypeptide

SEQ ID NO: 40461 - protein, 57 aa, Artificial Sequence
  Synthetic polypeptide
KKERLTGALWIPYFQIWGAKLRSCPSPPSPATTPTPRRTRMLWPSPVNLRFTAQPAC

SEQ ID NO: 40462 - protein, 102 aa, Artificial Sequence
  Synthetic polypeptide
CLNNTGLNYAGPFVFSSTSATPETARPMLLLPHHPHQCEDKDEDLYDDPLPLNTYSCLCVSLSPPLVSKGSHRSRWLRTMAVPAGTQVWRQDLQPLGAVLLQ

SEQ ID NO: 40463 - protein, 47 aa, Artificial Sequence
  Synthetic polypeptide
GQDPLHHILRVHQQQGPLLRLLLLQRASDVAAAAARVLVLPHSAHAL

SEQ ID NO: 40464 - protein, 41 aa, Artificial Sequence; identical to SEQ ID NO: 25473
  Synthetic polypeptide

SEQ ID NO: 40465 - protein, 172 aa, Artificial Sequence
  Synthetic polypeptide
QMLARMWRKGKPHTLLVEVKISTTTMKNSSEVPQKAENRATVRSSNSTARYIPKIKEIDISKRYLHSHFAALFTIAKICKQPKHPSTDEWIKKMWYIRTVEYYSAIRKNAICHLQQHGWNWRHRRRNNRNHPGEEREKQKTRMKVVREKVLGDVATKLATILNTRVEMAQVQ

SEQ ID NO: 40466 - protein, 193 aa, Artificial Sequence
  Synthetic polypeptide
QMLARMWRKGKPHTLLVEVKISTTTMKNSSEVPQKAENRATVRSSNSTARYIPKIKEIDISKRYLHSHFAALFTIAKICKQPKHPSTDEWIKKMWYIRTVEYYSAIRKNAICHLQQHGWNWRHRRRNNRNHPGEEREKQKTRMKVVRGSPTSRSSSPWPIGKWVVQQEEKVLGDVATKLATILNTRVEMAQVQ

SEQ ID NO: 40467 - protein, 44 aa, Artificial Sequence
  Synthetic polypeptide
LVLCIRFLSWNHLVCLCSLVQRSRTGITMQKYKLLDIGYRKTFP

SEQ ID NO: 40468 - protein, 57 aa, Artificial Sequence
  Synthetic polypeptide
NWDFLLFSVAQNKLYMGSGTIKVLEKFTRFFVKLEEQYLVLFTCLTLGIGGKLSVKL

SEQ ID NO: 40469 - protein, 53 aa, Artificial Sequence; identical to SEQ ID NO: 26257
  Synthetic polypeptide

SEQ ID NO: 40470 - protein, 28 aa, Artificial Sequence
  Synthetic polypeptide
LDAAGTSGPQDYLQQLHPQPSQTQVPLS

SEQ ID NO: 40471 - protein, 74 aa, Artificial Sequence; identical to SEQ ID NO: 26495
  Synthetic polypeptide

SEQ ID NO: 40472 - protein, 92 aa, Artificial Sequence
  Synthetic polypeptide
GQEFETRLANMVKPPSLLKIEKISQVWWCVPISPTTREAEARELLEPGRRRGVTAHRPRPGQLDASPTPGPGANRRPGALGPAAAALLPGAV

SEQ ID NO: 40473 - protein, 50 aa, Artificial Sequence
  Synthetic polypeptide
GCAECALLTTCLQAVCLYSGRWITPSNRVTPRRVSQSRTARTAPTASAAP

SEQ ID NO: 40474 - protein, 181 aa, Artificial Sequence
  Synthetic polypeptide
WTLRPHPDLLKQNLHFMRSSAALQALKRKKRYEKQLAQIDGTLSTIEFQREALENANTNTEVLKNMGYAAKAMKAAHDNMDIDKVDELMQDIADQQELAEEISTAISKPVGFGEEFDEDELMAELEELEQEELDKNLLEISGPETVPLPNVPSIALPSKPAKKKEEEDDDMKELENWAGSM

SEQ ID NO: 40475 - protein, 40 aa, Artificial Sequence
  Synthetic polypeptide
WKAEATQTSSPGSTAYSATATQRPTPMRSIHPSRTRGLLN

SEQ ID NO: 40476 - protein, 42 aa, Artificial Sequence
  Synthetic polypeptide
WKAEATQTSSPGSTAYSATATQRPTPMRSIHPSRTRGLLNRA

SEQ ID NO: 40477 - protein, 528 aa, Artificial Sequence
  Synthetic polypeptide
ASRIASLSLSFHICHMEARLLVPSSPKSYLEGPLAMALFGALFLALLAGAHAEFPGCKIRVTSKALELVKQEGLRFLEQELETITIPDLRGKEGHFYYNISEVKVTELQLTSSELDFQPQQELMLQITNASLGLRFRRQLLYWFFYDGGYINASAEGVSIRTGLELSRDPAGRMKVSNVSCQASVSRMHAAFGGTFKKVYDFLSTFITSGMRFLLNQQICPVLYHAGTVLLNSLLDTVPVRSSVDELVGIDYSLMKDPVASTSNLDMDFRGAFFPLTERNWSLPNRAVEPQLQEEERMVYVAFSEFFFDSAMESYFRAGALQLLLVGDKVPHDLDMLLRATYFGSIVLLSPAVIDSPLKLELRVLAPPRCTIKPSGTTISVTASVTIALVPPDQPEVQLSSMTMDARLSAKMALRGKALRTQLDLRRFRIYSNHSALESLALIPLQAPLKTMLQIGVMPMLNERTWRGVQIPLPEGINFVHEVVTNHAGFLTIGADLHFAKGLREVIEKNRPADVRASTAPTPSTAAV

SEQ ID NO: 40478 - protein, 55 aa, Artificial Sequence; identical to SEQ ID NO: 27750
  Synthetic polypeptide

SEQ ID NO: 40479 - protein, 69 aa, Artificial Sequence; identical to SEQ ID NO: 27998
  Synthetic polypeptide

SEQ ID NO: 40480 - protein, 117 aa, Artificial Sequence
  Synthetic polypeptide
VAHDLVRISMILQRLFRFSSVIRSAVSVHLRRNIGVTAVAFNKELDPIQKLFVDKIREYKSKRQTSGGPVDASSEYQQELERELFKLKQMFGNADMNTFPTFKFEDPKFEVIEKPQA

SEQ ID NO: 40481 - protein, 119 aa, Artificial Sequence; identical to SEQ ID NO: 28103
  Synthetic polypeptide

SEQ ID NO: 40482 - protein, 46 aa, Artificial Sequence
  Synthetic polypeptide
GLKWSCGATLGSLRVAAAPSSASPSPGSVTAGRLARMRATKPTVQK

SEQ ID NO: 40483 - protein, 31 aa, Artificial Sequence; identical to SEQ ID NO: 28853
  Synthetic polypeptide

SEQ ID NO: 40484 - protein, 45 aa, Artificial Sequence
  Synthetic polypeptide
IVTFGSSEMQGHTMGFWLTKLNYLCHLSMLTDSLFLPISHCQCIL

SEQ ID NO: 40485 - protein, 56 aa, Artificial Sequence; identical to SEQ ID NO: 29749
  Synthetic polypeptide

SEQ ID NO: 40486 - protein, 47 aa, Artificial Sequence; identical to SEQ ID NO: 30659
  Synthetic polypeptide

SEQ ID NO: 40487 - protein, 87 aa, Artificial Sequence
  Synthetic polypeptide
AVDRILNRPHLQVLVYWLRELTTDAAIRYAVNGKFVGRLFAGLFCGDVHTVCIHQPGVVERADSPWGSTNLVGACCPTVQCCGASPK

SEQ ID NO: 40488 - protein, 21 aa, Artificial Sequence
  Synthetic polypeptide
SQIRAKRNLQAQAQPTLRPPK

SEQ ID NO: 40489 - protein, 51 aa, Artificial Sequence
  Synthetic polypeptide
TCASWGQWCGRHGLRRRRRPSQEEEAAAATYALHKPAVARARGHVPEEPLP

SEQ ID NO: 40490 - protein, 68 aa, Artificial Sequence
  Synthetic polypeptide
TCASWGQWCGRHGLRRRRRPSQEEEAAAATYALHKPAVARARGHVPEEPLPRHEHEGGDRRVDQPHRA

SEQ ID NO: 40491 - protein, 82 aa, Artificial Sequence
  Synthetic polypeptide
TCASWGQWCGRHGLRRRRRPSQEEEAAAATYALHKPAVARARGHVPEEPLPRHEHEGGDRRVDQPHRAARAGLVQEPASQVA

SEQ ID NO: 40492 - protein, 78 aa, Artificial Sequence
  Synthetic polypeptide
RCKLWQSAASLGLGFCIYKMRARRWDEENQCSLSSESFYGIGTTRWTWNPSLGRQLSLPRQPLNLRWEDITAMSVTVW

SEQ ID NO: 40493 - protein, 202 aa, Artificial Sequence
  Synthetic polypeptide
PVATSTLSGPHDTDALPGPAPGCRCHDAAGLAPRTCRIPGLCGEGTRAAPGPVEEGCGLPAEGHHAHHVVRRRLPPGGREGAAGAAHRGGHPHARASLVLLRRHPCDHDDVLHRDEGREQRHPDLGNSDPVYTACVRVPVRPGFSQENSRRNQETGAVQRKVATDNDFSRRNLYKQDLPNYLQTWCIHPWSARPACGFTISK

SEQ ID NO: 40494 - protein, 54 aa, Artificial Sequence; identical to SEQ ID NO: 32601
  Synthetic polypeptide

SEQ ID NO: 40495 - protein, 58 aa, Artificial Sequence
  Synthetic polypeptide
HVLAPTAIAEHAGSPKPLRKREPETWQANKKFEVVSTSYRRRIKNSCRETTKRENQKR

SEQ ID NO: 40496 - protein, 19 aa, Artificial Sequence
  Synthetic polypeptide
MGLSSCKNKLRDPTDSTLR

SEQ ID NO: 40497 - protein, 160 aa, Artificial Sequence
  Synthetic polypeptide
NSEESRLHPTLQSWMAPPTCSFLPAFRLPAARPSSSCFATRGRPRTHRARGVGRVRGSCGLDQPQPGPVGVGTFPSWPLPGSLGLGPGSLAASSSPSADRVVALPARHTSAPTSPRAHGPPMLAHPAAGCTLGLCTGMGSSWGTTRTLGSGAPPARGSRT

SEQ ID NO: 40498 - protein, 56 aa, Artificial Sequence
  Synthetic polypeptide
SQLLGRLRQENHLNLGGGGCSELRSHHCTPAWATEAMYSKMQSSIKQLQLLKERMG

SEQ ID NO: 40499 - protein, 44 aa, Artificial Sequence; identical to SEQ ID NO: 34360
  Synthetic polypeptide

SEQ ID NO: 40500 - protein, 42 aa, Artificial Sequence; identical to SEQ ID NO: 34363
  Synthetic polypeptide

SEQ ID NO: 40501 - protein, 36 aa, Artificial Sequence
  Synthetic polypeptide
SEPRSRHCTPAWVTGDIISAFHPFLFMDILLVERPM

SEQ ID NO: 40502 - protein, 18 aa, Artificial Sequence
  Synthetic polypeptide
RAVFSLRPIPRLNSLTRP

SEQ ID NO: 40503 - protein, 26 aa, Artificial Sequence
  Synthetic polypeptide
NMYYTMASLWRWSIQLWGRFPSQAQL

SEQ ID NO: 40504 - protein, 35 aa, Artificial Sequence
  Synthetic polypeptide
NPVSTKTTTFSRDMDIFQQQISRRQLAKILICPES

SEQ ID NO: 40505 - protein, 57 aa, Artificial Sequence
  Synthetic polypeptide
QYIRLKNAGSGARLPGRLLNQSPSVVSVLVQKNKTEKRSQRNSSPVPTVATVAIHPV

SEQ ID NO: 40506 - protein, 27 aa, Artificial Sequence
  Synthetic polypeptide
GRSEAAAAARERYSVSATSVQKTILLV

SEQ ID NO: 40507 - protein, 31 aa, Artificial Sequence; identical to SEQ ID NO: 37585
  Synthetic polypeptide

SEQ ID NO: 40508 - protein, 54 aa, Artificial Sequence; identical to SEQ ID NO: 38005
  Synthetic polypeptide

SEQ ID NO: 40509 - protein, 35 aa, Artificial Sequence
  Synthetic polypeptide
VTLVCIYVGSSVKIKAMIVQHTEISSKLSMSCHIM

SEQ ID NO: 40510 - protein, 904 aa, Artificial Sequence
  Synthetic polypeptide
MRPFFLLCFALPGLLHAQQACSRGACYPPVGDLLVGRTRFLRASSTCGLTKPETYCTQYGEWQMKCCKCDSRQPHNYYSHRVENVASSSGPMRWWQSQNDVNPVSLQLDLDRRFQLQEVMMEFQGPMPAGMLIERSSDFGKTWRVYQYLAADCTSTFPRVRQGRPQSWQDVRCQSLPQRPNARLNGGKVQLNLMDLVSGIPATQSQKIQEVGEITNLRVNFTRLAPVPQRGYHPPSAYYAVSQLRLQGSCFCHGHADRCAPKPGASAGPSTAVQVHDVCVCQHNTAGPNCERCAPFYNNRPWRPAEGQDAHECQRCDCNGHSETCHFDPAVFAASQGAYGGVCDNCRDHTEGKNCERCQLHYFRNRRPGASIQETCISCECDPDGAVPGAPCDPVTGQCVCKEHVQGERCDLCKPGFTGLTYANPQGCHRCDCNILGSRRDMPCDEESGRCLCLPNVVGPKCDQCAPYHWKLASGQGCEPCACDPHNSLSPQCNQFTGQCPCREGFGGLMCSAAAIRQCPDRTYGDVATGCRACDCDFRGTEGPGCDKASGRCLCRPGLTGPRCDQCQRGYCNRYPVCVACHPCFQTYDADLREQALRFGRLRNATASLWSGPGLEDRGLASRILDAKSKIEQIRAVLSSPAVTEQEVAQVASAILSLRRTLQGLQLDLPLEEETLSLPRDLESLDRSFNGLLTMYQRKREQFEKISSADPSGAFRMLSTAYEQSAQAAQQVSDSSRLLDQLRDSRREAERLVRQAGGGGGTGSPKLVALRLEMSSLPDLTPTFNKLCGNSRQMACTPISCPGELCPQDNGTACGSRCRGVLPRAGGAFLMAGQVAEQLRGFNAQLQRTRQMIRAAEESASQIQSSAQRLETQVSASRSQMEEDVRRTRLLIQQVRDFLTVNIY

SEQ ID NO: 40511 - protein, 286 aa, Artificial Sequence
  Synthetic polypeptide
MALEGMSKRKRKRSVQEGENPDDGVRGSPPEDYRLGQVASSLFRGEHHSRGGTGRLASLFSSLEPQIQPVYVPVPKQTIKKTKRNEEEESTSQIERPLSQEPAKKVKAKKKHTNAEKKLADRESALASADLEEEIHQKQGQKRKNSQPGVKVADRKILDDTEDTVVSQRKKIQINQEEERLKNERTVFVGNLPVTCNKKKLKSFFKEYGQIESVRFRSLIPAEGTLSKKLAAIKRKIHPDQKNINAYVVFKEESAATQALKRNGAQIADGFRIRVDLASETSSKKL

SEQ ID NO: 40512 - protein, 264 aa, Artificial Sequence
  Synthetic polypeptide
MEGMSKRKRKRSVQEGENPDDGVRGSPPEDYRLGQVASSLFRGEHHSRGGTGRLASLFSSLEPQIQPVYVPVPKQTIKKTKRNEEEESTSQIERPLSQEPAKKVKAKKKHTNAEKKLADRESALASADLEEEIHQKQGQKRKNSQPGVKVADRKILDDTEDTVVSQRKKIQINQEEERLKNERTVFVGNLPVTCNKKIPAEGTLSKKLAAIKRKIHPDQKNINAYVVFKEESAATQALKRNGAQIADGFRIRVDLASETSSKKL

SEQ ID NO: 40513 - protein, 281 aa, Artificial Sequence
  Synthetic polypeptide
MSKRKRKRSVQEGENPDDGVRGSPPEDYRLGQVASSLFRGEHHSRGGTGRLASLFSSLEPQIQPVYVPVPKQTIKKTKRNEEEESTSQIERPLSQEPAKKVKAKKKHTNAEKKLADRESALASADLEEEIHQKQGQKRKNSQPGVKVADRKILDDTEDTVVSQRKKIQINQEEERLKNERTVFVGNLPVTCNKKKLKSFFKEYGQIESVRFRSLIPAEGTLSKKLAAIKRKIHPDQKNINAYVVFKEESAATQALKRNGAQIADGFRIRVDLASETSSKKL

SEQ ID NO: 40514 - protein, 185 aa, Artificial Sequence
  Synthetic polypeptide
MEPLKVEKFATAKRGNGLRAVTPLRPGELLFRSDPLAYTVCKGSRGVVCDRCLLGKEKLMRCSQCRVAKYCSAKCQKKAWPDHKRECKCLKSCKPRYPPDSVRLLGRVVFKLMDGAPSESEKLYSFYDLESNINKLTEDKKEGLRQLVMTFQHFMREEIQDASQLPPAFDLFEAFAKAGHCGSRL

SEQ ID NO: 40515 - protein, 126 aa, Artificial Sequence
  Synthetic polypeptide
MRCSQCRVAKYCSAKCQKKAWPDHKRECKCLKSCKPRYPPDSVRLLGRVVFKLMDGAPSESEKLYSFYDLESNINKLTEDKKEGLRQLVMTFQHFMREEIQDASQLPPAFDLFEAFAKAGHCGSRL

SEQ ID NO: 40516 - protein, 200 aa, Artificial Sequence
  Synthetic polypeptide
MAAVHDLEMESMNLNMGREMKEELEEEEKMREDGGGKDRAKSKKVHRIVSKWMLPEKSRGTYLERANCFPPPVFIISISLAELAVFIYYAVWKPQKQWITLDTGILESPFIYSPEKREEAWRFISYMLVHAGVQHILGNLCMQLVLGIPLEMVHKGLRVGLVYLAGVIADPSLQTHKQQDVERNTSTEDDRTDASTPAGH

SEQ ID NO: 40517 - protein, 280 aa, Artificial Sequence
  Synthetic polypeptide
MQLGKRHKLTTKSVCHGKGVVIRVLALPGPSWVRRRREGKALESSRCARQPREERQPEDLGPPAVPWDSCPSGEEGGPRTMAAVHDLEMESMNLNMGREMKEELEEEEKMREDGGGKDRAKSKKVHRIVSKWMLPEKSRGTYLERANCFPPPVFIISISLAELAVFIYYAVWKPQKQWITLDTGILESPFIYSPEKREEAWRFISYMLVHAGVQHILGNLCMQLVLGIPLEMVHKGLRVGLVYLAGVIADPSLQTHKQQDVERNTSTEDDRTDASTPAGH

SEQ ID NO: 40518 - protein, 267 aa, Artificial Sequence
  Synthetic polypeptide
MTTTYMLSKNPLEVFDICRFNTCNFGKALESSRCARQPREERQPEDLGPPAVPWDSCPSGEEGGPRTMAAVHDLEMESMNLNMGREMKEELEEEEKMREDGGGKDRAKSKKVHRIVSKWMLPEKSRGTYLERANCFPPPVFIISISLAELAVFIYYAVWKPQKQWITLDTGILESPFIYSPEKREEAWRFISYMLVHAGVQHILGNLCMQLVLGIPLEMVHKGLRVGLVYLAGVIADPSLQTHKQQDVERNTSTEDDRTDASTPAGH

SEQ ID NO: 40519 - protein, 301 aa, Artificial Sequence
  Synthetic polypeptide
MATTKRVLYVGGLAEEVDDKVLHAAFIPFGDITDIQIPLDYETEKHRGFAFVEFELAEDAAAAIDNMNESELFGRTIRVNLAKPMRIKEGSSRPVWSDDDWLKKFSGKTLEENKEEEGSEPPKAETQEGEPIAKKARSNPQVYMDIKIGNKPAGRIQMLLRSDVVPMTAENFRCLCTHEKGFGFKGSSFHRIIPQFMCQGGDFTNHNGTGGKSIYGKKFDDENFILKHTGPGLLSMANSGPNTNGSQFFLTCDKTDWLDGKHVVFGEVTEGLDVLRQIETCGSCSPRHFCTWGLMGPQRNM

SEQ ID NO: 40520 - protein, 250 aa, Artificial Sequence
  Synthetic polypeptide
MATTKRVLYVGGLAEEVDDKVLHAAFIPFGDITDIQIPLDYETVWSDDDWLKKFSGKTLEENKEEEGSEPPKAETQEGEPIAKKARSNPQVYMDIKIGNKPAGRIQMLLRSDVVPMTAENFRCLCTHEKGFGFKGSSFHRIIPQFMCQGGDFTNHNGTGGKSIYGKKFDDENFILKHTGPGLLSMANSGPNTNGSQFFLTCDKTDWLDGKHVVFGEVTEGLDVLRQIETCGSCSPRHFCTWGLMGPQRNM

SEQ ID NO: 40521 - protein, 235 aa, Artificial Sequence
  Synthetic polypeptide
MNESELFGRTIRVNLAKPMRIKEGSSRPVWSDDDWLKKFSGKTLEENKEEEGSEPPKAETQEGEPIAKKARSNPQVYMDIKIGNKPAGRIQMLLRSDVVPMTAENFRCLCTHEKGFGFKGSSFHRIIPQFMCQGGDFTNHNGTGGKSIYGKKFDDENFILKHTGPGLLSMANSGPNTNGSQFFLTCDKTDWLDGKHVVFGEVTEGLDVLRQIETCGSCSPRHFCTWGLMGPQRNM

SEQ ID NO: 40522 - protein, 361 aa, Artificial Sequence
  Synthetic polypeptide
MAPEPAPGRTMVPLVPALVMLGLVAGAHGDSKPVFIKVPEDQTGLSGGVASFVCQATGEPKPRITWMKKGKKVSSQRFEVIEFDDGAGSVLRIQPLRVQRDEAIYECTATNSLGEINTSAKLSVLEEEQLPPGFPSIDMGPQLKVVEKARTATMLCAAGGNPDPEISWFKDFLPVDPATSNGRIKQLRSGALQIESSEESDQGKYECVATNSAGTRYSAPANLYVRVRRVAPRFSIPPSSQEVMPGGSVNLTCVAVGAPMPYVKWMMGAEELTKEDEMPVGRNVLELSNVVRSANYTCVAISSLGMIEATAQVTVKGLSLVMLSFPHHRIQGDSLDLTPPQHPDSCCPCTWQNHEYDRLVY

SEQ ID NO: 40523 - protein, 30 aa, Artificial Sequence
  Synthetic polypeptide
MASAELDYTIEIPDQPCWSQMVNSAVSAVG

SEQ ID NO: 40524 - protein, 557 aa, Artificial Sequence
  Synthetic polypeptide
MASNMDREMILADFQACTGIENIDEAITLLEQNNWDLVAAINGVIPQENGILQSEYGGETIPGPAFNPASHPASAPTSSSSSAFRPVMPSRQIVERQPRMLDFRVEYRDRNVDVVLEDTCTVGEIKQILENELQIPVSKMLLKGWKTGDVEDSTVLKSLHLPKNNSLYVLTPDLPPPSSSSHAGALQESLNQNFMLIITHREVQREYNLNFSGSSTIQEVKRNVYDLTSIPVRHQLWEGWPTSATDDSMCLAESGLSYPCHRLTVGRRSSPAQTREQSEEQITDVHMVSDSDGDDFEDATEFGVDDGEVFGMASSALRKSPMMPENAENEGDALLQFTAEFSSRYGDCHPVFFIGSLEAAFQEAFYVKARDRKLLAIYLHHDESVLTNVFCSQMLCAESIVSYLSQNFITWAWDLTKDSNRARFLTMCNRHFGSVVAQTIRTQKTDQFPLFLIIMGKRSSNEVLNVIQGNTTVDELMMRLMAAMEIFTAQQQEDIKDEDEREARENVKREQDEAYRLSLEADRAKREAHEREMAEQFRLEQIRKEQEEEREEGPAGK

SEQ ID NO: 40525 - protein, 363 aa, Artificial Sequence
  Synthetic polypeptide
MLIITHREVQREYNLNFSGSSTIQEVKRNVYDLTSIPVRHQLWEGWPTSATDDSMCLAESGLSYPCHRLTVGRRSSPAQTREQSEEQITDVHMVSDSDGDDFEDATEFGVDDGEVFGMASSALRKSPMMPENAENEGDALLQFTAEFSSRYGDCHPVFFIGSLEAAFQEAFYVKARDRKLLAIYLHHDESVLTNVFCSQMLCAESIVSYLSQNFITWAWDLTKDSNRARFLTMCNRHFGSVVAQTIRTQKTDQFPLFLIIMGKRSSNEVLNVIQGNTTVDELMMRLMAAMEIFTAQQQEDIKDEDEREARENVKREQDEAYRLSLEADRAKREAHEREMAEQFRLEQIRKEQEEEREEGPAGK

SEQ ID NO: 40526 - protein, 315 aa, Artificial Sequence
  Synthetic polypeptide
MRNLLEMCLAESGLSYPCHRLTVGRRSSPAQTREQSEEQITDVHMVSDSDGDDFEDATEFGVDDGEVFGMASSALRKSPMMPENAENEGDALLQFTAEFSSRYGDCHPVFFIGSLEAAFQEAFYVKARDRKLLAIYLHHDESVLTNVFCSQMLCAESIVSYLSQNFITWAWDLTKDSNRARFLTMCNRHFGSVVAQTIRTQKTDQFPLFLIIMGKRSSNEVLNVIQGNTTVDELMMRLMAAMEIFTAQQQEDIKDEDEREARENVKREQDEAYRLSLEADRAKREAHEREMAEQFRLEQIRKEQEEEREEGPAGK

SEQ ID NO: 40527 - protein, 259 aa, Artificial Sequence
  Synthetic polypeptide
MSQISEALSRYRNRSCFVKEALHRLFTETFSMEVTMPAILKLVAIGMRNHPLDLRVQFTASACALNLTRQGLAKGMPVRLLSEVTCLLFKALKNFPHYQQLQKNCLLSLTNSRILVDVPFDRFDAAKFVMRWLCKHENPKMQTMAVSVTSILALQLSPEQTAQLEELFMAVKELLAIVKQKTTENLDDVTFLFTLKALWNLTDGSPAACKHFIENQGLQIFIQVLETFSESAIQSKVLGLLAHCRDSFSLALKEQTVMK

SEQ ID NO: 40528 - protein, 601 aa, Artificial Sequence
  Synthetic polypeptide
MVHFLHPGHTPRNIVPPDAQKDALGCCVVQEEASPYTLVNICLNVLIANLEKLCSERPDGTLCLPEHWSFPQEVAERFLRVMTWQGKLTDRTASIFRGNQMKLKLVNIQKAKISTAAFIKAFCRHKLIELNATAVHADLPVPDIISGLCSNRWIQQNLQCLLLDSTSIPQNSRLLFFSQLTGLRILSVFNVCFHTEDLANVSQLPRLESLDISNTLVTDISALLTCKDRLKSLTMHYLKCLAMTKSQILAVIRELKCLLHLDISDHRQLKSDLAFHLLQQKDILPNVVSLDISGGNCITDEAVELFIRLRPAMQFVGLLATDAGSSDFFTTKQGLRVAGGASMSQISEALSRYRNRSCFVKEALHRLFTETFSMEVTMPAILKLVAIGMRNHPLDLRVQFTASACALNLTRQGLAKGMPVRLLSEVTCLLFKALKNFPHYQQLQKNCLLSLTNSRILVDVPFDRFDAAKFVMRWLCKHENPKMQTMAVSVTSILALQLSPEQTAQLEELFMAVKELLAIVKQKTTENLDDVTFLFTLKALWNLTDGSPAACKHFIENQGLQIFIQVLETFSESAIQSKVLGLLAHCRDSFSLALKEQTVMK

SEQ ID NO: 40529 - protein, 264 aa, Artificial Sequence
  Synthetic polypeptide
MARFPKADLAAAGVMLLCHFFTDQFQFADGKPGDQILDWQYGVTQAFPHTEEEVEVDSHAYSHRWKRNLDFLKAVDTNRASVGQDSPEPRSFTDLLLDDGQDNNTQIEEDTDHNYYISRIYGPSDSASRDLWVNIDQMEKDKVKIHGILSNTHRQAARVNLSFDFPFYGHFLREITVATGGFIYTGEVVHRMLTATQYIAPLMANFDPSVSRNSTVRYFDNGTALVVQWDHVHLQDNYNLGSFTFQATLLMDGRIIFGYKEDWS

SEQ ID NO: 40530 - protein, 215 aa, Artificial Sequence
  Synthetic polypeptide
MARFPKADLAAAGVMLLCHFFTDQFQFADGKPGDQILDWQYGVTQAFPHTEEEVEVDSHAYSHRWKRNLDFLKAVDTNRASVGQDSPEPRSFTDLLLDDGQDNNTQIERVNLSFDFPFYGHFLREITVATGGFIYTGEVVHRMLTATQYIAPLMANFDPSVSRNSTVRYFDNGTALVVQWDHVHLQDNYNLGSFTFQATLLMDGRIIFGYKEDWS

SEQ ID NO: 40531 - protein, 89 aa, Artificial Sequence
  Synthetic polypeptide
IYLNVESVCTHRERSEDAKKGPNPLMRRNSVTPLASPEPTKKPRINSFEEHVASTSAALPSCLPPEVPTQLPGQKWNDWSSSSHLVPMR

SEQ ID NO: 40532 - protein, 534 aa, Artificial Sequence
  Synthetic polypeptide
MGEGGQKEGDSQQAGALPLLCQLDTFSPKATVFGVSINPACGPKLTNSPTVIVMVGLPARGKTYISKKLTRYLNWIGVPTKVFNVGEYRREAVKQYSSYNFFRPDNEEAMKVRKQCALAALRDVKSYLAKEGGQIAVFDATNTTRERRHMILHFAKENDFKAFFIESVCDDPTVVASNIMEVKISSPDYKDCNSAEAMDDFMKRISCYEASYQPLDPDKCDRDLSLIKVIDVGRRFLVNRVQDHIQSRIVYYLMNIHVQPRTIYLCRHGENEHNLQGRIGGDSGLSSRGKKFASALSKFVEEQNLKDLRVWTSQLKSTIQTAEALRLPYEQWKALNEIDAGVCEELTYEEIRDTYPEEYALREQDKYYYRYPTGESYQDLVQRLEPVIMELERQENVLVICHQAVLRCLLAYFLDKSAEEMPYLKCPLHTVLKLTPVAYGCRVESIYLNVESVCTHRERSEDAKKGPNPLMRRNSVTPLASPEPTKKPRINSFEEHVASTSAALPSCLPPEVPTQLPGQKWNDWSSSSHLVPMR

SEQ ID NO: 40533 - protein, 500 aa, Artificial Sequence
  Synthetic polypeptide
MPFRKACGPKLTNSPTVIVMVGLPARGKTYISKKLTRYLNWIGVPTKVFNVGEYRREAVKQYSSYNFFRPDNEEAMKVRKQCALAALRDVKSYLAKEGGQIAVFDATNTTRERRHMILHFAKENDFKAFFIESVCDDPTVVASNIMEVKISSPDYKDCNSAEAMDDFMKRISCYEASYQPLDPDKCDRDLSLIKVIDVGRRFLVNRVQDHIQSRIVYYLMNIHVQPRTIYLCRHGENEHNLQGRIGGDSGLSSRGKKFASALSKFVEEQNLKDLRVWTSQLKSTIQTAEALRLPYEQWKALNEIDAGVCEELTYEEIRDTYPEEYALREQDKYYYRYPTGESYQDLVQRLEPVIMELERQENVLVICHQAVLRCLLAYFLDKSAEEMPYLKCPLHTVLKLTPVAYGCRVESIYLNVESVCTHRERSEDAKKGPNPLMRRNSVTPLASPEPTKKPRINSFEEHVASTSAALPSCLPPEVPTQLPGQKWNDWSSSSHLVPMR

SEQ ID NO: 40534 - protein, 520 aa, Artificial Sequence
  Synthetic polypeptide
MPLELTQSRVQKIWVPVDHRPSLPRSCGPKLTNSPTVIVMVGLPARGKTYISKKLTRYLNWIGVPTKVFNVGEYRREAVKQYSSYNFFRPDNEEAMKVRKQCALAALRDVKSYLAKEGGQIAVFDATNTTRERRHMILHFAKENDFKAFFIESVCDDPTVVASNIMEVKISSPDYKDCNSAEAMDDFMKRISCYEASYQPLDPDKCDRDLSLIKVIDVGRRFLVNRVQDHIQSRIVYYLMNIHVQPRTIYLCRHGENEHNLQGRIGGDSGLSSRGKKFASALSKFVEEQNLKDLRVWTSQLKSTIQTAEALRLPYEQWKALNEIDAGVCEELTYEEIRDTYPEEYALREQDKYYYRYPTGESYQDLVQRLEPVIMELERQENVLVICHQAVLRCLLAYFLDKSAEEMPYLKCPLHTVLKLTPVAYGCRVESIYLNVESVCTHRERSEDAKKGPNPLMRRNSVTPLASPEPTKKPRINSFEEHVASTSAALPSCLPPEVPTQLPGQKWNDWSSSSHLVPMR

SEQ ID NO: 40535 - protein, 755 aa, Artificial Sequence
  Synthetic polypeptide
MNVNQSVPPVPPFGQPQPIYPGYHQSSYGGQSGSTAPAIPYGAYNGPVPGYQQTPPQGMSRAPPSSGAPPASTAQAPCGQAAYGQFGQGDVQNGPSSTVQMQRLPGSQPFGSPLAPVGNQPPVLQPYGPPPTSAQVATQLSGMQISGAVAPAPPSSGLGFGPPTSLASASGSFPNSGLYGSYPQGQAPPLSQAQGHPGIQTPQRSAPSQASSFTPPASGGPRLPSMTGPLLPGQSFGGPSVSQPNHVSSPPQALPPGTQMTGPLGPLPPMHSPQQPGYQPQQNGSFGPARGPQSNYGGPYPAAPTFGSQPGPPQPLPPKRLDPDAIPSPIQVIEDDRNNRGTEPFVTGVRGQVPPLVTTNFLVKDQGNASPRYIRCTSYNIPCTSDMAKQAQVPLAAVIKPLARLPPEEASPYVVDHGESGPLRCNRCKAYMCPFMQFIEGGRRFQCCFCSCINDVPPQYFQHLDHTGKRVDAYDRPELSLGSYEFLATVDYCKNNKFPSPPAFIFMIDVSYNAIRTGLVRLLCEELKSLLDFLPREGGAEESAIRVGFVTYNKVLHFYNVKSSLAQPQMMVVSDVADMFVPLLDGFLVNVNESRAVITSLLDQIPEMFADTRETETVFVPVIQAGMEALKAAECAGKLFLFHTSLPIAEAPGKLKNRDDRKLINTDKEKTLFQPQTGAYQTLAKECVAQGCCVDLFLFPNQYVDVATLSVVPQLTGGSVYKYASFQVEVVVSRDCATALQPERQSKTPSPKKKK

SEQ ID NO: 40536 - protein, 636 aa, Artificial Sequence
  Synthetic polypeptide
MQISGAVAPAPPSSGLGFGPPTSLASASGSFPNSGLYGSYPQGQAPPLSQAQGHPGIQTPQRSAPSQASSFTPPASGGPRLPSMTGPLLPGQSFGGPSVSQPNHVSSPPQALPPGTQMTGPLGPLPPMHSPQQPGYQPQQNGSFGPARGPQSNYGGPYPAAPTFGSQPGPPQPLPPKRLDPDAIPSPQLSELPPQQKTRHRIDPDAIPSPIQVIEDDRNNRGTEPFVTGVRGQVPPLVTTNFLVKDQGNASPRYIRCTSYNIPCTSDMAKQAQVPLAAVIKPLARLPPEEASPYVVDHGESGPLRCNRCKAYMCPFMQFIEGGRRFQCCFCSCINDVPPQYFQHLDHTGKRVDAYDRPELSLGSYEFLATVDYCKNNKFPSPPAFIFMIDVSYNAIRTGLVRLLCEELKSLLDFLPREGGAEESAIRVGFVTYNKVLHFYNVKSSLAQPQMMVVSDVADMFVPLLDGFLVNVNESRAVITSLLDQIPEMFADTRETETVFVPVIQAGMEALKAAECAGKLFLFHTSLPIAEAPGKLKNRDDRKLINTDKEKTLFQPQTGAYQTLAKECVAQGCCVDLFLFPNQYVDVATLSVVPQLTGGSVYKYASFQVEVVVSRDCATALQPERQSKTPSPKKKK

SEQ ID NO: 40537 - protein, 86 aa, Artificial Sequence
  Synthetic polypeptide
MTAIIKEIVSRNKRRYQEDGFDLDLTYIYPNIIAMGFPAERLEGVYRNNIDDVVRFLDSKHKNHYKIYNLCAERHYDTAKFNCRDI

SEQ ID NO: 40538 - protein, 47 aa, Artificial Sequence
  Synthetic polypeptide
MATQRKHLVKDFNPYITCYICKGYLIKPTTVTECLHTLNKSHEIWWF

SEQ ID NO: 40539 - protein, 37 aa, Artificial Sequence
  Synthetic polypeptide
VAAVTERTDLCSGVCLLTSPQLSYDPATSPSPRNTQE

SEQ ID NO: 40540 - protein, 38 aa, Artificial Sequence
  Synthetic polypeptide
MSLSFLNDEEARKILQVLERNEELQRAEKDRIRNRKTT

SEQ ID NO: 40541 - protein, 45 aa, Artificial Sequence
  Synthetic polypeptide
MTKVPPAFDFSFLNDEEARKILQVLERNEELQRAEKDRIRNRKTT

SEQ ID NO: 40542 - protein, 20 aa, Artificial Sequence
  Synthetic polypeptide
MPKPWTKYLSRYFTKEAILK

SEQ ID NO: 40543 - protein, 143 aa, Artificial Sequence
  Synthetic polypeptide
MSTEGGGRRCQAQVSRRISFSASHRLYSKFLSDEENLKLFGKCNNPNGHGHNYKVVVTVHGEIDPATGMVMNLADLKKYMEEAIMQPLDHKNLDMDVPYFADVVSTIYNSKDLEPTQMPINDRLDKKNVAHIHHGILCGHKKE

SEQ ID NO: 40544 - protein, 75 aa, Artificial Sequence
  Synthetic polypeptide
MVMNLADLKKYMEEAIMQPLDHKNLDMDVPYFADVVSTIYNSKDLEPTQMPINDRLDKKNVAHIHHGILCGHKKE

SEQ ID NO: 40545 - protein, 80 aa, Artificial Sequence
  Synthetic polypeptide
METESESSTLGDDSVFWLESEVIIQVTDCEEEEREEKFRKMKSSVHSEEDDFVPELHRNVHPRERPDWEETLSAMSFAAI

SEQ ID NO: 40546 - protein, 40 aa, Artificial Sequence
  Synthetic polypeptide
MKSSVHSEEDDFVPELHRNVHPRERPDWEETLSAMSFAAI

SEQ ID NO: 40547 - protein, 6 aa, Artificial Sequence
  Synthetic polypeptide
MSFAAI

SEQ ID NO: 40548 - protein, 250 aa, Artificial Sequence
  Synthetic polypeptide
MPGCPCPGCGMAGPRLLFLTALALELLERAGGSQPALRSRGTATACRLDNKESESWGALLSGERLDTWICSLLGSLMVGLSGVFPLLVIPLEMGTMLRSEAGAWRLKQLLSFALGGLLGNVFLHLLPEAWAYTCSASPGGEGQSLQQQQQLGLWVIAGILTFLALEKMFLDSKEEGTSQAPNKDPTAAAAALNGGHCLAQPAAEPGLGAVVRSIKVSGYLNLLANTIDNFTHGLAVAASFLVSKKVPCPL

SEQ ID NO: 40549 - protein, 214 aa, Artificial Sequence
  Synthetic polypeptide
MPGCPCPGCGMAGPRLLFLTALALELLERAGGSQPALRSRGTATACRLDNKESESWGALLSGERLDTWICSLLGSLMVGLSGVFPLLVIPLEMGTMLRSEAGAWRLKQLLSFALGGLLGNVFLHLLPEAWAYTCSASPGGEGQSLQQQQQLGLWVIAGILTFLALEKMFLDSKEEGTSQVSGYLNLLANTIDNFTHGLAVAASFLVSKKVPCPL

SEQ ID NO: 40550 - protein, 132 aa, Artificial Sequence
  Synthetic polypeptide
MEGTAVAVFEILRFLIIHWKCDIDVSKGALLEGQLVISIEGLNSKHQANALHCVTTRWSLTLLPRPECSGAVSAHCNLHLPGSSDSHASVPRVAGITDAHHHAWLIMVASAGSLFGGMVLKKFLKGHGGSYL

SEQ ID NO: 40551 - protein, 181 aa, Artificial Sequence
  Synthetic polypeptide
MGSRCRAWAWTRAWALAEFQARAEEGAAAAAAAAGGYPSTGRCRCSLRGMEGTAVAVFEILRFLIIHWKCDIDVSKGALLEGQLVISIEGLNSKHQANALHCVTTRWSLTLLPRPECSGAVSAHCNLHLPGSSDSHASVPRVAGITDAHHHAWLIMVASAGSLFGGMVLKKFLKGHGGSYL

SEQ ID NO: 40552 - protein, 26 aa, Artificial Sequence
  Synthetic polypeptide
MVASAGSLFGGMVLKKFLKGHGGSYL

SEQ ID NO: 40553 - protein, 15 aa, Artificial Sequence
  Synthetic polypeptide
MVLKKFLKGHGGSYL

SEQ ID NO: 40554 - protein, 120 aa, Artificial Sequence
  Synthetic polypeptide
MAHAVREKADIEAKSKLSLFQSRISLQKASVKLKARRSECNSKATHARNDYLLTLAAANAHQDRYYQTDLVNIMKALDGNVYDHLKDYLIAFSRTELETCQAVQNTFQFLLENSSKKRML

SEQ ID NO: 40555 - protein, 224 aa, Artificial Sequence
  Synthetic polypeptide
MQKLASQYLKRDWPGVKADDRNDYRSMYPVWKSFLEGTMQVAQSRMNICENYKNFISEPARTVRSLKEQQLKRCVDQLTKIQTELQETVKDLAKGKKKYFETEQMAHAVREKADIEAKSKLSLFQSRISLQKASVKLKARRSECNSKATHARNDYLLTLAAANAHQDRYYQTDLVNIMKALDGNVYDHLKDYLIAFSRTELETCQAVQNTFQFLLENSSKKRML

SEQ ID NO: 40556 - protein, 280 aa, Artificial Sequence
  Synthetic polypeptide
MQPPPRKVKVTQELKNIQVEQMTKLQAKHQAECDLLEDMRTFSQKKAAIEREYAQGMQKLASQYLKRDWPGVKADDRNDYRSMYPVWKSFLEGTMQVAQSRMNICENYKNFISEPARTVRSLKEQQLKRCVDQLTKIQTELQETVKDLAKGKKKYFETEQMAHAVREKADIEAKSKLSLFQSRISLQKASVKLKARRSECNSKATHARNDYLLTLAAANAHQDRYYQTDLVNIMKALDGNVYDHLKDYLIAFSRTELETCQAVQNTFQFLLENSSKKRML

SEQ ID NO: 40557 - protein, 252 aa, Artificial Sequence
  Synthetic polypeptide
MAFTLEERLQLGIHGLIPPCFLSQDVQLLRIMRYYERQQSDLDKYIILMTLQDRNEKLFYRVLTSDVEKFMPIVYTPTVGLACQHYGLTFRRPRGLFITIHDKGHLATMLNSWPEDNIKAVVVTDGERILGLGDLGCYGMGIPVGKLALYTACGGVNPQQCLPVLLDVGTNNEELLRDPLYIGLKHQRVHGKAYDDLLDEFMQAVTDKFGINCLIQFEDFANANAFRLLNKYRNKYCMFNDDIQAPSTAPAT

SEQ ID NO: 40558 - protein, 314 aa, Artificial Sequence
  Synthetic polypeptide
MGAALGTGTRLAPWPGRACGALPRWTPTAPAQGCHSKPGPARPVPLKKRGYDVTRNPHLNKGMAFTLEERLQLGIHGLIPPCFLSQDVQLLRIMRYYERQQSDLDKYIILMTLQDRNEKLFYRVLTSDVEKFMPIVYTPTVGLACQHYGLTFRRPRGLFITIHDKGHLATMLNSWPEDNIKAVVVTDGERILGLGDLGCYGMGIPVGKLALYTACGGVNPQQCLPVLLDVGTNNEELLRDPLYIGLKHQRVHGKAYDDLLDEFMQAVTDKFGINCLIQFEDFANANAFRLLNKYRNKYCMFNDDIQAPSTAPAT

SEQ ID NO: 40559 - protein, 141 aa, Artificial Sequence
  Synthetic polypeptide
MAGLTRFALELVTEKGHTFAEELQKIQCTLQDVGSALATPCSSAREAHLKYTTFKAGPILELEQWIDKYTSQLPPLTAFILPSGGKISSALHFCRAVCRRAERRHPSAVLIIARNWKQPKGPENRHGGAADRSSMQQRVTQ

SEQ ID NO: 40560 - protein, 180 aa, Artificial Sequence
  Synthetic polypeptide
MAVCGLGSRLGLGSRLGLRGCFGAARLLYPRFQSRGPQGVEDGDRFALELVTEKGHTFAEELQKIQCTLQDVGSALATPCSSAREAHLKYTTFKAGPILELEQWIDKYTSQLPPLTAFILPSGGKISSALHFCRAVCRRAERRHPSAVLIIARNWKQPKGPENRHGGAADRSSMQQRVTQ

SEQ ID NO: 40561 - protein, 232 aa, Artificial Sequence
  Synthetic polypeptide
MAVCGLGSRLGLGSRLGLRGCFGAARLLYPRFQSRGPQGVEDGDRPQPSSKTPRIPKIYTKTGDKGFSSTFTGERRPKDDQVFEAVGTTDELSSAIGFALELVTEKGHTFAEELQKIQCTLQDVGSALATPCSSAREAHLKYTTFKAGPILELEQWIDKYTSQLPPLTAFILPSGGKISSALHFCRAVCRRAERRHPSAVLIIARNWKQPKGPENRHGGAADRSSMQQRVTQ

SEQ ID NO: 40562 - protein, 30 aa, Artificial Sequence
  Synthetic polypeptide
MDPDTKLIGNMALLPIRSQFKGPAPREKKN

SEQ ID NO: 40563 - protein, 38 aa, Artificial Sequence
  Synthetic polypeptide
MPAYHSSLMDPDTKLIGNMALLPIRSQFKGPAPREKKN

SEQ ID NO: 40564 - protein, 633 aa, Artificial Sequence
  Synthetic polypeptide
MKVGWPGESCWQVGLAVEDSPALGAPRVGALPDVVPEGTLLNMVLRRMHRPRSCSYQLLLEHQRPSCIQGLRWTPLTNSEESLDFSESLEQASTERVLRAGRQLHRHLLATCPNLIRDRKYHLRLYRQCCSGRELVDGILALGLGVHSRSQVVGICQVLLDEGALCHVKHDWAFQDRDAQFYRFPGPEPEPVRTHEMEEELAEAVALLSQRGPDALLTVALRKPPGQRTDEELDLIFEELLHIKAVAHLSNSVKRELAAVLLFEPHSKAGTVLFSQGDKGTSWYIIWKGSVNVVTHGKGLVTTLHEGDDFGQLALVNDAPRAATIILREDNCHFLRVDKQDFNRIIKDVEAKTMRLEEHGKVVLVLERASQGAGPSRPPTPGRNRYTVMSGTPEKILELLLEAMGPDSSAHDPTETFLSDFLLTHRVFMPSAQLCAALLHHFHVEPAGGSEQERSTYVCNKRQQILRLVSQWVALYGSMLHTDPVATSFLQKLSDLVGRDTRLSNLLREQWPERRRCHRLENGCGNASPQMKARNLPVWLPNQDEPLPGSSCAIQVGDKVPYDICRPDHSVLTLQLPVTASVREVMAALAQEDGWTKGQVLVKVNSAGGLQWLSELMCVKHLAQGLPVSAENM

SEQ ID NO: 40565 - protein, 591 aa, Artificial Sequence
  Synthetic polypeptide
MVLRRMHRPRSCSYQLLLEHQRPSCIQGLRWTPLTNSEESLDFSESLEQASTERVLRAGRQLHRHLLATCPNLIRDRKYHLRLYRQCCSGRELVDGILALGLGVHSRSQVVGICQVLLDEGALCHVKHDWAFQDRDAQFYRFPGPEPEPVRTHEMEEELAEAVALLSQRGPDALLTVALRKPPGQRTDEELDLIFEELLHIKAVAHLSNSVKRELAAVLLFEPHSKAGTVLFSQGDKGTSWYIIWKGSVNVVTHGKGLVTTLHEGDDFGQLALVNDAPRAATIILREDNCHFLRVDKQDFNRIIKDVEAKTMRLEEHGKVVLVLERASQGAGPSRPPTPGRNRYTVMSGTPEKILELLLEAMGPDSSAHDPTETFLSDFLLTHRVFMPSAQLCAALLHHFHVEPAGGSEQERSTYVCNKRQQILRLVSQWVALYGSMLHTDPVATSFLQKLSDLVGRDTRLSNLLREQWPERRRCHRLENGCGNASPQMKARNLPVWLPNQDEPLPGSSCAIQVGDKVPYDICRPDHSVLTLQLPVTASVREVMAALAQEDGWTKGQVLVKVNSAGGLQWLSELMCVKHLAQGLPVSAENM

SEQ ID NO: 40566 - protein, 22 aa, Artificial Sequence
  Synthetic polypeptide
MFACSKFVSTPSLWAKRTSRAI

SEQ ID NO: 40567 - protein, 38 aa, Artificial Sequence
  Synthetic polypeptide
MPELILSPATAPHPLKMFACSKFVSTPSLWAKRTSRAI

SEQ ID NO: 40568 - protein, 79 aa, Artificial Sequence
  Synthetic polypeptide
MPELILYVAITLSVAERLVGPGHACAEPSFRSSRCSAPLCLLCSGSSSPATAPHPLKMFACSKFVSTPSLWAKRTSRAI

SEQ ID NO: 40569 - protein, 347 aa, Artificial Sequence
  Synthetic polypeptide
MASLSLAPVNIFKAGADEERAETARLTSFIGAIAIGDLVKSTLGPKGMDKILLSSGRDASLMVTNDGATILKNIGVDNPAAKVLVDMSRVQDDEVGDGTTSVTVLAAELLREAESLIAKKIHPQTIIAGWREATKAAREALLSSAVDHGSDEVKFRQDLMNIAGTTLSSKLLTHHKDHFTKLAVEAVLRLKGSGNLEAIHIIKKLGGSLADSYLDEGFLLDKKIGVNQPKRIENAKILIANTGMDTDKIKIFGSRVRVDSTAKVAEIEHAEKEKMKEKVERILKHGINCFINRQLIYNYPEQLFGAAGVMAIEHADFAGVERLALVTGAVACACNPSTLGGRGSQIA

SEQ ID NO: 40570 - protein, 300 aa, Artificial Sequence
  Synthetic polypeptide
MDKILLSSGRDASLMVTNDGATILKNIGVDNPAAKVLVDMSRVQDDEVGDGTTSVTVLAAELLREAESLIAKKIHPQTIIAGWREATKAAREALLSSAVDHGSDEVKFRQDLMNIAGTTLSSKLLTHHKDHFTKLAVEAVLRLKGSGNLEAIHIIKKLGGSLADSYLDEGFLLDKKIGVNQPKRIENAKILIANTGMDTDKIKIFGSRVRVDSTAKVAEIEHAEKEKMKEKVERILKHGINCFINRQLIYNYPEQLFGAAGVMAIEHADFAGVERLALVTGAVACACNPSTLGGRGSQIA

SEQ ID NO: 40571 - protein, 34 aa, Artificial Sequence
  Synthetic polypeptide
MASATEDPVLERYFKGHKAAITSLDLSPNGKQLA

SEQ ID NO: 40572 - protein, 124 aa, Artificial Sequence
  Synthetic polypeptide
MAWCVATADPAHTSRPLFTGLAVSRGSAGHAWSAGFDWAAVVVVTGRRCRSGQTVPGAARSPLLPHPLPSPLRVPPPTGALGRPLPRWPQPRRTPFWSVISKATKLRSPPWTSAPTASNLHDTQ

SEQ ID NO: 40573 - protein, 1079 aa, Artificial Sequence
  Synthetic polypeptide
MATAATEEPFPFHGLLPKKETGAASFLCRYPEYDGRGVLIAVLDTGVDPGAPGMQVTTDGKPKIVDIIDTTGSGDVNTATEVEPKDGEIVGLSGRVLKIPASWTNPSGKYHIGIKNGYDFYPKALKERIQKERKEKIWDPVHRVALAEACRKQEEFDVANNGSSQANKLIKEELQSQVELLNSFEKKYSDPGPVYDCLVWHDGEVWRACIDSNEDGDLSKSTVLRNYKEAQEYGSFGTAEMLNYSVNIYDDGNLLSIVTSGGAHGTHVASIAAGHFPEEPERNGVAPGAQILSIKIGDTRLSTMETGTGLIRAMIEVINHKCDLVNYSYGEATHWPNSGRICEVINEAVWKHNIIYVSSAGNNGPCLSTVGCPGGTTSSVIGVGAYVSPDMMVAEYSLREKLPANQYTWSSRGPSADGALGVSISAPGGAIASVPNWTLRGTQLMNGTSMSSPNACGGIALILSGLKANNIDYTVHSVRRALENTAVKADNIEVFAQGHGIIQVDKAYDYLVQNTSFANKLGFTVTVGNNRGIYLRDPVQVAAPSDHGVGIEPVFPENTENSEKISLQLHLALTSNSSWVQCPSHLELMNQCRHINIRVDPRGLREGLHYTEVCGYDIASPNAGPLFRVPITAVIAAKVNESSHYDLAFTDVHFKPGQIRRHFIEVPEGATWAEVTVCSCSSEVSAKFVLHAVQLVKQRAYRSHEFYKFCSLPEKGTLTEAFPVLGGKAIEFCIARWWASLSDVNIDYTISFHGIVCTAPQLNIHASEGINRFDVQSSLKYEDLAPCITLKNWVQTLRPVSAKTKPLGSRDVLPNNRQLYEMVLTYNFHQPKSGEVTPSCPLLCELLYESEFDSQLWIIFDQNKRQMGSGDAYPHQYSLKLEKGDYTIRLQIRHEQISDLERLKDLPFIVSHRLSNTLSLDIHENHSFALLGKKKSSNLTLPPKYNQPFFVTSLPDDKIPKGAGPGCYLAGSLTLSKTELGKKADVIPVHYYLIPPPTKTKNGSKDKEKDSEKEKDLKEEFTEALRDLKIQWMTKSCLQELQLLGEGRLSSLEEEDVIISHPDLLPVAAAQFQLSALKR

SEQ ID NO: 40574 - protein, 1092 aa, Artificial Sequence
  Synthetic polypeptide
MATAATEEPFPFHGLLPKKETGAASFLCRYPEYDGRGVLIAVLDTGVDPGAPGMQVTTDGKPKIVDIIDTTGSGDVNTATEVEPKDGEIVGLSGRVLKIPASWTNPSGKYHIGIKNGYDFYPKALKERIQKERKEKIWDPVHRVALAEACRKQEEFDVANNGSSQANKLIKEELQSQVELLNSFEKKYSDPGPVYDCLVWHDGEVWRACIDSNEDGDLSKSTVLRNYKEAQEYGSFGTAEMLNYSVNIYDDGNLLSIVTSGGAHGTHVASIAAGHFPEEPERNGVAPGAQILSIKIGDTRLSTMETGTGLIRAMIEVINHKCDLVNYSYGEATHWPNSGRICEVINEAVWKHNIIYVSSAGNNGPCLSTVGCPGGTTSSVIGVGAYVSPDMMVAEYSLREKLPANQYTWSSRGPSADGALGVSISAPGGAIASVPNWTLRGTQLMNGTSMSSPNACGGIALILSGLKANNIDYTVHSVRRALENTAVKADNIEVFAQGHGIIQVDKAYDYLVQNTSFANKLGFTVTVGNNRGIYLRDPVQVAAPSDHGVGIEPVFPENTENSEKISLQLHLALTSNSSWVQCPSHLELMNQCRHINIRVDPRGLREGLHYTEVCGYDIASPNAGPLFRVPITAVIAAKVNESSHYDLAFTDVHFKPGQIRRHFIEVPEGATWAEVTVCSCSSEVSAKFVLHAVQLVKQRAYRSHEFYKFCSLPEKGTLTEAFPVLGGKAIEFCIARWWASLSDVNIDYTISFHGIVCTAPQLNIHASEGINRFDVQSSLKYEDLAPCITLKNWVQTLRPVSAKTKPLGSRDVLPNNRQLYEMVLTYNFHQPKSGEVTPSCPLLCELLYESEFDSQLWIIFDQNKRQMGSGDAYPHQYSLKLEKGDYTIRLQIRHEQISDLERLKDLPFIVSHRLSNTLSLDIHENHSFALLGKKKSSNLTLPPKYNQPFFVTSLPDDKIPKGAGPGCYLAGSLTLSKTELGKKAGQSAAKRQGKFKKDVIPVHYYLIPPPTKTKNGSKDKEKDSEKEKDLKEEFTEALRDLKIQWMTKSCLQELQLLGEGRLSSLEEEDVIISHPDLLPVAAAQFQLSALKR

SEQ ID NO: 40575 - protein, 16 aa, Artificial Sequence
  Synthetic polypeptide
MDCSLVRTLVHRYVFR

SEQ ID NO: 40576 - protein, 49 aa, Artificial Sequence
  Synthetic polypeptide
MNRLPDDYDPYAVEEPSDEEPALSSRVTEGKSVILDYSPVKLNYNNIIV

SEQ ID NO: 40577 - protein, 385 aa, Artificial Sequence
  Synthetic polypeptide
MENWSKDITHSYLEQETTGINKSTQPDEQLTMNSEKSMHRKSTELVNEITCENTEWPGQRSTNFQIISSYPDDESVYCTTEKYNVMEHRHNDMHYECMTPCQVTSDSDKEKTIAFLLKELDILRTSNKKLQQKLAKEDKEQRKLKFKLELQEKETEAKIAEKTAALVEEVYFAQKERDEAVMSRLQLAIEERDEAIARAKHMEMSLKVLENINPEENDMTLQELLNRINNADTGIAIQKNGAIIVDRIYKTKECKMRITAEEMSALIEERDAALSKCKRLEQELHHVKEQNQTSANNMRHLTAENNQERALKAKLLSMQQARETAVQQYKKLEEEIQTLRVYYRGNYGHRDRHAQREDNLKTHREKTAMYLQAKEGQQLLVNTKH

SEQ ID NO: 40578 - protein, 354 aa, Artificial Sequence
  Synthetic polypeptide
MNSEKSMHRKSTELVNEITCENTEWPGQRSTNFQIISSYPDDESVYCTTEKYNVMEHRHNDMHYECMTPCQVTSDSDKEKTIAFLLKELDILRTSNKKLQQKLAKEDKEQRKLKFKLELQEKETEAKIAEKTAALVEEVYFAQKERDEAVMSRLQLAIEERDEAIARAKHMEMSLKVLENINPEENDMTLQELLNRINNADTGIAIQKNGAIIVDRIYKTKECKMRITAEEMSALIEERDAALSKCKRLEQELHHVKEQNQTSANNMRHLTAENNQERALKAKLLSMQQARETAVQQYKKLEEEIQTLRVYYRGNYGHRDRHAQREDNLKTHREKTAMYLQAKEGQQLLVNTKH

SEQ ID NO: 40579 - protein, 222 aa, Artificial Sequence
  Synthetic polypeptide
MNSEKSMHRKSTELVNEITCENTEWPGQRSTNFQIISSYPDDESVYCTTEKYNVMEHRHNDMHYECMTPCQVTSDSDKEKTIAFLLKELDILRTSNKKLQQKLAKEDKEQRKLKFKLELQEKETEAKIAEKTAGKVVIYATSQRNCSSTVQKTGRGNPDPSSLLQGKLWTQRQTCTEGRQSEDTQGEDCHVSTSQGGPTIAGKHQTLEEARKDSPLQLSERT

SEQ ID NO: 40580 - protein, 204 aa, Artificial Sequence
  Synthetic polypeptide
MSRLQLAIEERDEAIARAKHMEMSLKVLENINPEENDMTLQELLNRINNADTGIAIQKNGAIIVDRIYKTKECKMRITAEEMSALIEERDAALSKCKRLEQELHHVKEQNQTSANNMRHLTAENNQERALKAKLLSMQQARETAVQQYKKLEEEIQTLRVYYRGNYGHRDRHAQREDNLKTHREKTAMYLQAKEGQQLLVNTKH

SEQ ID NO: 40581 - protein, 592 aa, Artificial Sequence
  Synthetic polypeptide
MKSRFSTIDLRAVLAELNASLLGMRVNNVYDVDNKTYLIRLQKPDFKATLLLESGIRIHTTEFEWPKNMMPSSFAMKCRKHLKSRRLVSAKQLGVDRIVDFQFGSDEAAYHLIIELYDRGNIVLTDYEYVILNILRFRTDEADDVKFAVRERYPLDHARAAEPLLTLERLTEIVASAPKGELLKRVLNPLLPYGPALIEHCLLENGFSGNVKVDEKLETKDIEKVLVSLQKAEDYMKTTSNFSGKGYIIQKREIKPSLEADKPVEDILTYEEFHPFLFSQHSQCPYIEFESFDKAVDEFYSKIEGQKIDLKALQQEKQALKKLDNVRKDHENRLEALQQAQEIDKLKGELIEMNLQIVDRAIQVVRSALANQIDWTEIGLIVKEAQAQGDPVASAIKELKLQTNHVTMLLRNPYLLSEEEDDDVDGDVNVEKNETEPPKGKKKKQKNKQLQKPQKNKPLLVDVDLSLSAYANAKKYYDHKRYAAKKTQKTVEAAEKAFKSAEKKTKQTLKEVQTVTSIQKARKVYWFEKFLWFISSENYLIIGGRDQQQNEIIVKRYLTPGDIYVHADLHGATSCVIKNPTEMEKLILKFMW

SEQ ID NO: 40582 - protein, 550 aa, Artificial Sequence
  Synthetic polypeptide
MKSRFSTIDLRAVLAELNASLLGMRVNNVYDVDNKTYLIRLQKPDFKATLLLESGIRIHTTEFEWPKNMMPSSFAMKGNIVLTDYEYVILNILRFRTDEADDVKFAVRERYPLDHARAAEPLLTLERLTEIVASAPKGELLKRVLNPLLPYGPALIEHCLLENGFSGNVKVDEKLETKDIEKVLVSLQKAEDYMKTTSNFSGKGYIIQKREIKPSLEADKPVEDILTYEEFHPFLFSQHSQCPYIEFESFDKAVDEFYSKIEGQKIDLKALQQEKQALKKLDNVRKDHENRLEALQQAQEIDKLKGELIEMNLQIVDRAIQVVRSALANQIDWTEIGLIVKEAQAQGDPVASAIKELKLQTNHVTMLLRNPYLLSEEEDDDVDGDVNVEKNETEPPKGKKKKQKNKQLQKPQKNKPLLVDVDLSLSAYANAKKYYDHKRYAAKKTQKTVEAAEKAFKSAEKKTKQTLKEVQTVTSIQKARKVYWFEKFLWFISSENYLIIGGRDQQQNEIIVKRYLTPGDIYVHADLHGATSCVIKNPTEMEKLILKFMW

SEQ ID NO: 40583 - protein, 19 aa, Artificial Sequence
  Synthetic polypeptide
MGLRYVLPLRPPGKSCCRD

SEQ ID NO: 40584 - protein, 2 aa, Artificial Sequence
  Synthetic polypeptide
GV

SEQ ID NO: 40585 - protein, 586 aa, Artificial Sequence
  Synthetic polypeptide
MPFTLHLRSRLPSAIRSLILQKKPNIRNTSSMAGELRPASLVVLPRSLAPAFERFCQVNTGPLPLLGQSEPEKWMLPPQGAISETRMGHPQFWKYEFGACTGSLASLEQYSEQLKDMVAFFLGCSFSLEEALEKAGLPRRDPAGHSQAGAYKTTVPCVTHAGFCCPLVVTMRPIPKDKLEGLVRACCSLGGEQGQPVHMGDPELLGIKELSKPAYGDAMVCPPGEVPVFWPSPLTSLGAVSSCETPLAFASIPGCTVMTDLKDAKAPPGCLTPERIPEVHHISQDPLHYSIASVSASQKIRELESMIGIDPGNRGIGHLLCKDELLKASLSLSHARSVLITTGFPTHFNHEPPEETDGPPGAVALVAFLQALEKEVAIIVDQRAWNLHQKIVEDAVEQGVLKTQIPILTYQGGSVEAAQAFLCKNGDPQTPRFDHLVAIERAGRAADGNYYNARKMNIKHLVDPIDDLFLAAKKIPGISSTGVGDGGNELGMGKVKEAVRRHIRHGDVIACDVEADFAVIAGVSNWGGYALACALYILYSCAVHSQYLRKAVGPSRAPGDQAWTQALPSVIKTLWFHQILQVVWGH

SEQ ID NO: 40586 - protein, 546 aa, Artificial Sequence
  Synthetic polypeptide
MPFTLHLRSRLPSAIRSLILQKKPNIRNTSSMAGELRPASLVVLPRSLAPAFERFCQVNTGPLPLLGQSEPEKWMLPPQGAISETRMGHPQFWKYEFGACTGSLASLEQYSEQLKDMVAFFLGCSFSLEEALEKAGLPRRDPAGHSQAGAYKTTVPCVTHAGFCCPLVVTMRPIPKDKLEGLVRACCSLGGEQGQPVHMGDPELLGIKELSKPAYGDAMVCPPGEVPVFWPSPLTSLGAVSSCETPLAFASIPGCTVMTDLKDAKAPPGCLTPERIPEVHHISQDPLHYSIASVSASQKIRELESMIGIDPGNRGIGHLLCKDELLKASLSLSHARSVLITTGFPTHFNHEPPEETDGPPGAVALVAFLQALEKEVAIIVDQRAWNLHQKIVEDAVEQGVLKTQIPILTYQGGSVEAAQAFLCKNGDPQTPRFDHLVAIERAGRAADGNYYNARKMNIKHLVDPIDDLFLAAKKIPGISSTGVSNWGGYALACALYILYSCAVHSQYLRKAVGPSRAPGDQAWTQALPSVIKTLWFHQILQVVWGH

SEQ ID NO: 40587 - protein, 529 aa, Artificial Sequence
  Synthetic polypeptide
MPFTLHLRSRLPSAIRSLILQKKPNIRNTSSMAGELRPASLVVLPRSLAPAFERFCQVNTGPLPLLGQSEPEKWMLPPQGAISETRMGHPQFWKYEFGACTGSLASLEQYSEQLKDMVAFFLGCSFSLEEALEKAGLPRRDPAGHSQTTVPCVTHAGFCCPLVVTMRPIPKDKLEGLVRACCSLGELLGIKELSKPAYGDAMVCPPGEVPVFWPSPLTSLGAVSSCETPLAFASIPGCTVMTDLKDAKAPPGCLTPERIPEVHHISQDPLHYSIASVSASQKIRELESMIGIDPGNRGIGHLLCKDELLKASLSLSHARSVLITTGFPTHFNHEPPEETDGPPGAVALVAFLQALEKEVAIIVDQRAWNLHQKIVEDAVEQGVLKTQIPILTYQGGSVEAAQAFLCKNGDPQTPRFDHLVAIERAGRAADGNYYNARKMNIKHLVDPIDDLFLAAKKIPGISSTGVSNWGGYALACALYILYSCAVHSQYLRKAVGPSRAPGDQAWTQALPSVIKTLWFHQILQVVWGH

SEQ ID NO: 40588 - protein, 581 aa, Artificial Sequence
  Synthetic polypeptide
MPFTLHLRSRLPSAIRSLILQKKPNIRNTSSMAGELRPASLVVLPRSLAPAFERFCQVNTGPLPLLGQSEPEKWMLPPQGAISETRMGHPQFWKYEFGACTGSLASLEQYSEQLKDMVAFFLGCSFSLEEALEKAGLPRRDPAGHSQTTVPCVTHAGFCCPLVVTMRPIPKDKLEGLVRACCSLGGEQGQPVHMGDPELLGIKELSKPAYGDAMVCPPGEVPVFWPSPLTSLGAVSSCETPLAFASIPGCTVMTDLKDAKAPPGCLTPERIPEVHHISQDPLHYSIASVSASQKIRELESMIGIDPGNRGIGHLLCKDELLKASLSLSHARSVLITTGFPTHFNHEPPEETDGPPGAVALVAFLQALEKEVAIIVDQRAWNLHQKIVEDAVEQGVLKTQIPILTYQGGSVEAAQAFLCKNGDPQTPRFDHLVAIERAGRAADGNYYNARKMNIKHLVDPIDDLFLAAKKIPGISSTGVGDGGNELGMGKVKEAVRRHIRHGDVIACDVEADFAVIAGVSNWGGYALACALYILYSCAVHSQYLRKAVGPSRAPGDQAWTQALPSVIKTLWFHQILQVVWGH

SEQ ID NO: 40589 - protein, 457 aa, Artificial Sequence
  Synthetic polypeptide
MVAFFLGCSFSLEEALEKAGAYKTTVPCVTHAGFCCPLVVTMRPIPKDKLEGLVRACCSLGGEQGQPVHMGDPELLGIKELSKPAYGDAMVCPPGEVPVFWPSPLTSLGAVSSCETPLAFASIPGCTVMTDLKDAKAPPGCLTPERIPEVHHISQDPLHYSIASVSASQKIRELESMIGIDPGNRGIGHLLCKDELLKASLSLSHARSVLITTGFPTHFNHEPPEETDGPPGAVALVAFLQALEKEVAIIVDQRAWNLHQKIVEDAVEQGVLKTQIPILTYQGGSVEAAQAFLCKNGDPQTPRFDHLVAIERAGRAADGNYYNARKMNIKHLVDPIDDLFLAAKKIPGISSTGVGDGGNELGMGKVKEAVRRHIRHGDVIACDVEADFAVIAGVSNWGGYALACALYILYSCAVHSQYLRKAVGPSRAPGDQAWTQALPSVIKTLWFHQILQVVWGH

SEQ ID NO: 40590 - protein, 15 aa, Artificial Sequence
  Synthetic polypeptide
PAPAAWLRWSSTRSS

SEQ ID NO: 40591 - protein, 3 aa, Artificial Sequence
  Synthetic polypeptide
SRY

SEQ ID NO: 40592 - protein, 1147 aa, Artificial Sequence
  Synthetic polypeptide
MWSLTASEGESTTAHFFLGAGDEGLGTRGIGMRPEESDSELLEDEEDEVPPEPQIIVGICAMTKKSKSKPMTQILERLCRFDYLTVVILGEDVILNEPVENWPSCHCLISFHSKGFPLDKAVAYSKLRNPFLINDLAMQYYIQDRREVYRILQEEGIDLPRYAVLNRDPARPEECNLIEGEDQVEVNGAVFPKPFVEKPVSAEDHNVYIYYPSSAGGGSQRLFRKIGSRSSVYSPESSVRKTGSYIYEEFMPTDGTDVKVYTVGPDYAHAEARKSPALDGKVERDSEGKEIRYPVMLTAMEKLVARKVCVAFKQTVCGFDLLRANGHSFVCDVNGFSFVKNSMKYYDDCAKILGNTIMRELAPQFQIPWSIPTEAEDIPIVPTTSGTMMELRCVIAIIRHGDRTPKQKMKMEVKHPRFFALFEKHGGYKTGKLKLKRPEQLQEVLDITRLLLAELEKEPGGEIEEKTGKLEQLKSVLEMYGHFSGINRKVQLTYYPHGVKASNEGQDPQRETLAPSLLLVLKWGGELTPAGRVQAEELGRAFRCMYPGGQGDYAGFPGCGLLRLHSTFRHDLKIYASDEGRVQMTAAAFAKGLLALEGELTPILVQMVKSANMNGLLDSDGDSLSSCQHRVKARLHHILQQDAPFGPEDYDQLAPTRSTSLLNSMTIIQNPVKVCDQVFALIENLTHQIRERMQDPRSVDLQLYHSETLELMLQRWSKLERDFRQKSGRYDISKIPDIYDCVKYDVQHNGSLGLQGTAELLRLSKALADVVIPQEYGISREEKLEIAVGFCLPLLRKILLDLQRTHEDESVNKLHPLCYLRYSRGVLSPGRHVRTRLYFTSESHVHSLLSVFRYGGLLDETQDAQWQRALDYLSAISELNYMTQIVIMLYEDNTQDPLSEERFHVELHFSPGVKGVEEEGSAPAGCGFRPASSENEEMKTNQGSMENLCPGKASDEPDRALQTSPQPPEGPGLPRRSPLIRNRKAGSMEVLSETSSSRPGGYRLFSSSRPPTEMKQSGLGSQCTGLFSTTVLGGSSSAPNLQDYARSHGKKLPPASLKHRDELLFVPAVKRFSVSFAKHPTNGFEGCSMVPTIYPLETLHNALSLRQVSEFLSRVCQRHTDAQAQASAATWEAEAGGSPEPGRSRLQ

SEQ ID NO: 40593 - protein, 1123 aa, Artificial Sequence
  Synthetic polypeptide
MWSLTASEGESTTAHFFLGAGDEGLGTRGIGMRPEESDSELLEDEEDEVPPEPQIIVGICAMTKKSKSKPMTQILERLCRFDYLTVVILGEDVILNEPVENWPSCHCLISFHSKGFPLDKAVAYSKLRNPFLINDLAMQYYIQDRREVYRILQEEGIDLPRYAVLNRDPARPEECNLIEGEDQVEVNGAVFPKPFVEKPVSAEDHNVYIYYPSSAGGGSQRLFRKIGSRSSVYSPESSVRKTGSYIYEEFMPTDGTDVKVYTVGPDYAHAEARKSPALDGKVERDSEGKEIRYPVMLTAMEKLVARKVCVAFKQTVCGFDLLRANGHSFVCDVNGFSFVKNSMKYYDDCAKILGNTIMRELAPQFQIPWSIPTEAEDIPIVPTTSGTMMELRCVIAIIRHGDRTPKQKMKMEVKHPRFFALFEKHGGYKTGKLKLKRPEQLQEVLDITRLLLAELEKEPGGEIEEKTGKLEQLKSVLEMYGHFSGINRKVQLTYYPHGVKASNEGQDPQRETLAPSLLLVLKWGGELTPAGRVQAEELGRAFRCMYPGGQGDYAGFPGCGLLRLHSTFRHDLKIYASDEGRVQMTAAAFAKGLLALEGELTPILVQMVKSANMNGLLDSDGDSLSSCQHRVKARLHHILQQDAPFGPEDYDQLAPTRSTSLLNSMTIIQNPVKVCDQVFALIENLTHQIRERMQDPRSVDLQLYHSETLELMLQRWSKLERDFRQKSGRYDISKIPDIYDCVKYDVQHNGSLGLQGTAELLRLSKALADVVIPQEYGISREEKLEIAVGFCLPLLRKILLDLQRTHEDESVNKLHPLESHVHSLLSVFRYGGLLDETQDAQWQRALDYLSAISELNYMTQIVIMLYEDNTQDPLSEERFHVELHFSPGVKGVEEEGSAPAGCGFRPASSENEEMKTNQGSMENLCPGKASDEPDRALQTSPQPPEGPGLPRRSPLIRNRKAGSMEVLSETSSSRPGGYRLFSSSRPPTEMKQSGLGSQCTGLFSTTVLGGSSSAPNLQDYARSHGKKLPPASLKHRDELLFVPAVKRFSVSFAKHPTNGFEGCSMVPTIYPLETLHNALSLRQVSEFLSRVCQRHTDAQAQASAATWEAEAGGSPEPGRSRLQ

SEQ ID NO: 40594 - protein, 1080 aa, Artificial Sequence
  Synthetic polypeptide
MWSLTASEGESTTAHFFLGAGDEGLGTRGIGMRPEESDSELLEDEEDEVPPEPQIIVGICAMTKKSKSKPMTQILERLCRFDYLTVVILGEDVILNEPVENWPSCHCLISFHSKGFPLDKAVAYSKLRNPFLINDLAMQYYIQDRREVYRILQEEGIDLPRYAVLNRDPARPEECNLIEGEDQVEVNGAVFPKPFVEKPVSAEDHNVYIYYPSSAGGGSQRLFRKIGSRSSVYSPESSVRKTGSYIYEEFMPTDGTDVKVYTVGPDYAHAEARKSPALDGKVERDSEGKEIRYPVMLTAMEKLVARKVCVAFKQTVCGFDLLRANGHSFVCDVNGFSFVKNSMKYYDDCAKILGNTIMRELAPQFQIPWSIPTEAEDIPIVPTTSGTMMELRCVIAIIRHGDRTPKQKMKMEVKHPRFFALFEKHGGYKTGKLKLKRPEQLQEVLDITRLLLAELEKEPGGEIEEKTGKLEQLKSVLEMYGHFSGINRKVQLTYYPHGVKASNEGQDPQRETLAPSLLLVLKWGGELTPAGRVQAEELGRAFRCMYPGGQGDYAGFPGCGLLRLHSTFRHDLKIYASDEGRVQMTAAAFAKGLLALEGELTPILVQMVKSANMNGLLDSDGDSLSSCQHRVKARLHHILQQDAPFGPEDYDQLAPTRSTSLLNSMTIIQNPVKVCDQVFALIENLTHQIRERMQDPRSVDLQLYHSETLELMLQRWSKLERDFRQKSGRYDISKIPDIYDCVKYDVQHNGSLGLQGTAELLRLSKALADVVIPQEYGISREEKLEIAVGFCLPLLRKILLDLQRTHEDESVNKLHPLYSRGVLSPGRHVRTRLYFTSESHVHSLLSVFRYGGLLDETQDAQWQRALDYLSAISELNYMTQIVIMLYEDNTQDPLSEERFHVELHFSPGVKGVEEEGSAPAGCGFRPASSENEEMKTNQGSMENLCPGKASDEPDRALQTSPQPPEGPGLPRRSPLIRNRKAGSMEVLSETSSSRPGGYRLFSSSRPPTEMKQSGLGFEGCSMVPTIYPLETLHNALSLRQVSEFLSRVCQRHTDAQAQASAATWEAEAGGSPEPGRSRLQ

SEQ ID NO: 40595 - protein, 1143 aa, Artificial Sequence
  Synthetic polypeptide
MWSLTASEGESTTAHFFLGAGDEGLGTRGIGMRPEESDSELLEDEEDEVPPEPQIIVGICAMTKKSKSKPMTQILERLCRFDYLTVVILGEDVILNEPVENWPSCHCLISFHSKGFPLDKAVAYSKLRNPFLINDLAMQYYIQDRREVYRILQEEGIDLPRYAVLNRDPARPEECNLIEGEDQVEVNGAVFPKPFVEKPVSAEDHNVYIYYPSSAGGGSQRLFRKIGSRSSVYSPESSVRKTGSYIYEEFMPTDGTDVKVYTVGPDYAHAEARKSPALDGKVERDSEGKEIRYPVMLTAMEKLVARKVCVAFKQTVCGFDLLRANGHSFVCDVNGFSFVKNSMKYYDDCAKILGNTIMRELAPQFQIPWSIPTEAEDIPIVPTTSGTMMELRCVIAIIRHGDRTPKQKMKMEVKHPRFFALFEKHGGYKTGKLKLKRPEQLQEVLDITRLLLAELEKEPGGEIEEKTGKLEQLKSVLEMYGHFSGINRKVQLTYYPHGVKASNEGQDPQRETLAPSLLLVLKWGGELTPAGRVQAEELGRAFRCMYPGGQGDYAGFPGCGLLRLHSTFRHDLKIYASDEGRVQMTAAAFAKGLLALEGELTPILVQMVKSANMNGLLDSDGDSLSSCQHRVKARLHHILQQDAPFGPEDYDQLAPTRSTSLLNSMTIIQNPVKVCDQVFALIENLTHQIRERMQDPRSVDLQLYHSETLELMLQRWSKLERDFRQKSGRYDISKIPDIYDCVKYDVQHNGSLGLQGTAELLRLSKALADVVIPQEYGISREEKLEIAVGFCLPLLRKILLDLQRTHEDESVNKLHPLYSRGVLSPGRHVRTRLYFTSESHVHSLLSVFRYGGLLDETQDAQWQRALDYLSAISELNYMTQIVIMLYEDNTQDPLSEERFHVELHFSPGVKGVEEEGSAPAGCGFRPASSENEEMKTNQGSMENLCPGKASDEPDRALQTSPQPPEGPGLPRRSPLIRNRKAGSMEVLSETSSSRPGGYRLFSSSRPPTEMKQSGLGSQCTGLFSTTVLGGSSSAPNLQDYARSHGKKLPPASLKHRDELLFVPAVKRFSVSFAKHPTNGFEGCSMVPTIYPLETLHNALSLRQVSEFLSRVCQRHTDAQAQASAATWEAEAGGSPEPGRSRLQ

SEQ ID NO: 40596 - protein, 1122 aa, Artificial Sequence
  Synthetic polypeptide
MWSLTASEGESTTAHFFLGAGDEGLGTRGIGMRPEESDSELLEDEEDEVPPEPQIIVGICAMTKKSKSKPMTQILERLCRFDYLTVVILGEDVILNEPVENWPSCHCLISFHSKGFPLDKAVAYSKLRNPFLINDLAMQYYIQDRREVYRILQEEGIDLPRYAVLNRDPARPEECNLIEGEDQVEVNGAVFPKPFVEKPVSAEDHNVYIYYPSSAGGGSQRLFRKIGSRSSVYSPESSVRKTGSYIYEEFMPTDGTDVKVYTVGPDYAHAEARKSPALDGKVERDSEGKEIRYPVMLTAMEKLVARKVCVAFKQTVCGFDLLRANGHSFVCDVNGFSFVKNSMKYYDDCAKILGNTIMRELAPQFQIPWSIPTEAEDIPIVPTTSGTMMELRCVIAIIRHGDRTPKQKMKMEVKHPRFFALFEKHGGYKTGKLKLKRPEQLQEVLDITRLLLAELEKEPGGEIEEKTGKLEQLKSVLEMYGHFSGINRKVQLTYYPHGVKASNEGQDPQRETLAPSLLLVLKWGGELTPAGRVQAEELGRAFRCMYPGGQGDYAGFPGCGLLRLHSTFRHDLKIYASDEGRVQMTAAAFAKGLLALEGELTPILVQMVKSANMNGLLDSDGDSLSSCQHRVKARLHHILQQDAPFGPEDYDQLAPTRSTSLLNSMTIIQNPVKVCDQVFALIENLTHQIRERMQDPRSVDLQLYHSETLELMLQRWSKLERDFRQKSGRYDISKIPDIYDCVKYDVQHNGSLGLQGTAELLRLSKALADVVIPQEYGISREEKLEIAVGFCLPLLRKILLDLQRTHEDESVNKLHPLYSRGVLSPGRHVRTRLYFTSESHVHSLLSVFRYGGLLDETQDAQWQRALDYLSAISELNYMTQIVIMLYEDNTQDPLSEERFHVELHFSPGVKGVEEEGSAPAGCGFRPASSENEEMKTNQGSMENLCPGKASDEPDRALQTSPQPPEGPGLPRRSPLIRNRKAGSMEVLSETSSSRPGGYRLFSSSRPPTEMKQSGLGSQCTGLFSTTVLGGSSSAPNLQDYARSHGKKLPPASLKHRDGFEGCSMVPTIYPLETLHNALSLRQVSEFLSRVCQRHTDAQAQASAATWEAEAGGSPEPGRSRLQ

SEQ ID NO: 40597 - protein, 174 aa, Artificial Sequence
  Synthetic polypeptide
MATESPATRRVQVAEHPRLLKLKEMFNSKFGSIPKFYVRAPGRVNIIGEHIDYCGYSVLPMAVEQDVLIAVEPVKTYALQLANTNPLYPDFSTSANNIQIDKTKPLWHNYFLCGLKGIQEHFGLSNLTGMNCLVDGNIPPSSGLSSSSALVCCAGLVTLTVLGRNLSKGLVEVQ

SEQ ID NO: 40598 - protein, 150 aa, Artificial Sequence
  Synthetic polypeptide
MFNSKFGSIPKFYVRAPGRVNIIGEHIDYCGYSVLPMAVEQDVLIAVEPVKTYALQLANTNPLYPDFSTSANNIQIDKTKPLWHNYFLCGLKGIQEHFGLSNLTGMNCLVDGNIPPSSGLSSSSALVCCAGLVTLTVLGRNLSKGLVEVQ

SEQ ID NO: 40599 - protein, 45 aa, Artificial Sequence
  Synthetic polypeptide
MNCLVDGNIPPSSGLSSSSALVCCAGLVTLTVLGRNLSKGLVEVQ

SEQ ID NO: 40600 - protein, 163 aa, Artificial Sequence
  Synthetic polypeptide
MPVLYDRLLKLKEMFNSKFGSIPKFYVRAPGRVNIIGEHIDYCGYSVLPMAVEQDVLIAVEPVKTYALQLANTNPLYPDFSTSANNIQIDKTKPLWHNYFLCGLKGIQEHFGLSNLTGMNCLVDGNIPPSSGLSSSSALVCCAGLVTLTVLGRNLSKGLVEVQ

SEQ ID NO: 40601 - protein, 344 aa, Artificial Sequence
  Synthetic polypeptide
MAAAEHRHSSGLPYWPYLTAETLKNRMGHQPPPPTQQHSITDNSLSLKTPPECLLTPLPPSADDNLKTPPECVLTPLPPSADDNLKTPPECVLTPLPPSADDNLKTPPECLLTPLPPSADDKLKTPPECLLTPLPPSALPSAPPSADDNLKTRAECLLHPLPPSADDNLKTPSERQLTPLPPSAPPSADDNIKTPAERLRGPLPPSADDNLKTPSERQLTPLPPSAPPSADDNIKTPAERLRGPLPPSADDNLKTPSERQLTPLPPSAPPSADDNIKTPAERLRGPLPPSADDNLKTPPLATQEAEAEKPRKPKRQRAAEMEPPPEPKRRREAEAEKPRKPKRQ

SEQ ID NO: 40602 - protein, 916 aa, Artificial Sequence
  Synthetic polypeptide
MFQRAQELRRRAEDYHKCKIPPSARKALCNWVRMAAAEHRHSSGLPYWPYLTAETLKNRMGHQPPPPTQQHSITDNSLSLKTPPECLLTPLPPSADDNLKTPPECVLTPLPPSADDNLKTPPECVLTPLPPSADDNLKTPPECLLTPLPPSADDKLKTPPECLLTPLPPSALPSAPPSADDNLKTRAECLLHPLPPSADDNLKTPSERQLTPLPPSAPPSADDNIKTPAERLRGPLPPSADDNLKTPSERQLTPLPPSAPPSADDNIKTPAERLRGPLPPSADDNLKTPSERQLTPLPPSAPPSADDNIKTPAERLRGPLPPSADDNLKTPSERQLTPLPPSAPPSADDNIKTPAERLRGPLPPSADDNLKTPSERQLTPLPPSAPPSADDNIKTPAERLRGPLPPSADDNLKTPSERQLTPLPPSAPPSADDNIKIPAERLRIPLPPSADDNLKTPSERQLTPLPPSAPPSADDNIKTPAFHPQRMIISRHLPSVSSLPFHPQLHPQQMIISRHLPSVCGGRFHPQRMIISRHLPSVSSLPFHPQLHPQQMIISRHLPSVCGGRFHPQRMIISRHLPSVSSLPFHTQLHPQQMIISRHLPSVCGGRFHPQRMIISRHLPSVSSLPFHPQLHPQQMIISRHLPSVCGGRFHPQRMIISRHLPSVSSLPFHPQLHPQQMIISRHLPSVCGPLPPSADDNLKTPSERQLTPLPPSAPPSADDNIKTPAERLRGPLPPSADDNLKTPSERQLTPLPPSAPPSADDNIKTPAERLRGPLPPSADDNLKTPSERQLTPLPPSAPPSADDNIKTPAERLRGPLPPSADDNLKTPSERQLTPLPPSAPPSADDNIKTPAERLRGPLPPSADDNLKTPPLATQEAEAEKPRKPKRQRAAEMEPPPEPKRRREAEAEKPRKPKRQ

SEQ ID NO: 40603 - protein, 772 aa, Artificial Sequence
  Synthetic polypeptide
MVKLSIVLTPQFLSHDQGQLTKELQQHVKSVTCPCEYLRKVINTLADHHHRGTDFGGSPWLHVIIAFPTSYKVVITLWIVYLWVSLLKTIFWSRNGHDGSTDVQQRAWRSNRRRQEGLRSICMHTKKRVSSFRGNKIVLKDVITLRRHVETKVRAKIRKRKVTTKINHHDKINGKRKTARKQKMFQRAQELRRRAEDYHKCKIPPSARKALCNWVRMAAAEHRHSSGLPYWPYLTAETLKNRMGHQPPPPTQQHSITDNSLSLKTPPECLLTPLPPSADDNLKTPPECVLTPLPPSADDNLKTPPECLLTPLPPSALPSAPPSADDNLKTRAECLLHPLPPSADDNLKTPSERQLTPLPPSAPPSADDNIKTPAFHPQRMIISRHLPSVSSLPFHPQLHPQQMIISRHLPSVCGGRFHPQRMIISRHLPSVSSLPFHPQLHPQQMIISRHLPSVCGGRFHPQRMIISRHLPSVSSLPFHPQLHPQQMIISRHLPSVCGGRFHPQRMIISRHLPSVSSLPFHPQLHPQQMIISRHLPSVCGGRFHPQRMIISRHLPSVSSLPFHPQLHPQQMIISRHLPSVCGGRFHPQRMIISRHLPSVSSLPFHTQLHPQQMIISRHLPSVCGERLRGPLPPSADDNLKTPSERQLTPLPPSAPPSADDNIKTPAERLRGPLPPSADDNLKTPSERQLTPLPPSAPPSADDNIKTPAERLRGPLPPSADDNLKTPPLATQEAEAEKPRKPKRQRAAEMEPPPEPKRRREAEAEKPRKPKRQ

SEQ ID NO: 40604 - protein, 1062 aa, Artificial Sequence
  Synthetic polypeptide
MVKLSIVLTPQFLSHDQGQLTKELQQHVKSVTCPCEYLRKVINTLADHHHRGTDFGGSPWLHVIIAFPTSYKVVITLWIVYLWVSLLKTIFWSRNGHDGSTDVQQRAWRSNRRRQEGLRSICMHTKKRVSSFRGNKIVLKDVITLRRHVETKVRAKIRKRKVTTKINHHDKINGKRKTARKQKMFQRAQELRRRAEDYHKCKIPPSARKALCNWVRMAAAEHRHSSGLPYWPYLTAETLKNRMGHQPPPPTQQHSITDNSLSLKTPPECLLTPLPPSADDNLKTPPECVLTPLPPSADDNLKTPPECVLTPLPPSADDNLKTPPECLLTPLPPSADDKLKTPPECLLTPLPPSALPSAPPSADDNLKTRAECLLHPLPPSADDNLKTPSERQLTPLPPSAPPSADDNIKTPAERLRGPLPPSADDNLKTPSERQLTPLPPSAPPSADDNIKTPAERLRGPLPPSADDNLKTPSERQLTPLPPSAPPSADDNIKTPAERLRGPLPPSADDNLKTPSERQLTPLPPSAPPSADDNIKTPAERLRGPLPPSADDNLKTPSERQLTPLPPSAPPSADDNIKTPAERLRGPLPPSADDNLKTPSERQLTPLPPSAPPSADDNIKTPAFHPQRMIISRHLPSVSSLPFHPQLHPQQMIISRYLLSVCGFRFHHQPMIISRHLPSVSSLPFHPQLHPQQMIISRHLPSVCGGRFHPQRMIISRHLPSVSSLPFHPQLHPQQMIISRHLPSVCGGRFHPQRMIISRHLPSVSSLPFHPQLHPQQMIISRHLPSVCGGRFHPQRMIISRHLPSVSSLPFHPQLHPQQMIISRHLPSVCGGRFHPQRMIISRHLPSVSSLPFHPQLHPQQMIISRHLPSVCGERLRGPLPPSADDNLKTPSERQLTPLPPSAPPSADDNIKTPAERLRGPLPPSADDNLKTPSERQLTPLPPSAPPSADDNIKTPAERLRGPLPPSADDNLKTPSERQLTPLPPSAPPSADDNIKTPAERLRGPLPPSADDNLKTPPLATQEAEAEKPRKPKRQRAAEMEPPPEPKRRREAEAEKPRKPKRQ

SEQ ID NO: 40605 - protein, 140 aa, Artificial Sequence
  Synthetic polypeptide
MANEEDDPVVQEIDVYLAKSLAEKLYLFQYPVRPASMTYDDIPHLSAKIKPKQQKVELEMAIDTLNPNYCRSKGEQIALNVDGACADETSTYSSKLMDKQTFCSSQTTSNTSRYAAALYRQVMQEAEAGESLELRRRRLQ

SEQ ID NO: 40606 - protein, 104 aa, Artificial Sequence
  Synthetic polypeptide
MANEEDDPVVQEIKPKQQKVELEMAIDTLNPNYCRSKGEQIALNVDGACADETSTYSSKLMDKQTFCSSQTTSNTSRYAAALYRQVMQEAEAGESLELRRRRLQ

SEQ ID NO: 40607 - protein, 146 aa, Artificial Sequence
  Synthetic polypeptide
MELTFYCRRQTTPEQIDQIDVYLAKSLAEKLYLFQYPVRPASMTYDDIPHLSAKIKPKQQKVELEMAIDTLNPNYCRSKGEQIALNVDGACADETSTYSSKLMDKQTFCSSQTTSNTSRYAAALYRQVMQEAEAGESLELRRRRLQ

SEQ ID NO: 40608 - protein, 104 aa, Artificial Sequence
  Synthetic polypeptide
MTYDDIPHLSAKIKPKQQKVELEMAIDTLNPNYCRSKGEQIALNVDGACADETSTYSSKLMDKQTFCSSQTTSNTSRYAAALYRQVMQEAEAGESLELRRRRLQ

SEQ ID NO: 40609 - protein, 11 aa, Artificial Sequence
  Synthetic polypeptide
TIAAAKGSRLR

SEQ ID NO: 40610 - protein, 502 aa, Artificial Sequence
  Synthetic polypeptide
MAVALDSQIDAPLEVEGCLIMKVEKDPEWASEPILEGSDSSETFRKCFRQFCYEDVTGPHEAFSKLWELCCRWLKPEMRSKEQILELLVIEQFLTILPEKIQAWAQKQCPQSGEEAVALVVHLEKETGRLRQQVSSPVHREKHSPLGAAWEVADFQPEQVETQPRAVSREEPGSLHSGHQEQLNRKRERRPLPKNARPSPWVPALADEWNTLDQEVTTTRLPAGSQEPVKDVHVARGFSYRKSVHQIPAQRDLYRDFRKENVGNVVSLGSAVSTSNKITRLEQRKEPWTLGLHSSNKRSILRSNYVKEKSVHAIQVPARSAGKTWREQQQWGLEDEKIAGVHWSYEETKTFLAILKESRFYETLQACPRNSQVYGAVAEWLRECGFLRTPEQCRTKFKSLQKSYRKVRNGHMLEPCAFFEDMDALLNPAARAPSTDKPKEMIPVPRLKRIAISAKEHISLVEEEEAAEDSDDDEIGIEFIRKSEIHGAPVLFQNLSDHFISK

SEQ ID NO: 40611 - protein, 198 aa, Artificial Sequence
  Synthetic polypeptide
MFLYNLTLQRATGISFAIHGNFSGTKQQEIVVSRGKILELLRPDPNTGKVHTLLTVEVFGVIRSLMAFRLTGGTKDYIVVGSDSGRIVILEYQPSKNMFEKIHQETFGKSGCRRIVPGQFLAVDPKGRAVMISAIEKQKLVYILNRDAAARLTISSPLEAHKANTLVYHVVGVDVGFENPMFACLEMDYEIFDFMLMI

SEQ ID NO: 40612 - protein, 686 aa, Artificial Sequence
  Synthetic polypeptide
MAAPDLAHGGHVSRDSVCLHEEQTQAAGMVAGWLINCYQDAVTFDDVAVDFTQEEWTLLDPSQRDLYRDVMLENYENLASVEWRLKTKGPALRQDRSWFRASNETQTARSHNGGQLCDRTQCGEAFSEHSGLSTHVRTQNTGDSCVSNHYERDFFIPCQKTLFKIGEQFSVLGQCGKAFSSTPNVVSQQACTRDRSLDYSSCGEVFLNQSYLQARAGSHNGEETWKWKPCGKALTHSMGCATPVEMHAVRNPHVCRECGKAFRYTAYLTGRVQVHPGEKPCELEECGKASPVSSSLTQHVRIHAAEKPCECKECGKAFTGLSGLSKHVQTDPGQKPYECKDCGKACGGFYLLNEHGKTHTREKPFACVVCGKYFRNSSCLNNHVRIHTGIKPYTCSYCGKAFTVRCGLTRHVRTHTGEKPYTCKDCGKAFCTSSGLTEHVRTHTGEKPYECKDCGKSFTVSSSLTEHARIHTGEKPYECKQCGKAFTGRSGLTKHMRTHTGEKPYECKDCGKAYNRVYLLNEHVKTHTEEKPFICTVCRKSFRNSSCLNKHIQIHTGIKPYECKDCGKTFTVSSSLTEHIRTHTGEKPYECKVCGKAFTTSSHLIVHIRTHTGEKPYICKECGKAFASSSHLIEHRRTHTGEKPYICNECGKAFRASSHLHKHGRIHTGQKPYKWYIFILGSCCGG

SEQ ID NO: 40613 - protein, 644 aa, Artificial Sequence
  Synthetic polypeptide
MLENYENLASVGHHLFQPSVIYWLEQEEELRAGRRAVLQEWRLKTKGPALRQDRSWFRASNETQTARSHNGGQLCDRTQCGEAFSEHSGLSTHVRTQNTGDSCVSNHYERDFFIPCQKTLFKIGEQFSVLGQCGKAFSSTPNVVSQQACTRDRSLDYSSCGEVFLNQSYLQARAGSHNGEETWKWKPCGKALTHSMGCATPVEMHAVRNPHVCRECGKAFRYTAYLTGRVQVHPGEKPCELEECGKASPVSSSLTQHVRIHAAEKPCECKECGKAFTGLSGLSKHVQTDPGQKPYECKDCGKACGGFYLLNEHGKTHTREKPFACVVCGKYFRNSSCLNNHVRIHTGIKPYTCSYCGKAFTVRCGLTRHVRTHTGEKPYTCKDCGKAFCTSSGLTEHVRTHTGEKPYECKDCGKSFTVSSSLTEHARIHTGEKPYECKQCGKAFTGRSGLTKHMRTHTGEKPYECKDCGKAYNRVYLLNEHVKTHTEEKPFICTVCRKSFRNSSCLNKHIQIHTGIKPYECKDCGKTFTVSSSLTEHIRTHTGEKPYECKVCGKAFTTSSHLIVHIRTHTGEKPYICKECGKAFASSSHLIEHRRTHTGEKPYICNECGKAFRASSHLHKHGRIHTGQKPYKWYIFILGSCCGG

SEQ ID NO: 40614 - protein, 203 aa, Artificial Sequence
  Synthetic polypeptide
MFDGYDSCSEDTSSSSSSEESEEEVAPLPSNLPIIKNNGQVYTYPDGKSGMATCEMCGMVGVRDAFYSKTKRFCSVSCSRSYSSNSKKASILARLQGKPPTKKAKVLQKQPLVAKLAAYAQYQATLQNQAKTKAAVSMEGFSWGNYINSNSFIAAPVTCFKHAPMGTCWGDISENVRVEVPNTDCSLPTKVFWIAGIVKLAAT

SEQ ID NO: 40615 - protein, 161 aa, Artificial Sequence
  Synthetic polypeptide
AERVETFLGWETCNRYELRSGAGQPLGQAAEESNCCARLCCGARRPLRVRLADPGDREVLRLLRPLHCGCSCCPCGLQEMEVQAPPGTTIGHVLQTWHPFLPKFSIQDADRQTVLRVVGPCWTCGCGTDTNFEFPLDLDVRVKAVLLGATFLIAGHGGSCL

SEQ ID NO: 40616 - protein, 261 aa, Artificial Sequence
  Synthetic polypeptide
MAGYLPPKGYAPSPPPPYPVTPGYPEPALHPGPGQAPVPAQVPAPAPGFALFPSPGPVALGSAAPFLPLPGVPSGLEFLVQIDQILIHQKAERVETFLGWETCNRYELRSGAGQPLGQAAEESNCCARLCCGARRPLRVRLADPGDREVLRLLRPLHCGCSCCPCGLQEFSIQDADRQTVLRVVGPCWTCGCGTDTNFEVKTRDESRSVGRISKQWGGLVREALTDADDFGLQFPLDLDVRVKAVLLGATFLIAGHGGSCL

SEQ ID NO: 40617 - protein, 285 aa, Artificial Sequence
  Synthetic polypeptide
MAGYLPPKGYAPSPPPPYPVTPGYPEPALHPGPGQAPVPAQVPAPAPGFALFPSPGPVALGSAAPFLPLPGVPSGLEFLVQIDQILIHQKAERVETFLGWETCNRYELRSGAGQPLGQAAEESNCCARLCCGARRPLRVRLADPGDREVLRLLRPLHCGCSCCPCGLQEMEVQAPPGTTIGHVLQTWHPFLPKFSIQDADRQTVLRVVGPCWTCGCGTDTNFEVKTRDESRSVGRISKQWGGLVREALTDADDFGLQFPLDLDVRVKAVLLGATFLIAGHGGSCL

SEQ ID NO: 40618 - protein, 116 aa, Artificial Sequence
  Synthetic polypeptide
MEVQAPPGTTIGHVLQTWHPFLPKFSIQDADRQTVLRVVGPCWTCGCGTDTNFEVKTRDESRSVGRISKQWGGLVREALTDADDFGLQFPLDLDVRVKAVLLGATFLIAGHGGSCL

SEQ ID NO: 40619 - protein, 798 aa, Artificial Sequence
  Synthetic polypeptide
ASGGCVRPARPERRLRSERAGVVRELCAQPGQVVAPGAVLVRLEGCSHPVVMKGLCAECGQDLTQLQSKNGKQQVPLSTATVSMVHSVPELMVSSEQAEQLGREDQQRLHRNRKLVLMVDLDQTLIHTTEQHCQQMSNKGIFHFQLGRGEPMLHTRLRPHCKDFLEKIAKLYELHVFTFGSRLYAHTIAGFLDPEKKLFSHRILSRDECIDPFSKTGNLRNLFPCGDSMVCIIDDREDVWKFAPNLITVKKYVYFQGTGDMNAPPGSRESQTRKKVNHSRGTEVSEPSPPVRDPEGVTQAPGVEPSNGLEKPARELNGSEAATPRDSPRPGKPDERDIWPPAQAPTSSQELAGAPEPQGSCAQGGRVAPGQRPAQGATGTDLDFDLSSDSESSSESEGTKSSSSASDGESEGKRGRQKPKAAPEGAGALAQGSSLEPGRPAAPSLPGEAEPGAHAPDKEPELGGQEEGERDGLCGLGNGCADRKEAETESQNSELSGVTAGESLDQSMEEEEEEDTDEDDHLIYLEEILVRVHTDYYAKYDRYLNKEIEEAPDIRKIVPELKSKVLADVAIIFSGLHPTNFPIEKTREHYHATALGAKILTRLVLSPDAPDRATHLIAARAGTEKVLQAQECGHLHVVNPDWLWSCLERWDKVEEQLFPLRDDHTKAQRENSPAAFPDREGVPPTALFHPMPVLPKAQPGPEVRIYDSNTGKLIRTGARGPPAPSSSLPIRQEPSSFRAVPPPQPQMFGEELPDAQDGEQPGPSRRKRQPSMSETMPLYTLCKEDLESMDKESARSPP

SEQ ID NO: 40620 - protein, 866 aa, Artificial Sequence
  Synthetic polypeptide
MEVPAAGRVPAEGAPTAAVAEVRCPGPAPLRLLEWRVAAGAAVRIGSVLAVFEAAASAQSSGASQSRVASGGCVRPARPERRLRSERAGVVRELCAQPGQVVAPGAVLVRLEGCSHPVVMKGLCAECGQDLTQLQSKNGKQQVPLSTATVSMVHSVPELMVSSEQAEQLGREDQQRLHRNRKLVLMVDLDQTLIHTTEQHCQQMSNKGIFHFQLGRGEPMLHTRLRPHCKDFLEKIAKLYELHVFTFGSRLYAHTIAGFLDPEKKLFSHRILSRDECIDPFSKTGNLRNLFPCGDSMVCIIDDREDVWKFAPNLITVKKYVYFQGTGDMNAPPGSRESQTRKKVNHSRGTEVSEPSPPVRDPEGVTQAPGVEPSNGLEKPARELNGSEAATPRDSPRPGKPDERDIWPPAQAPTSSQELAGAPEPQGSCAQGGRVAPGQRPAQGATGTDLDFDLSSDSESSSESEGTKSSSSASDGESEGKRGRQKPKAAPEGAGALAQGSSLEPGRPAAPSLPGEAEPGAHAPDKEPELGGQEEGERDGLCGLGNGCADRKEAETESQNSELSGVTAGESLDQSMEEEEEEDTDEDDHLIYLEEILVRVHTDYYAKYDRYLNKEIEEAPDIRKIVPELKSKVLADVAIIFSGLHPTNFPIEKTREHYHATALGAKILTRLVLSPDAPDRATHLIAARAGTEKVLQAQECGHLHVVNPDWLWSCLERWDKVEEQLFPLRDDHTKAQRENSPAAFPDREGVPPTALFHPMPVLPKAQPGPEVRIYDSNTGKLIRTGARGPPAPSSSLPIRQEPSSFRAVPPPQPQMFGEELPDAQDGEQPGPSRRKRQPSMSETMPLYTLCKEDLESMDKESARSPP

SEQ ID NO: 40621 - protein, 130 aa, Artificial Sequence
  Synthetic polypeptide
MEEGGNLGGLIKMVHLLVLSGAWGMQMWVTFVSGFLLFRSLPRHTFGLVQSKLFPFYFHISMGCAFINLCILASQHAWAQLTFWEASQLLRRLRQENCLNLGGRGCSEPRSCHCTPAWARERDSVSKKKK

SEQ ID NO: 40622 - protein, 69 aa, Artificial Sequence
  Synthetic polypeptide
MGCAFINLCILASQHAWAQLTFWEASQLLRRLRQENCLNLGGRGCSEPRSCHCTPAWARERDSVSKKKK

SEQ ID NO: 40623 - protein, 27 aa, Artificial Sequence
  Synthetic polypeptide
MAGARWLTPVIAALLEAKTGGSLGPRS

SEQ ID NO: 40624 - protein, 15 aa, Artificial Sequence
  Synthetic polypeptide
MKHYEELEQCLGYGK

SEQ ID NO: 40625 - protein, 133 aa, Artificial Sequence
  Synthetic polypeptide
MTCILVCFPGAPRPSEEAIRRELALDAALGCRIAELCASAQKPPSLNTVFRTLASEDIPDLPPGGGLDCKRGRMGLGSPTPRIWAQPWTWRPDSCCPLGILCFSGASTELKKKTDPFPNYMYQRKEGRPIKCL

SEQ ID NO: 40626 - protein, 143 aa, Artificial Sequence
  Synthetic polypeptide
MTCILVCFPGAPRPSEEAIRRELALDAALGCRIAELCASAQKPPSLNTVFRTLASEDIPDLPPGGGLDCKSARSQKSAERRGRMGLGSPTPRIWAQPWTWRPDSCCPLGILCFSGASTELKKKTDPFPNYMYQRKEGRPIKCL

SEQ ID NO: 40627 - protein, 140 aa, Artificial Sequence
  Synthetic polypeptide
MTCILVCFPGAPRPSEEAIRRELALDAALGCRIAELCASAQKPPSLNTVFRTLASEDIPDLPPGGGLDCKSQKSAERRGRMGLGSPTPRIWAQPWTWRPDSCCPLGILCFSGASTELKKKTDPFPNYMYQRKEGRPIKCL

SEQ ID NO: 40628 - protein, 352 aa, Artificial Sequence
  Synthetic polypeptide
MQRSIMAALKEWNGVVSESDSPVKRPGRKAARVLGSEGEEEDEALSPAKGQKPALDCSQVSPPRPATSPENNASLSDTSPMDSSPSGIPKRRTARKQLPKRTIQEVLEEQSEDEDREAKRKKEEEEETPKESLTEAEVATEKEGEDGDQPTTPPKPLKTSKAETPTESVSEPEVATKQELQEEEEQTKPPRRAPKTLSSFFTPRKPAVKKEVKEEEPGAPGKEGAAEGPLDPSGYNPAKNNYHPVEDACWKPGQKVPYLAVARTFEKIEEVSARLRMVETLSNLLRSVVALSPPDLLPVLYLSLNHLGPPQQGLELGVGDGVLLKAVAQATDVSPECGHARSSTAFLAPRAC

SEQ ID NO: 40629 - protein, 383 aa, Artificial Sequence
  Synthetic polypeptide
MQRSIMSFFHPKKEGKAKKPEKEASNSSRETEPPPKAALKEWNGVVSESDSPVKRPGRKAARVLGSEGEEEDEALSPAKGQKPALDCSQVSPPRPATSPENNASLSDTSPMDSSPSGIPKRRTARKQLPKRTIQEVLEEQSEDEDREAKRKKEEEEEETPKESLTEAEVATEKEGEDGDQPTTPPKPLKTSKAETPTESVSEPEVATKQELQEEEEQTKPPRRAPKTLSSFFTPRKPAVKKEVKEEEPGAPGKEGAAEGPLDPSGYNPAKNNYHPVEDACWKPGQKVPYLAVARTFEKIEEVSARLRMVETLSNLLRSVVALSPPDLLPVLYLSLNHLGPPQQGLELGVGDGVLLKAVAQATDVSPECGHARSSTAFLAPRAC

SEQ ID NO: 40630 - protein, 382 aa, Artificial Sequence
  Synthetic polypeptide
MQRSIMSFFHPKKEGKAKKPEKEASNSSRETEPPPKAALKEWNGVVSESDSPVKRPGRKAARVLGSEGEEEDEALSPAKGQKPALDCSQVSPPRPATSPENNASLSDTSPMDSSPSGIPKRRTARKQLPKRTIQEVLEEQSEDEDREAKRKKEEEEETPKESLTEAEVATEKEGEDGDQPTTPPKPLKTSKAETPTESVSEPEVATKQELQEEEEQTKPPRRAPKTLSSFFTPRKPAVKKEVKEEEPGAPGKEGAAEGPLDPSGYNPAKNNYHPVEDACWKPGQKVPYLAVARTFEKIEEVSARLRMVETLSNLLRSVVALSPPDLLPVLYLSLNHLGPPQQGLELGVGDGVLLKAVAQATDVSPECGHARSSTAFLAPRAC

SEQ ID NO: 40631 - protein, 315 aa, Artificial Sequence
  Synthetic polypeptide
MQRSIMSFFHPKKEGKAKKPEKEASNSSRETEPPPKAALKEWNGVVSESDSPVKRPGRKAARVLGSEGEEEDEALSPAKGQKPALDCSQVSPPRPATSPENNASLSDTSPMDSSPSGIPKRRTEAETPTESVSEPEVATKQELQEEEEQTKPPRRAPKTLSSFFTPRKPAVKKEVKEEEPGAPGKEGAAEGPLDPSGYNPAKNNYHPVEDACWKPGQKVPYLAVARTFEKIEEVSARLRMVETLSNLLRSVVALSPPDLLPVLYLSLNHLGPPQQGLELGVGDGVLLKAVAQATDVSPECGHARSSTAFLAPRAC

SEQ ID NO: 40632 - protein, 351 aa, Artificial Sequence
  Synthetic polypeptide
MQRSIMSFFHPKKEGKAKKPEKEASNSSRETEPPPKAALKEWNGVVSESDSPVKRPGRKAARVLGSEGEEEDEALSPAKGQKPALDCSQVSPPRPATSPENNASLSDTSPMDSSPSGIPKRRTEEETPKESLTEAEVATEKEGEDGDQPTTPPKPLKTSKAETPTESVSEPEVATKQELQEEEEQTKPPRRAPKTLSSFFTPRKPAVKKEVKEEEPGAPGKEGAAEGPLDPSGYNPAKNNYHPVEDACWKPGQKVPYLAVARTFEKIEEVSARLRMVETLSNLLRSVVALSPPDLLPVLYLSLNHLGPPQQGLELGVGDGVLLKAVAQATDVSPECGHARSSTAFLAPRAC

SEQ ID NO: 40633 - protein, 33 aa, Artificial Sequence
  Synthetic polypeptide
MVLPQILRRLRQENHLNPGNRVCGEPRSHHCTP

SEQ ID NO: 40634 - protein, 116 aa, Artificial Sequence
  Synthetic polypeptide
EDEEGLGPPGPASLGTTALFPRKAQPPQAFRGDGVPRVLGGQERPGPGPAHPGGAAHVAPQLQPPDHGDWTYEEQFKQLYELDGDPKRKEFLDDLFSFMQKRGVVAGACNPSYLGG

SEQ ID NO: 40635 - protein, 269 aa, Artificial Sequence
  Synthetic polypeptide
MKLQAVMETLLQRQQRARQELEARQQLPPDPPAAPPGRARAAPDEDREPESARMQRAQMAALAAMRAAAAGLGHPASPGGSEDGPPGSEEEDAAREGTPGSPGRGREGPGEEHFEDMASDEDMKPKWEEEEMEEDLGEDEEEEEEDYEDEEEEEDEEGLGPPGPASLGTTALFPRKAQPPQAFRGDGVPRVLGGQERPGPGPAHPGGAAHVAPQLQPPDHGDWTYEEQFKQLYELDGDPKRKEFLDDLFSFMQKRGVVAGACNPSYLGG

SEQ ID NO: 40636 - protein, 69 aa, Artificial Sequence
  Synthetic polypeptide
HLWFSDQHTSKGCSTSGENRHHAGLGRQWKPGAIHRSGSGGKGFYSWTASSLSDDVQHNASAQYSTRWR

SEQ ID NO: 40637 - protein, 1450 aa, Artificial Sequence
  Synthetic polypeptide
MSNFYEERTTMIAARDLQEFVPFGRDHCKHHPNALNLQLRQLQPASELWSSDGAAGLVGSLQEVTIHEKQKESWQLRKGVSEIGEDVDYDEELYVAGNMVIWSKGSKSQALAVYKAFTVDSPVQQALWCDFIISQDKSEKAYSSNEVEKCICILQSSCINMHSIEGKDYIASLPFQVANVWPTKYGLLFERSASSHEVPPGSPREPLPTMFSMLHPLDEITPLVCKSGSLFGSSRVQYVVDHAMKIVFLNTDPSIVMTYDAVQNVHSVWTLRRVKSEEENVVLKFSEQGGTPQNVATSSSLTAHLRSLSKGDSPVTSPFQNYSSIHSQSRSTSSPSLHSRSPSISNMAALSRAHSPALGVHSFSGVQRFNISSHNQSPKRHSISHSPNSNSNGSFLAPETEPIVPELCIDHLWTETITNIREKNSQASKVFITSDLCGQKFLCFLVESQLQLRCVKFQESNDKTQLIFGSVTNIPAKDAAPVEKIDTMLVLEGSGNLVLYTGVVRVGKVFIPGLPAPSLTMSNTMPRPSTPLDGVSTPKPLSKLLGSLDEVVLLSPVPELRDSSKLHDSLYNEDCTFQQLGTYIHSIRDPVHNRVTLELSNGSMVRITIPEIATSELVQTCLQAIKFILPKEIAVQMLVKWYNVHSAPGGPSYHSEWNLFVTCLMNMMGYNTDRLAWTRNFDFEGSLSPVIAPKKARPSETGSDDDWEYLLNSDYHQNVESHLLNRSLCLSPSEASQMKDEDFSQNLSLDSSTLLFTHIPAIFFVLHLVYEELKLNTLMGEGICSLVELLVQLARDLKLGPYVDHYYRDYPTLVRTTGQVCTIDPGQTGFMHHPSFFTSEPPSIYQWVSSCLKGEGMPPYPYLPGICERSRLVVLSIALYILGDESLVSDESSQYLTRITIAPQKLQVEQEENRFSFRHSTSVSSLAERLVVWMTNVGFTLRDLETLPFGIALPIRDAIYHCREQPASDWPEAVCLLIGRQDLSKQACEGNLPKGKSVLSSDVPSGTETEEEDDGMNDMNHEVMSLIWSEDLRVQDVRRLLQSAHPVRVNVVQYPELSDHEFIEEKENRLLQLCQRTMALPVGRGMFTLFSYHPVPTEPLPIPKLNLTGRAPPRNTTVDLNSGNIDVPPNMTSWASFHNGVAAGLKIAPASQIDSAWIVYNKPKHAELANEYAGFLMALGLNGHLTKLATLNIHDYLTKGHEMTSIGLLLGVSAAKLGTMDMSITRLLSIHIPALLPPTSTELDVPHNVQVAAVVGIGLVYQGTAHRHTAEVLLAEIGRPPGPEMEYCTDRESYSLAAGLALGMVCLGHGSNLIGMSDLNVPEQLYQYMVGGHRRFQTGMHREKHKSPSYQIKEGDTINVDVTCPGATLALAMIYLKTNNRSIADWLRAPDTMYLLDFVKPEFLLLRYDALMVLGNGSKLQLPVSHAVMRVNDPYSTVYYADREFHSIIG

SEQ ID NO: 40638 - protein, 42 aa, Artificial Sequence
  Synthetic polypeptide
MGNAGSMDSQQTDFRAHNVPLKLPMPEPGELEERFAIVLVSK

SEQ ID NO: 40639 - protein, 11 aa, Artificial Sequence
  Synthetic polypeptide
CQNMYSAWFYI

SEQ ID NO: 40640 - protein, 1212 aa, Artificial Sequence
  Synthetic polypeptide
MAAAAAAAVGGQQPSQPELPAPGLALDKAATAAHLKAALSRPDNRAGAEELQALLERVLSAERPLAAAAGGEDAAAAGGGGGPGAAEEEALEWCKCLLAGGGGYDEFCAAVRAYDPAALCGLVWTANFVAYRCRTCGISPCMSLCAECFHQGDHTGHDFNMFRSQAGGACDCGDSNVMRESGFCKRHQIKSSSNIPCVPKDLLMMSEFVLPRFIFCLIQYLREGYNEPAADGPSEKDLNKVLQLLEPQISFLEDLTKMGGAMRSVLTQVLTNQQNYKDLTSGLGENACVKKSHEKYLIALKSSGLTYPEDKLVYGVQEPSAGTSSLAVQGFIGATGTLGQVDSSDEDDQDGSQGLGKRKRVKLSSGTKDQSIMDVLKHKSFLEELLFWTIKYEFPQKMVTFLLNMLPDQEYKVAFTKTFVQHYAFIMKTLKKSHESDTMSNRIVHISVQLFSNEELARQVTEECQLLDIMVTVLLYMMESCLIKSELQDEENSLHVVVNCGEALLKNNTYWPLVSDFINILSHQSVAKRFLEDHGLLVTWMNFVSFFQGMNLNKRELNEHVEFESQTYYAAFAAELEACAQPMWGLLSHCKVRETQEYTRNVVRYCLEALQDWFDAINFVDEPAPNQVTFHLPLHRYYAMFLSKAVKCQELDLDSVLPDQEMLMKLMIHPLQIQASLAEIHSNMWVRNGLQIKGQAMTYVQSHFCNSMIDPDIYLLQVCASRLDPDYFISSVFERFKVVDLLTMASQHQNTVLDAEHERSMLEGALTFLVILLSLRLHLGMSDDEILRAEMVAQLCMNDRTHSSLLDLIPENPNPKSGIIPGSYSFESVLSAVADFKAPVFEPGGSMQQGMYTPKAEVWDQEFDPVMVILRTVYRRDVQSAMDRYTAFLKQSGKFPGNPWPPYKKRTSLHPSYKGLMRLLHCKTLHIVLFTLLYKILMDHQNLSEHVLCMVLYLIELGLENSAEEESDEEASVGGPERCHDSWFPGSNLVSNMRHFINYVRVRVPETAPEVKRDSPASTSSDNLGSLQNSGTAQVFSLVAERRKKFQEIINRSSSEANQVVRPKTSSKWSAPGSAPQLTTAILEIKESILSLLIKLHHKLSGKQNSYYPPWLDDIEILIQPEIPKYSHGDGITAVERILLKAASQSRMNKRIIEEICRKVTPPVPPKKVTAAEKKTLDKEERRQKARERQQKLLAEFASRQKSFMETAMDVD

SEQ ID NO: 40641 - protein, 3 aa, Artificial Sequence
  Synthetic polypeptide
SQS

SEQ ID NO: 40642 - protein, 164 aa, Artificial Sequence
  Synthetic polypeptide
MIEAFRDNGLNTLDHTTEISVSRLETVISSIYYQLNKRLPSTHQISVEQSISLLLNFMIAAYDSEGRGKLTVFSVKAMLATMCGGKMLDKLRYVFSQMSDSNGLMIFSKFDQFLKEVLKLPTAVFEGPSFGYTEHSVRTCFPQQDALRSTQYHFSGNSCQESIT

SEQ ID NO: 40643 - protein, 221 aa, Artificial Sequence [sequence omitted]

SEQ ID NO: 40644 - protein, 61 aa, Artificial Sequence
  Synthetic polypeptide
MAATSLMSALAARLLQPAHSCSLRLRPFHLAAVRNEAVVISGRKLAQQIKQEVRQERSRLQ

SEQ ID NO: 40645 - protein, 47 aa, Artificial Sequence
  Synthetic polypeptide
MAAPLVLVLVVAVTVRAALFRSSLAEFISERVEVVSPLSSWKRGCCP

SEQ ID NO: 40646 - protein, 347 aa, Artificial Sequence
  Synthetic polypeptide
MATNWGSLLQDKQQLEELARQAVDRALAEGVLLRTSQEPTSSEVVSYAPFTLFPSLVPSALLEQAYAVQMDFNLLVDAVSQNAAFLEQTLSSALVLLIAQEKERNIFDQRAIENELLARNIHVIRRTFEDISEKGSLDQDRRLFVDGQEIAVVYFRDGYMPRQYSLQNWEARLLLERSHAAKCPDIATQLAGTKKVQQELSRPGMLEMLLPGQPEAVARLRATFAGLYSLDVGEEGDQAIAEALAAPSRFVLKPQREGGGNNLYGEEMVQALKQLKDSEERASYILMEKIEPEPFENCLLRPGSPARVVQCISELGIFGVYVSYLRPHHRQMPAPCFLHSLKNDDPK

SEQ ID NO: 40647 - protein, 458 aa, Artificial Sequence
  Synthetic polypeptide
MATNWGSLLQDKQQLEELARQAVDRALAEGVLLRTSQEPTSSEVVSYAPFTLFPSLVPSALLEQAYAVQMDFNLLVDAVSQNAAFLEQTLSSTIKQDDFTARLFDIHKQVLKEGIAQTVFLGLNRSDYMFQRSADGSPALKQIEINTISASFGGLASRTPAVHRHVLSVLSKTKEAGKILSNNPSKGLALGIAKAWELYGSPNALVLLIAQEKERNIFDQRAIENELLARNIHVIRRTFEDISEKGSLDQDRRLFVDGQEIAVVYFRDGYMPRQYSLQNWEARLLLERSHAAKCPDIATQLAGTKKVQQELSRPGMLEMLLPGQPEAVARLRATFAGLYSLDVGEEGDQAIAEALAAPSRFVLKPQREGGGNNLYGEEMVQALKQLKDSEERASYILMEKIEPEPFENCLLRPGSPARVVQCISELGIFGVYVSYLRPHHRQMPAPCFLHSLKNDDPK

SEQ ID NO: 40648 - protein, 330 aa, Artificial Sequence
  Synthetic polypeptide
MFQRSADGSPALKQIEINTISASFGGLASRTPAVHRHVLSVLSKTKEAGKILSNNPSKGLALGIAKAWELYGSPNALVLLIAQEKERNIFDQRAIENELLARNIHVIRRTFEDISEKGSLDQDRRLFVDGQEIAVVYFRDGYMPRQYSLQNWEARLLLERSHAAKCPDIATQLAGTKKVQQELSRPGMLEMLLPGQPEAVARLRATFAGLYSLDVGEEGDQAIAEALAAPSRFVLKPQREGGGNNLYGEEMVQALKQLKDSEERASYILMEKIEPEPFENCLLRPGSPARVVQCISELGIFGVYVSYLRPHHRQMPAPCFLHSLKNDDPK

SEQ ID NO: 40649 - protein, 159 aa, Artificial Sequence
  Synthetic polypeptide
MEDRHVSLPSFNQLFGLSDPVNRAYFAVFDGHGGVDAARYAAVHVHTNAARQPELPTDPEGALREAFRRTDQMFLRKAKRERLQSGTTGVCALIAGATLHVAWLGDSQVILVQQGQVVKLMEPHRPERQVPSQSPATMLCKSQASRRGHMMVAPANNPC

SEQ ID NO: 40650 - protein, 223 aa, Artificial Sequence
  Synthetic polypeptide
MGLCPSTRETAPPAVLDAQSLAQSFFNRLWEVAGQWQKQVPLAARASQRQWLVSIHAIRNTRRKMEDRHVSLPSFNQLFGLSDPVNRAYFAVFDGHGGVDAARYAAVHVHTNAARQPELPTDPEGALREAFRRTDQMFLRKAKRERLQSGTTGVCALIAGATLHVAWLGDSQVILVQQGQVVKLMEPHRPERQVPSQSPATMLCKSQASRRGHMMVAPANNPC

SEQ ID NO: 40651 - protein, 327 aa, Artificial Sequence
  Synthetic polypeptide
MSSGAPQKSSPMASGAEETPGFLDTLLQDFPALLNPEDPLPWKAPGTVLSQEEVEGELAELAMGFLGSRKAPPPLAAALAHEAVSQLLQTDLSEFRKLPREEEEEEEDDDEEEKAPVTLLDAQSLAQSFFNRLWEVAGQWQKQVPLAARASQRQWLVSIHAIRNTRRKMEDRHVSLPSFNQLFGLSDPVNRAYFAVFDGHGGVDAARYAAVHVHTNAARQPELPTDPEGALREAFRRTDQMFLRKAKRERLQSGTTGVCALIAGATLHVAWLGDSQVILVQQGQVVKLMEPHRPERQVPSQSPATMLCKSQASRRGHMMVAPANNPC

SEQ ID NO: 40652 - protein, 498 aa, Artificial Sequence
  Synthetic polypeptide
MDKRVKKLPLMALSTTMAESFKELDPDSSMGKALEMSCAIQNQLARILAEFEMTLERDVLQPLSRLSEEELPAILKHKKSLQKLVSDWNTLKSRLSQATKNSGSSQGLGGSPGSHSHTTMANKVETLKEEEEELKRKVEQCRDEYLADLYHFVTKEDSYANYFIRLLEIQADYHRRSLSSLDTALAELRENHGQADHSPSMTATHFPRVYGVSLATHLQELGREIALPIEACVMMLLSEGMKEEGLFRLAAGASVLKRLKQTMASDPHSLEEFCSDPHAVAGALKSYLRELPEPLMTFDLYDDWMRAASLKEPGARLQALQEVCSRLPPENLSNLRYLMKFLARLAEEQEVNKMTPSNIAIVLGPNLLWPPEKEGDQAQLDAASVSSIQVVGVVEALIQSADTLFPGDINFNVSGLFSAVTLQDTVSDRLASEELPSTAVPTPATTPAPAPAPAPAPAPALASAATKESRAWWRTPVISATQETKTGESHEPRRRRSQ

SEQ ID NO: 40653 - protein, 562 aa, Artificial Sequence
  Synthetic polypeptide
MMKRQLHRMRQLAQTGSLGRTPETAEFLGEDLLQVEQRLEPAKRAAHNIHKRLQACLQGQSGADMDKRVKKLPLMALSTTMAESFKELDPDSSMGKALEMSCAIQNQLARILAEFEMTLERDVLQPLSRLSEEELPAILKHKKSLQKLVSDWNTLKSRLSQATKNSGSSQGLGGSPGSHSHTTMANKVETLKEEEEELKRKVEQCRDEYLADLYHFVTKEDSYANYFIRLLEIQADYHRRSLSSLDTALAELRENHGQADHSPSMTATHFPRVYGVSLATHLQELGREIALPIEACVMMLLSEGMKEEGLFRLAAGASVLKRLKQTMASDPHSLEEFCSDPHAVAGALKSYLRELPEPLMTFDLYDDWMRAASLKEPGARLQALQEVCSRLPPENLSNLRYLMKFLARLAEEQEVNKMTPSNIAIVLGPNLLWPPEKEGDQAQLDAASVSSIQVVGVVEALIQSADTLFPGDINFNVSGLFSAVTLQDTVSDRLASEELPSTAVPTPATTPAPAPAPAPAPAPALASAATKESRAWWRTPVISATQETKTGESHEPRRRRSQ

SEQ ID NO: 40654 - protein, 106 aa, Artificial Sequence
  Synthetic polypeptide
MAKHHPDLIFCRKQAGVAIGRLCEKCDGKCVICDSYVRPCTLVRICDECNYGSYQGRCVICGGPGVSDAYYCKECTIQEKDEAEVSGSGGQEIKTILANMVKPHLY

SEQ ID NO: 40655 - protein, 44 aa, Artificial Sequence
  Synthetic polypeptide
MKKQRKNKKRTLKQVEEEAEDKEDDEDKDEDEEDEEDKEEDEEE

SEQ ID NO: 40656 - protein, 36 aa, Artificial Sequence
  Synthetic polypeptide
MSGWESYYKTEGDEEAEEEQEENLEASGGGGRGQGG

SEQ ID NO: 40657 - protein, 245 aa, Artificial Sequence
  Synthetic polypeptide
MNGQLDLSGKLIIKAQLGEDIRRIPIHNEDITYDELVLMMQRVFRGKLLSNDEVTIKYKDEDGDLITIFDSSDLSFAIQCSRILKLTLFVNGQPRPLESSQVKYLRRELIELRNKVNRLLDSLEPPGEPGPSTNIPENDTVDGREEKSASDSSGKQSTQVMAASMSAFDPLKNQDEINKNVMSAFGLTDDQVSGPPSAPAEDRSGTPDSIASSSSAAHPPGVQPQQPPYTGAQTQAASACYRKTM

SEQ ID NO: 40658 - protein, 75 aa, Artificial Sequence
  Synthetic polypeptide
MGKMVSVINTVDTSHEDMIHDAQMDYYGTRLATCSSDRSVKIFDVRNGGQILIADLRGLMRVHNLPQNAQKRLRA

SEQ ID NO: 40659 - protein, 58 aa, Artificial Sequence
  Synthetic polypeptide
MIHDAQMDYYGTRLATCSSDRSVKIFDVRNGGQILIADLRGLMRVHNLPQNAQKRLRA

SEQ ID NO: 40660 - protein, 118 aa, Artificial Sequence
  Synthetic polypeptide
MREPVLTWCVPLELLCSHPLPLSAFLKSQVKLYTYRACAGKDEMGKMVSVINTVDTSHEDMIHDAQMDYYGTRLATCSSDRSVKIFDVRNGGQILIADLRGLMRVHNLPQNAQKRLRA

SEQ ID NO: 40661 - protein, 72 aa, Artificial Sequence
  Synthetic polypeptide
MVSVINTVDTSHEDMIHDAQMDYYGTRLATCSSDRSVKIFDVRNGGQILIADLRGLMRVHNLPQNAQKRLRA

SEQ ID NO: 40662 - protein, 128 aa, Artificial Sequence
  Synthetic polypeptide
MAATASPQPLATEDADSENSSFYYYDYLDEVAFMLCRKDAVVSFGKVFLPVFYSLIFVLGLSGNLLLLMVLLRYVPRRRMVEIYLLNLAISNLLFLVTLPFWGISVAWHWVFGSFLCKMVGNRASIKQ

SEQ ID NO: 40663 - protein, 238 aa, Artificial Sequence
  Synthetic polypeptide
MDRPGFVAALVAGGVAGVSVDLILFPLDTIKTRLQSPQGFSKAGGFHGIYAGVPSAAIGSFPNAAAFFITYEYVKWFLHADSSSYLTPMKHMLAASAGEVVACLIRVPSEVVKQRAQVSASTRTFQIFSNILYEEGIQGLYRGYKSTVLREIPFSLVQFPLWESLKDMDMGKYFMTKTSKAIATKAKIDKWDLIKLKSFCTAKETIIRAFRLPTEREEIFATYSSDKGLISRVHKELK

SEQ ID NO: 40664 - protein, 150 aa, Artificial Sequence
  Synthetic polypeptide
MKHMLAASAGEVVACLIRVPSEVVKQRAQVSASTRTFQIFSNILYEEGIQGLYRGYKSTVLREIPFSLVQFPLWESLKDMDMGKYFMTKTSKAIATKAKIDKWDLIKLKSFCTAKETIIRAFRLPTEREEIFATYSSDKGLISRVHKELK

SEQ ID NO: 40665 - protein, 287 aa, Artificial Sequence
  Synthetic polypeptide
MLGMYVPDRFSLKSSRVQDGMGLYTARRVRKGEKFGPFAGEKRMPEDLDENMDYRLMWEVRGSKGEVLYILDATNPRHSNWLRFVHEAPSQEQKNLAAIQEGENIFYLAVEDIETDTELLIGYLDSDMEAEEEEQQIMTVIKEGEVENSRRQSTAGRKDRLGCKEDYACPQCESSFTSEDILAEHLQTLHQKPTEEKEFKCKNCGKKFPVKQALQRHFEQHQETCRGDARFVCKADSCGKRLKSKDALKRHQENVHTGDPKKKLICSVCNKKCSSASSLQEHRKLLS

SEQ ID NO: 40666 - protein, 318 aa, Artificial Sequence
  Synthetic polypeptide
MLGMYVPDRFSLKSSRVQDGMGLYTARRVRKGEKFGPFAGEKRMPEDLDENMDYRLMWEVRGSKGEVLYILDATNPRHSNWLRFVHEAPSQEQKNLAAIQEGENIFYLAVEDIETDTELLIGYLDSDMEAEEEEQQIMTVIKEGEVENSRRQSTAGRKDRLGCKEDYACPQCESSFTSEDILAEHLQTLHQKPTEEKEFKCKNCGKKFPVKQALQRHVLQCTAKSSLKESSRSFQCSVCNSSFSSASSFEQHQETCRGDARFVCKADSCGKRLKSKDALKRHQENVHTGDPKKKLICSVCNKKCSSASSLQEHRKLLS

SEQ ID NO: 40667 - protein, 254 aa, Artificial Sequence
  Synthetic polypeptide
MFISLWEFFYGHFFRFWMKWLLRQMTGKCELQRIFDTYVGAQRTHRIENSLTYSKNKVLQKATHVVQSEVDKYVDDIMKEKNINPEKDASFKICMKMCLLQITGYKQLYLDVESVRKRPYDSDNLQHEELLMKLWNLLMPTKKLNARISKQWAEIGFQGDDPKTDFRGMGILGLINLVYFSENYTSEAHQILSRSNHPKLGYSYAIVGINLTEMAYSLLKSEALKFHLYNLVPGIPTMEHFHQFYSKQTLALSV

SEQ ID NO: 40668 - protein, 843 aa, Artificial Sequence
  Synthetic polypeptide
MAWMTYISNWFEQDDWYEGLQRANMSQVRQVGLLAAGCQPWNKDVCAASGDRFAYCATLAIYIYQLDHRYNEFKLHAIMSEHKKTITAISWCPHNPDLFASGSTDNLVIIWNVAEQKVIAKLDSTKGIPASLSWCWNAEDVVAFVSHRGPLFIWTISGPDSGVIVHKDAHSFLSDICMFRWHTHQKGKVVFGHIDGSLSIFHPDEEDPVTALEWDPLSTDYLLVVNLHYGIRLVDSESLSCITTFNLPSAAASVQCLAWVPSAPGMFITGDSQVGVLRIWNVSRTTPIDNLKLKKTGFHCLHVLNSPPRKKFSVQSPTKNHYTSSTSEAVPPPTLTQNQAFSLPPGHAVCCFLDGGVGLYDMGAKKWDFLRDLGHVETIFDCKFKPDDPNLLATASFDGTIKVWDINTLTAVYTSPGNEGVIYSLSWAPGGLNCIAGGTSRNGAFIWNVQKGKIIQRFNEHGTNGIFCIAWSHKDSKRIATCSSDGFCIIRTIDGKVLHKYKHPAAVFGCDWSQNNKDMIATGCEDTNVRVYYVATSSDQPLKVFSGHTAKVFHVKWSPLREGILCSGSDDGTVRIWDYTQDACINILNGHTAPVRGLMWNTEIPYLLISGSWDYTIKVWDTREGTCVDTVYDHGADVYGLTCHPSRPFTMASCSRDSTVRLWSLTALVTPVQINILADRSWEEIIGNTDYAIEPGTPPLLCGKVSRDIRQEIEKLTANSQVKKLRWFSECLSPPGGSDNLWNLVAVIKGQDDSLLPQNYCKGIMHLKHLIKFRTSEAQELTTVKMSKFGGGIGVPAKEERLKEAAEIHLRLGQIQRYCELMVELGEEAKAEGSLEDRSSRSA

SEQ ID NO: 40669 - protein, 860 aa, Artificial Sequence
  Synthetic polypeptide
MAWMTYISNWFEQDDWYEGLQRANMSQVRQVGLLAAGCQPWNKDVCAASGDRFAYCATLAIYIYQLDHRYNEFKLHAIMSEHKKTITAISWCPHNPDLFASGSTDNLVIIWNVAEQKVIAKLDSTKGIPASLSWCWNAEDVVAFVSHRGPLFIWTISGPDSGVIVHKDAHSFLSDICMFRWHTHQKGKVVFGHIDGSLSIFHPGNKNQKHVLRPESLEGTDEEDPVTALEWDPLSTDYLLVVNLHYGIRLVDSESLSCITTFNLPSAAASVQCLAWVPSAPGMFITGDSQVGVLRIWNVSRTTPIDNLKLKKTGFHCLHVLNSPPRKKFSVQSPTKNHYTSSTSEAVPPPTLTQNQAFSLPPGHAVCCFLDGGVGLYDMGAKKWDFLRDLGHVETIFDCKFKPDDPNLLATASFDGTIKVWDINTLTAVYTSPGNEGVIYSLSWAPGGLNCIAGGTSRNGAFIWNVQKGKIIQRFNEHGTNGIFCIAWSHKDSKRIATCSSDGFCIIRTIDGKVLHKYKHPAAVFGCDWSQNNKDMIATGCEDTNVRVYYVATSSDQPLKVFSGHTAKVFHVKWSPLREGILCSGSDDGTVRIWDYTQDACINILNGHTAPVRGLMWNTEIPYLLISGSWDYTIKVWDTREGTCVDTVYDHGADVYGLTCHPSRPFTMASCSRDSTVRLWSLTALVTPVQINILADRSWEEIIGNTDYAIEPGTPPLLCGKVSRDIRQEIEKLTANSQVKKLRWFSECLSPPGGSDNLWNLVAVIKGQDDSLLPQNYCKGIMHLKHLIKFRTSEAQELTTVKMSKFGGGIGVPAKEERLKEAAEIHLRLGQIQRYCELMVELGEEAKAEGSLEDRSSRSA

SEQ ID NO: 40670 - protein, 11 aa, Artificial Sequence
  Synthetic polypeptide
MELGCCDKRTG

SEQ ID NO: 40671 - protein, 836 aa, Artificial Sequence
  Synthetic polypeptide
MSQVRQVGLLAAGCQPWNKDVCAASGDRFAYCATLAIYIYQLDHRYNEFKLHAIMSEHKKTITAISWCPHNPDLFASGSTDNLVIIWNVAEQKVIAKLDSTKGIPASLSWCWNAEDVVAFVSHRGPLFIWTISGPDSGVIVHKDAHSFLSDICMFRWHTHQKGKVVFGHIDGSLSIFHPGNKNQKHVLRPESLEGTDEEDPVTALEWDPLSTDYLLVVNLHYGIRLVDSESLSCITTFNLPSAAASVQCLAWVPSAPGMFITGDSQVGVLRIWNVSRTTPIDNLKLKKTGFHCLHVLNSPPRKKFSVQSPTKNHYTSSTSEAVPPPTLTQNQAFSLPPGHAVCCFLDGGVGLYDMGAKKWDFLRDLGHVETIFDCKFKPDDPNLLATASFDGTIKVWDINTLTAVYTSPGNEGVIYSLSWAPGGLNCIAGGTSRNGAFIWNVQKGKIIQRFNEHGTNGIFCIAWSHKDSKRIATCSSDGFCIIRTIDGKVLHKYKHPAAVFGCDWSQNNKDMIATGCEDTNVRVYYVATSSDQPLKVFSGHTAKVFHVKWSPLREGILCSGSDDGTVRIWDYTQDACINILNGHTAPVRGLMWNTEIPYLLISGSWDYTIKVWDTREGTCVDTVYDHGADVYGLTCHPSRPFTMASCSRDSTVRLWSLTALVTPVQINILADRSWEEIIGNTDYAIEPGTPPLLCGKVSRDIRQEIEKLTANSQVKKLRWFSECLSPPGGSDNLWNLVAVIKGQDDSLLPQNYCKGIMHLKHLIKFRTSEAQELTTVKMSKFGGGIGVPAKEERLKEAAEIHLRLGQIQRYCELMVELGEEAKAEGSLEDRSSRSA

SEQ ID NO: 40672 - protein, 354 aa, Artificial Sequence
  Synthetic polypeptide
MALKDTGSGGSTILPISEMVSSSSSPGASAAAAPGPCAPSPFPEVVELNVGGQVYVTKHSTLLSVPDSTLASMFSPSSPRGGARRRGELPRDSRARFFIDRDGFLFRYVLDYLRDKQLALPEHFPEKERLLREAEYFQLTDLVKLLSPKVTKQNSLNDEGCQSDLEDNVSQGSSDALLLRGAAAAVPSGPGAHGGGGGGGAQDKRSGFLTLGYRGSYTTVRDNQADAKFRRVARIMVCGRIALAKEVFGDTLNESRDPDRQPEKYTSRFYLKFTYLEQAFDRLSEAGFHMVACNSSGTAAFVNQYRDDKIWSSYTEYIFFRFKTSVEEVTTDRVEIARELDFKVECCSLMIKLE

SEQ ID NO: 40673 - protein, 25 aa, Artificial Sequence
  Synthetic polypeptide
STATTRSGAATPSTFSSGSKLQWRK

SEQ ID NO: 40674 - protein, 394 aa, Artificial Sequence
  Synthetic polypeptide
MPYTTYLVEKGASHSFVAEAKPPTVTMPRIKALMTGSLPGFVDVIRNLNSPALLEDSVIRQAKAAGKRIVFYGDETWVKLFPKHFVEYDGTTSFFVSDYTEVDNNVTRHLDKVLKRGDWDILILHYLGLDHIGHISGPNSPLIGQKLSEMDSVLMKIHTSLQSKERETPLPNLLVLCGDHGMSETGSHGASSTEEVNTPLILISSAFERKPGDIRHPKHVQQTDVAATLAIALGLPIPKDSVGSLLFPVVEGRPMREQLRFLHLNTVQLSKLLQENVPSYEKDPGFEQFKMSERLHGNWIRLYLEEKHSEVLFNLGSKVLRQYLDALKTLSLSLSAQVAQYDIYSMMVGTVVVLEVLTLLLLSVPQALRRKAELEVPLSSPGFSLLFYLVMGCR

SEQ ID NO: 40675 - protein, 463 aa, Artificial Sequence
  Synthetic polypeptide
MRLGSGTFATCCVAIEVLGIAVFLRGFFPAPVRSSARAEHGAEPPAPEPSAGASSNWTTLPPPLFSKVVIVLIDALRDDFVFGSKGVKFMPYTTYLVEKGASHSFVAEAKPPTVTMPRIKALMTGSLPGFVDVIRNLNSPALLEDSVIRQAKAAGKRIVFYGDETWVKLFPKHFVEYDGTTSFFVSDYTEVDNNVTRHLDKVLKRGDWDILILHYLGLDHIGHISGPNSPLIGQKLSEMDSVLMKIHTSLQSKERETPLPNLLVLCGDHGMSETGSHGASSTEEVNTPLILISSAFERKPGDIRHPKHVQQTDVAATLAIALGLPIPKDSVGSLLFPVVEGRPMREQLRFLHLNTVQLSKLLQENVPSYEKDPGFEQFKMSERLHGNWIRLYLEEKHSEVLFNLGSKVLRQYLDALKTLSLSLSAQVAQFSPCSCSASHRHCAERLSWKSHCHLLGFLCSFIW

SEQ ID NO: 40676 - protein, 483 aa, Artificial Sequence
  Synthetic polypeptide
MRLGSGTFATCCVAIEVLGIAVFLRGFFPAPVRSSARAEHGAEPPAPEPSAGASSNWTTLPPPLFSKVVIVLIDALRDDFVFGSKGVKFMPYTTYLVEKGASHSFVAEAKPPTVTMPRIKALMTGSLPGFVDVIRNLNSPALLEDSVIRQAKAAGKRIVFYGDETWVKLFPKHFVEYDGTTSFFVSDYTEVDNNVTRHLDKVLKRGDWDILILHYLGLDHIGHISGPNSPLIGQKLSEMDSVLMKIHTSLQSKERETPLPNLLVLCGDHGMSETGSHGASSTEEVNTPLILISSAFERKPGDIRHPKHVQQTDVAATLAIALGLPIPKDSVGSLLFPVVEGRPMREQLRFLHLNTVQLSKLLQENVPSYEKDPGFEQFKMSERLHGNWIRLYLEEKHSEVLFNLGSKVLRQYLDALKTLSLSLSAQVAQYDIYSMMVGTVVVLEVLTLLLLSVPQALRRKAELEVPLSSPGFSLLFYLVMGCR

SEQ ID NO: 40677 - protein, 475 aa, Artificial Sequence
  Synthetic polypeptide
MRLGSGTFATCCVAIEVLGIAVFLRGFFPAPVRSSARAEHGAEPPAPEPSAGASSNWTTLPPPLFSKVVIVLIDALRDDFVFGSKGVKFMPYTTYLVEKGASHSFVAEAKPPTVTMPRIKALMTGSLPGFVDVIRNLNSPALLEDSVIRQAKAAGKRIVFYGDETWVKLFPKHFVEYDGTTSFFVSDYTEVDNNVTRHLDKVLKRGDWDILILHYLGLDHIGHISGPNSPLIGQKLSEMDSVLMKIHTSLQSKERETPLPNLLVLCGDHGMSETGSHGASSTEEVNTPLILISSAFERKPGDIRHPKHVQQTDVAATLAIALGLPIPKDSVGSLLFPVVEGRPMREQLRFLHLNTVQLSKLLQENVPSYEKDPGFEQFKMSERLHGNWIRLYLEEKHSEVLFNLGSKVLRQYLDALKTLSLSLSAQVAQYDIYSMMVLTLLLLSVPQALRRKAELEVPLSSPGFSLLFYLVMGCR

SEQ ID NO: 40678 - protein, 350 aa, Artificial Sequence
  Synthetic polypeptide
MRLGSGTFATCCVAIEVLGIAVFLRGFFPAPVRSSARAEHGAEPPAPEPSAGASSNWTTLPPPLFSKVVIVLIDALRDDFVFGSKGVKFMPYTTYLVEKGASHSFVAEAKPPTVTMPRIKERETPLPNLLVLCGDHGMSETGSHGASSTEEVNTPLILISSAFERKPGDIRHPKHVQQTDVAATLAIALGLPIPKDSVGSLLFPVVEGRPMREQLRFLHLNTVQLSKLLQENVPSYEKDPGFEQFKMSERLHGNWIRLYLEEKHSEVLFNLGSKVLRQYLDALKTLSLSLSAQVAQYDIYSMMVGTVVVLEVLTLLLLSVPQALRRKAELEVPLSSPGFSLLFYLVMGCR

SEQ ID NO: 40679 - protein, 341 aa, Artificial Sequence
  Synthetic polypeptide
MTGSLPGFVDVIRNLNSPALLEDSVIRQAKAAGKRIVFYGDETWVKLFPKHFVEYDGTTSFFVSDYTEVDNNVTRHLDKVLKRGDWDILILHYLGLDHIGHISGPNSPLIGQKLSEMDSVLMKIHTSLQSKERETPLPNLLVLCGDHGMSETGSHGASSTEEVNTPLILISSAFERKPGDIRHPKHVQQTDVAATLAIALGLPIPKDSVGSLLFPVVEGRPMREQLRFLHLNTVQLSKLLQENVPSYEKDPGFEQFKMSERLHGNWIRLYLEEKHSEVLFNLGSKVLRQYLDALKTLSLSLSAQVAQFSPCSCSASHRHCAERLSWKSHCHLLGFLCSFIW

SEQ ID NO: 40680 - protein, 83 aa, Artificial Sequence
  Synthetic polypeptide
MADNLSDTLKKLKITAVDKTEDSLEGCLDCLLQALAQNNTETSEKIQASGILQLFASLLTPQSSCKAKVANIIAEVAKNVPCL

SEQ ID NO: 40681 - protein, 82 aa, Artificial Sequence
  Synthetic polypeptide
MDNLSDTLKKLKITAVDKTEDSLEGCLDCLLQALAQNNTETSEKIQASGILQLFASLLTPQSSCKAKVANIIAEVAKNVPCL

SEQ ID NO: 40682 - protein, 12 aa, Artificial Sequence
  Synthetic polypeptide
MDTAEEDLQFLS

SEQ ID NO: 40683 - protein, 280 aa, Artificial Sequence
  Synthetic polypeptide
MQLSQDYNNEDEFGRKLRFLLQQLPPVNYSLLKFLCRFLANVASHHEEIWSANSLAAVFGPDVFHIYTDVEDMKEQEIVSRIMAGLLENYYEFFENEEEDFSSNDLSSITEQVNELSEEEEEDEKLEHIEELPEEGAEKSNDMPEVVQLRMTENILESNSVTATSTHISPISILPASTDILERTIRAAVEQHLFDLQSSIDHDLKNLQQQSVVCNNEAESIHCDGEGSNNQIDIADDIINASESNRDCSKPVASTNLDNEAMQQDCVFENEENTQIKTSW

SEQ ID NO: 40684 - protein, 398 aa, Artificial Sequence
  Synthetic polypeptide
MRKSSSPSLSNCNSVLANKIFGIPLDELQQGGHPDNEVPFIVRHVVDYIEEHGGLEQQGLFQVNGNAETVEWLRQRYDSGEEVDLVKEADVPSAISLLRFFLQELPEPVIPGSLHIHLMQLSQDYNNEDEFGRKLRFLLQQLPPVNYSLLKFLCRFLANVASHHEEIWSANSLAAVFGPDVFHIYTDVEDMKEQEIVSRIMAGLLENYYEFFENEEEDFSSNDLSSITEQVNELSEEEEEDEKLEHIEELPEEGAEKSNDMPEVVQLRMTENILESNSVTATSTHISPISILPASTDILERTIRAAVEQHLFDLQSSIDHDLKNLQQQSVVCNNEAESIHCDGEGSNNQIDIADDIINASESNRDCSKPVASTNLDNEAMQQDCVFENEENTQIKTSW

SEQ ID NO: 40685 - protein, 536 aa, Artificial Sequence
  Synthetic polypeptide
MPRRKKKVKEVSESRNLEKKDVETTSSVSVKRKRRLEDAFIVISDSDGEEPKEENGLQKTKTKQSNRAKCLAKRKIAQMTEEEQFALALKMSEQEAREVNSQEEEEEELLRKAIAESLNSCRPSDASATRSRPLATGPSSQSHQEKTTDSGLTEGIWQLVPPSLFKGSHISQGNEAEEREEPWDHTEKTEEEPVSGSSGSWDQSSQPVFENVNVKSFDRCTGHSAEHTQCGKPQESTGRGSAFLKAVQGSGDTSRHCLPTLADAKGLQDTGGTVNYFWGIPFCPDGVDPNQYTKVILCQLEVYQKSLKMAQRQLLNKKGFGEPVLPRPPSLIQNECGQGEQASEKNECISEDMGDEDKEERQESRASDWHSKTKDFQESSIKSLKEKLLLEEEPTTSHGQSSQGIVEETSEEGNSVPASQSVAALTSKRSLVLMPESSAEEITVCPETQLSSSETFDLEREVSPGSRDILDGVRIIMADKEVGNKEDAEKEVAISTFSSSNQVSCPLCDQCFPPTKIERHAMYCNGLMEEDTDKVC

SEQ ID NO: 40686 - protein, 370 aa, Artificial Sequence
  Synthetic polypeptide
MPRRKKKVKEVSESRNLEKKDVETTSSVSVKRKRRLEDAFIVISDSDGEEPKEENGLQKTKTKQSNRAKCLAKRKIAQMTEEEQFALALKMSEQEAREVNSQEEEEEELLRKAIAESLNSCRPSDASATRSRPLATGPSSQSHQEKTTDSGLTEGIWQLVPPSLFKGSHISQGNEAEEREEPWDHTEKTEEEPVSGSSGSWDQSSQPVFENVNVKSFDRCTGHSAEHTQCGKPQSSQGIVEETSEEGNSVPASQSVAALTSKRSLVLMPESSAEEITVCPETQLSSSETFDLEREVSPGSRDILDGVRIIMADKEVGNKEDAEKEVAISTFSSSNQVSCPLCDQCFPPTKIERHAMYCNGLMEEDTDKVC

SEQ ID NO: 40687 - protein, 255 aa, Artificial Sequence
  Synthetic polypeptide
MPRRKKKVKEVSESRNLEKKDVETTSSVSVKRKRRLEDAFIVISDSDGEEPKEENGLQKTKTKQSNRAKCLAKRKIAQMTEEEQFALALKMSEQEAREVNSQEEEEEELLRKAIAESLNSSQGIVEETSEEGNSVPASQSVAALTSKRSLVLMPESSAEEITVCPETQLSSSETFDLEREVSPGSRDILDGVRIIMADKEVGNKEDAEKEVAISTFSSSNQVSCPLCDQCFPPTKIERHAMYCNGLMEEDTDKVC

SEQ ID NO: 40688 - protein, 142 aa, Artificial Sequence
  Synthetic polypeptide
MAVLIVTENYLEFGLETGFTNFSDSAMQFLEKQGLESQSPVSKLTFKFFLAIFCSFIGAFLTFPGLRLAQMHLDALNLATEKITQTLLHINFLAPLFMVLLWVKPITKDYIMNPPLGKESIPLLFNFTEPLFPHLEDEDNSI

SEQ ID NO: 40689 - protein, 324 aa, Artificial Sequence
  Synthetic polypeptide
MGVIGIQLVVTMVMASVMQKIIPHYSLARWLLCNGSLRWYQHPTEEELRILAGKQQKGKTKKDRKYNGHIESKPLTIPKDIDLHLETKSVTEVDTLALHYFPEYQWLVDFTVAATVVYLVTEVYYNFMKPTQEMNISLVWCLLVLSFAIKVLFSLTTHYFKVEDGGERSVCVTFGFFFFVKAMAVLIVTENYLEFGLETGFTNFSDSAMQFLEKQGLESQSPVSKLTFKFFLAIFCSFIGAFLTFPGLRLAQMHLDALNLATEKITQTLLHINFLAPLFMVLLWVKPITKDYIMNPPLGKESIPLLFNFTEPLFPHLEDEDNSI

SEQ ID NO: 40690 - protein, 197 aa, Artificial Sequence
  Synthetic polypeptide
MKPTQEMNISLVWCLLVLSFAIKVLFSLTTHYFKVEDGGERSVCVTFGFFFFVKAMAVLIVTENYLEFGLETGFTNFSDSAMQFLEKQGLESQSPVSKLTFKFFLAIFCSFIGAFLTFPGLRLAQMHLDALNLATEKITQTLLHINFLAPLFMVLLWVKPITKDYIMNPPLGKESIPLLFNFTEPLFPHLEDEDNSI

SEQ ID NO: 40691 - protein, 313 aa, Artificial Sequence
  Synthetic polypeptide
MVMASVMQKIIPHYSLARWLLCNGSLRWYQHPTEEELRILAGKQQKGKTKKDRKYNGHIESKPLTIPKDIDLHLETKSVTEVDTLALHYFPEYQWLVDFTVAATVVYLVTEVYYNFMKPTQEMNISLVWCLLVLSFAIKVLFSLTTHYFKVEDGGERSVCVTFGFFFFVKAMAVLIVTENYLEFGLETGFTNFSDSAMQFLEKQGLESQSPVSKLTFKFFLAIFCSFIGAFLTFPGLRLAQMHLDALNLATEKITQTLLHINFLAPLFMVLLWVKPITKDYIMNPPLGKESIPLLFNFTEPLFPHLEDEDNSI

SEQ ID NO: 40692 - protein, 1829 aa, Artificial Sequence
  Synthetic polypeptide
MQLCIFCCCCILFYFDLYDFGRGYDFTIQENGLQIDQPPEIGNISIVRIIIMKNDNAEGIIEFDPKYTAFEVEEDVGLIMIPVVRLHGTYGYVTADFISQSSSASPGGVDYILHGSTVTFQHGQNLSFINISIIDDNESEFEEPIEILLTGATGGAVLGRHLVSRIIIAKSDSPFGVIRFLNQSKISIANPNSTMILSLVLERTGGLLGEIQVNWETVGPNSQEALLPQNRDIADPVSGLFYFGEGEGGVRTIILTIYPHEEIEVEETFIIKLHLVKGEAKLDSRAKDVTLTIQEFGDPNGVVQFAPETLSKKTYSEPLALEGPLLITFFVRRVKGTFGEIMVYWELSSEFDITEDFLSTSGFFTIADGESEASFDVHLLPDEVPEIEEDYVIQLVSVEGGAELDLEKSITWFSVYANDDPHGVFALYSDRQSILIGQNLIRSIQINITRLAGTFGDVAVGLRISSDHKEQPIVTENAERQLVVKDGATYKVDVVPIKNQVFLSLGSNFTLQLVTVMLVGGRFYGMPTILQEAKSAVLPVSEKAANSQVGFESTAFQLMNITAGTSHVMISRRGTYGALSVAWTTGYAPGLEIPEFIVVGNMTPTLGSLSFSHGEQRKGVFLWTFPSPGWPEAFVLHLSGVQSSAPGGAQLRSGFIVAEIEPMGVFQFSTSSRNIIVSEDTQMIRLHVQRLFGFHSDLIKVSYQTTAGSAKPLEDFEPVQNGELFFQKFQTEVDFEITIINDQLSEIEEFFYINLTSVEIRGLQKFDVNWSPRLNLDFSVAVITILDNDDLAGMDISFPETTVAVAVDTTLIPVETESTTYLSTSKTTTILQPTNVVAIVTEATGVSAIPEKLVTLHGTPAVSEKPDVATVTANVSIHGTFSLGPSIVYIEEEMKNGTFNTAEVLIRRTGGFTGNVSITVKTFGERCAQMEPNALPFRGIYGISNLTWAVEEEDFEEQTLTLIFLDGERERKVSVQILDDDEPEGQEFFYVFLTNPQGGAQIVEEKDDTGFAAFAMVIITGSDLHNGIIGFSEESQSGLELREGAVMRRLHLIVTRQPNRAFEDVKVFWRVTLNKTVVVLQKDGVNLVEELQSVSGTTTCTMGQTKCFISIELKPEKVPQVEVYFFVELYEATAGAAINNSARFAQIKILESDESQSLVYFSVGSRLAVAHKKATLISLQVARDSGTGLMMSVNFSTQELRSAETIGRTIISPAISGKDFVITEGTLVFEPGQRSTVLDVILTPETGSLNSFPKRFQIVLFDPKGGARIDKVYGTANITLVSDADSQAIWGLADQLHQPVNDDILNRVLHTISMKVATENTDEQLSAMMHLIEKITTEGKIQAFSVASRTLFYEILCSLINPKRKDTRGFSHFAEVTENFAFSLLTNVTCGSPGEKSKTILDSCPYLSILALHWYPQQINGHKFEGKEGDYIRIPERLLDVQDAEIMAGKSTCKLVQFTEYSSQQWFISGNNLPTLKNKVLSLSVKGQSSQLLTNDNEVLYRIYAAEPRIIPQTSLCLLWNQAAASWLSDSQFCKVVEETADYVECACSHMSVYAVYARTDNLSSYNEAFFTSGFICISGLCLAVLSHIFCARYSMFAAKLLTHMMAASLGTQILFLASAYASPQLAEESCSAMAAVTHYLYLCQFSWMLIQSVNFWYVLVMNDEHTERRYLLFFLLSWGLPAFVVILLIVILKGIYHQSMSQIYGLIHGDLCFIPNVYAALFTAALVPLTCLVVVFVVFIHAYQVKPQWKAYDDVFRGRTNAAEIPLILYLFALISVTWLWGGLHMAYRHFWMLVLFVIFNSLQAQRWKGLALSQMRLWSWTFGLMLE

SEQ ID NO: 40693 - protein, 6168 aa, Artificial Sequence
  Synthetic polypeptide
MSVFLGPGMPSASLLVNLLSALLILFVFGETEIRFTGQTEFVVNETSTTVIRLIIERIGEPANVTAIVSLYGEDAGDFFDTYAAAFIPAGETNRTVYIAVCDDDLPEPDETFIFHLTLQKPSANVKLGWPRTVTVTILSNDNAFGIISFNMLPSIAVSEPKGRNESMPLTLIREKGTYGMVMVTFEVEGGPNPPDEDLSPVKGNITFPPGRATVIYNLTVLDDEVPENDEIFLIQLKSVEGGAEINTSRNSIEIIIKKNDSPVRFLQSIYLVPEEDHILIIPVVRGKDNNGNLIGSDEYEVSISYAVTTGNSTAHAQQNLDFIDLQPNTTVVFPPFIHESHLKFQIVDDTIPEIAESFHIMLLKDTLQGDAVLISPSVVQVTIKPNDKPYGVLSFNSVLFERTVIIDEDRISRYEEITVVRNGGTHGNVSANWVLTRNSTDPSPVTADIRPSSGVLHFAQGQMLATIPLTVVDDDLPEEAEAYLLQILPHTIRGGAEVSEPAELLFYIQDSDDVYGLITFFPMENQKIESSPGERYLSLSFTRLGGTKGDVRLLYSVLYIPAGAVDPLQAKEGILNISRRNDLIFPEQKTQVTTKLPIRNDAFLQNGAHFLVQLETVELLNIIPLIPPISPRFGEICNISLLVTPAIANGEIGFLSNLPIILHEPEDFAAEVVYIPLHRDGTDGQATVYWSLKPSGFNSKAVTPDDIGPFNGSVLFLSGQSDTTINITIKGDDIPEMNETVTLSLDRVNVENQVLKSGYTSRDLIILENDDPGGVFEFSPASRGPYVIKEGESVELHIIRSRGSLVKQFLHYRVEPRDSNEFYGNTGVLEFKPGEREIVITLLARLDGIPELDEHYWVVLSSHGERESKLGSATIVNITILKNDDPHGIIEFVSDGLIVMINESKGDAIYSAVYDVVRNRGNFGDVSVSWVVSPDFTQDVFPVQGTVVFGDQEFSKNITIYSLPDEIPEEMEEFTVILLNGTGGAKVGNRTTATLRIRRNDDPIYFAEPRVVRVQEGETANFTVLRNGSVDVTCMVQYATKDGKATARERDFIPVEKGETLIFEVGSRQQSISIFVNEDGIPETDEPFYIILLNSTGDTVVYQYGVATVIIEANDDPNGIFSLEPIDKAVEEGKTNAFWILRHRGYFGSVSVSWQLFQNDSALQPGQEFYETSGTVNFMDGEEAKPIILHAFPDKIPEFNEFYFLKLVNISGGSPGPGGQLAETNLQVTVMVPFNDDPFGVFILDPECLEREVAEDVLSEDDMSYITNFTILRQQGVFGDVQLGWEILSSEFPAGLPPMIDFLLVGIFPTTVHLQQHMRRHHSGTDALYFTGLEGAFGTVNPKYHPSRNNTIANFTFSAWVMPNANTNGFIIAKDDGNGSIYYGVKIQTNESHVTLSLHYKTLGSNATYIAKTTVMKYLEESVWLHLLIILEDGIIEFYLDGNAMPRGIKSLKGEAITDGPGILRIGAGINGNDRFTGLMQDVRSYERKLTLEEIYELHAMPAKSDLHPISGYLEFRQGETNKSFIISARDDNDEEGEELFILKLVSVYGGARISEENTTARLTIQKSDNANGLFGFTGACIPEIAEEGSTISCVVERTRGALDYVHVFYTISQIETDGINYLVDDFANASGTITFLPWQRSEVLNIYVLDDDIPELNEYFRVTLVSAIPGDGKLGSTPTSGASIDPEKETTDITIKASDHPYGLLQFSTGLPPQPKDAMTLPASSVPHITVEEEDGEIRLLVIRAQGLLGRVTAEFRTVSLTAFSPEDYQNVAGTLEFQPGERYKYIFINITDNSIPELEKSFKVELLNLEGGVAELFRVDGSGSGDGDMEFFLPTIHKRASLGVASQILVTIAASDHAHGVFEFSPESLFVSGTEPEDGYSTVTLNVIRHHGTLSPVTLHWNIDSDPDGDLAFTSGNITFEIGQTSANITVEILPDEDPELDKAFSVSVLSVSSGSLGAHINATLTVLASDDPYGIFIFSEKNRPVKVEEATQNITLSIIRLKGLMGKVLVSYATLDDMEKPPYFPPNLARATQGRDYIPASGFALFGANQSEATIAISILDDDEPERSESVFIELLNSTLVAKVQSRSIPNSPRLGPKVETIAQLIIIANDDAFGTLQLSAPIVRVAENHVGPIINVTRTGGAFADVSVKFKAVPITAIAGEDYSIASSDVVLLEGETSKAVPIYVINDIYPELEESFLVQLMNETTGGARLGALTEAVIIIEASDDPYGLFGFQITKLIVEEPEFNSVKVNLPIIRNSGTLGNVTVQWVATINGQLATGDLRVVSGNVTFAPGETIQTLLLEVLADDVPEIEEVIQVQLTDASGGGTIGLDRIANIIIPANDDPYGTVAFAQMVYRVQEPLERSSCANITVRRSGGHFGRLLLFYSTSDIDVVALAMEEGQDLLSYYESPIQGVPDPLWRTWMNVSAVGEPLYTCATLCLKEQACSAFSFFSASEGPQCFWMTSWISPAVNNSDFWTYRKNMTRVASLFSGQAVAGSDYEPVTRQWAIMQEGDEFANLTVSILPDDFPEMDESFLISLLEVHLMNISASLKNQPTIGQPNISTVVIALNGDAFGVFVIYNISPNTSEDGLFVEVQEQPQTLVELMIHRTGGSLGQVAVEWRVVGGTATEGLDFIGAGEILTFAEGETKKTVILTILDDSEPEDDESIIVSLVYTEGGSRILPSSDTVRVNILANDNVAGIVSFQTASRSVIGHEGEILQFHVIRTFPGRGNVTVNWKIIGQNLELNFANFSGQLFFPEGSLNTTLFVHLLDDNIPEEKEVYQVILYDVRTQGVPPAGIALLDAQGYAAVLTVEASDEPHGVLNFALSSRFVLLQEANITIQLFINREFGSLGAINVTYTTVPGMLSLKNQTVGNLAEPEVDFVPIIGFLILEEGETAAAINITILEDDVPELEEYFLVNLTYVGLTMAASTSFPPRLDSEGLTAQVIIDANDGARGVIEWQQSRFEVNETHGSLTLVAQRSREPLGHVSLFVYAQNLEAQVGLDYIFTPMILHFADGERYKNVNIMILDDDIPEGDEKFQLILTNPSPGLELGKNTIALIIVLANDDGPGVLSFNNSEHFFLREPTALYVQESVAVLYIVREPAQGLFGTVTVQFIVTEVNSSNESKDLTPSKGYIVLEEGVRFKALQISAILDTEPEMDEYFVCTLFNPTGGARLGVHVQTLITVLQNQAPLGLFSISAVENRATSIDIEEANRTVYLNVSRTNGIDLAVSVQWETVSETAFGMRGMDVVFSVFQSFLDESASGWCFFTLENLIYGIMLRKSSVTVYRWQGIFIPVEDLNIENPKTCEAFNIGFSPYFVITHEERNEEKPSLNSVFTFTSGFKLFLVQTIIILESSQVRYFTSDSQDYLIIASQRDDSELTQVFRWNGGSFVLHQKLPVRGVLTVALFNKGGSVFLAISQANARLNSLLFRWSGSGFINFQEVPVSGTTEVEALSSANDIYLIFAENVFLGDQNSIDIFIWEMGQSSFRYFQSVDFAAVNRIHSFTPASGIAHILLIGQDMSALYCWNSERNQFSFVLEVPSAYDVASVTVKSLNSSKNLIALVGAHSHIYELAYISSHSDFIPSSGELIFEPGEREATIAVNILDDTVPEKEESFKVQLKNPKGGAEIGINDSVTITILSNDDAYGIVAFAQNSLYKQVEEMEQDSLVTLNVERLKGTYGRITIAWEADGSISDIFPTSGVILFTEGQVLSTITLTILADNIPELSEVVIVTLTRITTEGVEDSYKGATIDQDRSKSVITTLPNDSPFGLVGWRAASVFIRVAEPKENTTTLQLQIARDKGLLGDIAIHLRAQPNFLLHVDNQATENEDYVLQETIIIMKENIKEAHAEVSILPDDLPELEEGFIVTITEVNLVNSDFSTGQPSVRRPGMEIAEIMIEENDDPRGIFMFHVTRGAGEVITAYEVPPPLNVLQVPVVRLAGSFGAVNVYWKASPDSAGLEDFKPSHGILEFADKQVTAMIEITIIDDAEFELTETFNISLISVAGGGRLGDDVVVTVVIPQNDSPFGVFGFEEKTVMIDESLSSDDPDSYVTLTVVRSPGGKGTVRLEWTIDEKAKHNLSPLNGTLHFDETESQKTIVLHTLQDTVLEEDRRFTIQLISIDEVEISPVKGSASIIIRGDKRASGEVGIAPSSRHILIGEPSAKYNGTAIISLVRGPGILGEVTVFWRIFPPSVGEFAETSGKLTMRDEQSAVIVVIQALNDDIPEEKSFYEFQLTAVSEGGVLSESSSTANITVVASDSPYGRFAFSHEQLRVSEAQRVNITIIRSSGDFGHVRLWYKTMSGTAEAGLDFVPAAGELLFEAGEMRKSLHVEILDDDYPEGPEEFSLTITKVELQGRGYDFTIQENGLQIDQPPEIGNISIVRIIIMKNDNAEGIIEFDPKYTAFEVEEDVGLIMIPVVRLHGTYGYVTADFISQSSSASPGGVDYILHGSTVTFQHGQNLSFINISIIDDNESEFEEPIEILLTGATGGAVLGRHLVSRIIIAKSDSPFGVIRFLNQSKISIANPNSTMILSLVLERTGGLLGEIQVNWETVGPNSQEALLPQNRDIADPVSGLFYFGEGEGGVRTIILTIYPHEEIEVEETFIIKLHLVKGEAKLDSRAKDVTLTIQEFGDPNGVVQFAPETLSKKTYSEPLALEGPLLITFFVRRVKGTFGEIMVYWELSSEFDITEDFLSTSGFFTIADGESEASFDVHLLPDEVPEIEEDYVIQLVSVEGGAELDLEKSITWFSVYANDDPHGVFALYSDRQSILIGQNLIRSIQINITRLAGTFGDVAVGLRISSDHKEQPIVTENAERQLVVKDGATYKVDVVPIKNQVFLSLGSNFTLQLVTVMLVGGRFYGMPTILQEAKSAVLPVSEKAANSQVGFESTAFQLMNITAGTSHVMISRRGTYGALSVAWTTGYAPGLEIPEFIVVGNMTPTLGSLSFSHGEQRKGVFLWTFPSPGWPEAFVLHLSGVQSSAPGGAQLRSGFIVAEIEPMGVFQFSTSSRNIIVSEDTQMIRLHVQRLFGFHSDLIKVSYQTTAGSAKPLEDFEPVQNGELFFQKFQTEVDFEITIINDQLSEIEEFFYINLTSVEIRGLQKFDVNWSPRLNLDFSVAVITILDNDDLAGMDISFPETTVAVAVDTTLIPVETESTTYLSTSKTTTILQPTNVVAIVTEATGVSAIPEKLVTLHGTPAVSEKPDVATVTANVSIHGTFSLGPSIVYIEEEMKNGTFNTAEVLIRRTGGFTGNVSITVKTFGERCAQMEPNALPFRGIYGISNLTWAVEEEDFEEQTLTLIFLDGERERKVSVQILDDDEPEGQEFFYVFLTNPQGGAQIVEEKDDTGFAAFAMVIITGSDLHNGIIGFSEESQSGLELREGAVMRRLHLIVTRQPNRAFEDVKVFWRVTLNKTVVVLQKDGVNLVEELQSVSGTTTCTMGQTKCFISIELKPEKVPQVEVYFFVELYEATAGAAINNSARFAQIKILESDESQSLVYFSVGSRLAVAHKKATLISLQVARDSGTGLMMSVNFSTQELRSAETIGRTIISPAISGKDFVITEGTLVFEPGQRSTVLDVILTPETGSLNSFPKRFQIVLFDPKGGARIDKVYGTANITLVSDADSQAIWGLADQLHQPVNDDILNRVLHTISMKVATENTDEQLSAMMHLIEKITTEGKIQAFSVASRTLFYEILCSLINPKRKDTRGFSHFAEVTENFAFSLLTNVTCGSPGEKSKTILDSCPYLSILALHWYPQQINGHKFEGKEGDYIRIPERLLDVQDAEIMAGKSTCKLVQFTEYSSQQWFISGNNLPTLKNKVLSLSVKGQSSQLLTNDNEVLYRIYAAEPRIIPQTSLCLLWNQAAASWLSDSQFCKVVEETADYVECACSHMSVYAVYARTDNLSSYNEAFFTSGFICISGLCLAVLSHIFCARYSMFAAKLLTHMMAASLGTQILFLASAYASPQLAEESCSAMAAVTHYLYLCQFSWMLIQSVNFWYVLVMNDEHTERRYLLFFLLSWGLPAFVVILLIVILKGIYHQSMSQIYGLIHGDLCFIPNVYAALFTAALVPLTCLVVVFVVFIHAYQVKPQWKAYDDVFRGRTNAAEIPLILYLFALISVTWLWGGLHMAYRHFWMLVLFVIFNSLQAQRWKGLALSQMRLWSWTFGLMLE

SEQ ID NO: 40694 - protein, 246 aa, Artificial Sequence
  Synthetic polypeptide
MKKKQQHPGGGADPWPHGAPMGGAPPGLGSWKRRVPLLPFLRFSLRDYGFCMATLLVFCLGSLLYQLSGGPPRFLLDLRQYLGNSTYLDDHGPPPSKVLPFPSQVVYNRVGKCGSRTVVLLLRILSEKHGFNLVTSDIHNKTRLTKNEQMELIKNISTAEQPYLFTRHVHFLNFSRFGGDQPVYINIIRDPVNRFLSNYFFRRFGDWRGEQNHMIRTPSMRQEERYLKFFICHPAIRHIAINSEVV

SEQ ID NO: 40695 - protein, 957 aa, Artificial Sequence
  Synthetic polypeptide
MGTRLPLVLRQLRRPPQPPGPPRRLRVPCRASSGGGGGGGGGREGLLGQRRPQDGQARSSCSPGGRTPAARDSIVREVIQNSKEVLSLLQEKNPAFKPVLAIIQAGDDNLMQEINQNLAEEAGLNITHICLPPDSSEAEIIDEILKINEDTRVHGLALQISENLFSNKVLNALKPEKDVDGVTDINLGKLVRGDAHECFVSPVAKAVIELLEKSGVNLDGKKILVVGAHGSLEAALQCLFQRKGSMTMSIQWKTRQLQSKLHEADIVVLGSPKPEEIPLTWIQPGTTVLNCSHDFLSGKVGCGSPRIHFGGLIEEDDVILLAAALRIQNMVSSGRRWLREQQHRRWRLHCLKLQPLSPVPSDIEISRGQTPKAVDVLAKEIGLLADEIEIYGKSKAKVRLSVLERLKDQADGKYVLVAGITPTPLGEGKSTVTIGLVQALTAHLNVNSFACLRQPSQGPTFGVKGGAAGGGYAQVIPMEEFNLHLTGDIHAITAANNLLAAAIDTRILHENTQTDKALYNRLVPLVNGVREFSEIQLARLKKLGINKTDPSTLTEEEVSKFARLDIDPSTITWQRVLDTNDRFLRKITIGQGNTEKGHYRQAQFDIAVASEIMAVLALTDSLADMKARLGRMVVASDKSGQPVTADDLGVTGALTVLMKDAIKPNLMQTLEGTPVFVHAGPFANIAHGNSSVLADKIALKLVGEEGFVVTEAGFGADIGMEKFFNIKCRASGLVPNVVVLVATVRALKMHGGGPSVTAGVPLKKEYTEENIQLVADGCCNLQKQIQITQLFGVPVVVALNVFKTDTRAEIDLVCELAKRAGAFDAVPCYHWSVGGKGSVDLARAVREAASKRSRFQFLYDVQVPIVDKIRTIAQAVYGAKDIELSPEAQAKIDRYTQQGFGNLPICMAKTHLSLSHQPDKKGVPRDFILPISDVRASIGAGFIYPLVGTAGCGGSRL

SEQ ID NO: 40696 - protein, 56 aa, Artificial Sequence
  Synthetic polypeptide
NLPICMAKTHLSLSHQPDKKGVPRDFILPISDVRASIGAGFIYPLVGTAGCGGSRL

SEQ ID NO: 40697 - protein, 82 aa, Artificial Sequence
  Synthetic polypeptide
VYGAKDIELSPEAQAKIDRYTQQGFGNLPICMAKTHLSLSHQPDKKGVPRDFILPISDVRASIGAGFIYPLVGTAGCGGSRL

SEQ ID NO: 40698 - protein, 130 aa, Artificial Sequence
  Synthetic polypeptide
MDLFRMRCYLASLQGGELPNPKSLLAAASRPSKLALGRLGILSVSSFHALVCSRDDSALRKRTLSLTQRGRNKKGIFSSLKGLDTLARKGKEKRPSITQIFDSSGSHGFSGTQLPQNSSNSSEEVMMVPS

SEQ ID NO: 40699 - protein, 170 aa, Artificial Sequence
  Synthetic polypeptide
MDSKMKKMAELQLSVVSDPKNRKAIENQIQQWEQNLEKFHMDLFRMRCYLASLQGGELPNPKSLLAAASRPSKLALGRLGILSVSSFHALVCSRDDSALRKRTLSLTQRGRNKKGIFSSLKGLDTLARKGKEKRPSITQIFDSSGSHGFSGTQLPQNSSNSSEEVMMVPS

SEQ ID NO: 40700 - protein, 818 aa, Artificial Sequence
  Synthetic polypeptide
MGNSDSQYTLQGSKNHSNTITGAKQIPCSLKIRGIHAKEEKSLHGWGHGSNGAGYKSRSLARSCLSHFKSNQPYASRLGGPTCKVSRGVAYSTHRTNAPGKDFQGISAAFSTENGFHSVGHELADNHITSRDCNGHLLNCYGRNESIASTPPGEDRKSPRVLIKTLGKLDGCLRVEFHNGGNPSKVPAEDCSEPVQLLRYSPTLASETSPVPEARRGSSADSLPSHRPSPTDSRLRSSKGSSLSSESSWYDSPWGNAGELSEAEGSFLAPGMPDPSLHASFPPGDAKKPFNQSSSLSSLRELYKDANLGSLSPSGIRLSDEYMGTHASLSNRVSFASDIDVPSRVAHGDPIQYSSFTLPCRKPKAFVEDTAKKDSLKARMRRISDWTGSLSRKKRKLQEPRSKEGSDYFDSRSDGLNTDVQGSSQASAFLWSGGSTQILSQRSESTHAIGSDPLRQNIYENFMRELEMSRTNTENIETSTETAESSSESLSSLEQLDLLFEKEQGVVRKAGWLFFKPLVTVQKERKLELVARRKWKQYWVTLKGCTLLFYETYGKNSMDQSSAPRCALFAEDSIVQSVPEHPKKENVFCLSNSFGDVYLFQATSQTDLENWVTAVHSACASLFAKKHGKEDTLRLLKNQTKNLLQKIDMDSKMKKMAELQLSVVSDPKNRKAIENQIQQWEQNLEKFHMDLFRMRCYLASLQGGELPNPKSLLAAASRPSKLALGRLGILSVSSFHALVCSRDDSALRKRTLSLTQRGRNKKGIFSSLKGLDTLARKGKEKRPSITQIFDSSGSHGFSGTQLPQNSSNSSEEVMMVPS

SEQ ID NO: 40701 - protein, 239 aa, Artificial Sequence
  Synthetic polypeptide
MAAAGARPVELGFAESAPAWRLRSEQFPSKVGGRPAWLGAAGLPGPQALACELCGRPLSFLLQVYAPLPGRPDAFHRCIFLFCCREQPCCAGLRVFRNQLPRKNDFYSYEPPSENPPPETGESVCLQLKSGAHLCRVCGCLGPKTCSRCHKAYYCSKEHQTLDWRLGHKQACAQPDHLDHIIPDHNFLFPEFEIVIETEDEIMPEVVEKEDYSEIIGSMGTPGSLERWLIPELGQETFI

SEQ ID NO: 40702 - protein, 206 aa, Artificial Sequence
  Synthetic polypeptide
MAAAGARPVELGFAESAPAWRLRSEQFPSKVYAPLPGRPDAFHRCIFLFCCREQPCCAGLRVFRNQLPRKNDFYSYEPPSENPPPETGESVCLQLKSGAHLCRVCGCLGPKTCSRCHKAYYCSKEHQTLDWRLGHKQACAQPDHLDHIIPDHNFLFPEFEIVIETEDEIMPEVVEKEDYSEIIGSMGTPGSLERWLIPELGQETFI

SEQ ID NO: 40703 - protein, 37 aa, Artificial Sequence
  Synthetic polypeptide
MPEVVEKEDYSEIIGSMGTPGSLERWLIPELGQETFI

SEQ ID NO: 40704 - protein, 107 aa, Artificial Sequence
  Synthetic polypeptide
MANMQGLVERLERAVSRLESLSAESHRPPGNCGEVNGVIAGVAPSVEAFDKLMDSMVAEFLKNSRILAGDVETHAEMVHSAFQAQRAFLLMASQYQQPHECFTKSIY

SEQ ID NO: 40705 - protein, 155 aa, Artificial Sequence
  Synthetic polypeptide
MSGRGKQGGKARAKAKTRSSRAGLQFPVGRVHRLLRKGNYAERVGAGAPVYLAAVLEYLTAEILELAGNAARDNKKTRIIPRHLQLAIRNDEELNKLLGKVTIAQGGVLPNIQAVLLPKKTESHHKAKGNSGKGLDTGWDQHPNGIWVPPLAHRY

SEQ ID NO: 40706 - protein, 73 aa, Artificial Sequence
  Synthetic polypeptide
MMKLKSNQTRTYDGDGYKKRAACLCFRSESEEEKRRGNVCLFYKASITLIPRWYITRKENIRHCILREQRPQP

SEQ ID NO: 40707 - protein, 112 aa, Artificial Sequence
  Synthetic polypeptide
MSGEVSWMQAVCAGTRAPATDEVAGVHRSLLRSSRGFQGRLTRFLGRRFMTAEFLLEDPSSGRDGSSKRNSAVMNRLPRNLVNLGGLTQITGEDTGGDISPDDYHPFSRRRL

SEQ ID NO: 40708 - skipped

SEQ ID NO: 40709 - protein, 846 aa, Artificial Sequence
  Synthetic polypeptide
MSLFKARDWWSTILGDKEEFDQGCLCLANVDNSGNGQDKIIVGSFMGYLRIFSPHPAKTGDGAQAEDLLLEVDLRDPVLQVEVGKFVSGTEMLHLAVLHSRKLCVYSVSGTLGNVEHGNQCQMKLMYEHNLQRTACNMTYGSFGGVKGRDLICIQSMDGMLMVFEQESYAFGRFLPGFLLPGPLAYSSRTDSFLTVSSCQQVESYKYQVLAFATDADKRQETEQQKLGSGKRLVVDWTLNIGEQALDICIVSFNQSASSVFVLGERNFFCLKDNGQIRFMKKLDWSPSCFLPYCSVSEGTINTLIGNHNNMLHIYQDVTLKWATQLPHIPVAVRVGCLHDLKGVIVTLSDDGHLQCSYLGTDPSLFQAPNVQSRELNYDELDVEMKELQKIIKDVNKSQGVWPMTEREDDLNVSVVVSPNFDSVSQATDVEVGTDLVPSVTVKVTLQNRVILQKAKLSVYVQPPLELTCDQFTFEFMNRNPDGIPRVIQCKFRLPLKLICLPGQPSKTASHKITIDTNKSPVSLLSLFPGFASQSDDDQVNVMGFHFLGGARITVLASKTSQRYRIQSEQFEDLWLITNELILRLQEYFEKQGVKDFACSFSGSIPLQEYFELIDHHFELRINGEKLEELLSERAVQFRAIQRRLLARFKDKTPAPLQHLDTLLDGTYKQVIALADAVEENQGNLFQSFTRLKSATHLVILLIALWQKLSADQVAILEAAFLPLQEDTQELGWEETVDAAISHLLKTCLSKSSKEQALNLNSQLNIPKDTSQLKKHITLLCDRLSKGGRLCLSTDAAAPQTMVMPGGVFLHKLSLLAAIHVRCDLLLLAFHHDCEATPATWNCKSN

SEQ ID NO: 40710 - protein, 841 aa, Artificial Sequence
  Synthetic polypeptide
MSLFKARDWWSTILGDKEEFDQGCLCLANVDNSGNGQDKIIVGSFMGYLRIFSPHPAKTGDGAQAEDLLLEVDLRDPVLQVEVGKFVSGTEMLHLAVLHSRKLCVYSVSGTLGNVEHGNQCQMKLMYEHNLQRTACNMTYGSFGGVKGRDLICIQSMDGMLMVFEQESYAFGRFLPGFLLPGPLAYSSRTDSFLTVSSCQQVESYKYQVLAFATDADKRQETEQQKLGSGKRLVVDWTLNIGEQALDICIVSFNQSASSVFVLGERNFFCLKDNGQIRFMKKLDWSPSCFLPYCSVSEGTINTLIGNHNNMLHIYQDVTLKWATQLPHIPVAVRVGCLHDLKGVIVTLSDDGHLQCSYLGTDPSLFQAPNVQSRELNYDELDVEMKELQKIIKDVNKSQGVWPMTEREDDLNVSVVVSPNFDSVSQATDVEVGTDLVPSVTVKVTLQNRVILQKAKLSVYVQPPLELTCDQFTFEFMSIPRVIQCKFRLPLKLICLPGQPSKTASHKITIDTNKSPVSLLSLFPGFASQSDDDQVNVMGFHFLGGARITVLASKTSQRYRIQSEQFEDLWLITNELILRLQEYFEKQGVKDFACSFSGSIPLQEYFELIDHHFELRINGEKLEELLSERAVQFRAIQRRLLARFKDKTPAPLQHLDTLLDGTYKQVIALADAVEENQGNLFQSFTRLKSATHLVILLIALWQKLSADQVAILEAAFLPLQEDTQELGWEETVDAAISHLLKTCLSKSSKEQALNLNSQLNIPKDTSQLKKHITLLCDRLSKGGRLCLSTDAAAPQTMVMPGGVFLHKLSLLAAIHVRCDLLLLAFHHDCEATPATWNCKSN

SEQ ID NO: 40711 - protein, 846 aa, Artificial Sequence
  Synthetic polypeptide
MSLFKARDWWSTILGDKEEFDQGCLCLANVDNSGNGQDKIIVGSFMGYLRIFSPHPAKTGDGAQAEDLLLEVDLRDPVLQVEVGKFVSGTEMLHLAVLHSRKLCVYSVSGTLGNVEHGNQCQMKLMYEHNLQRTACNMTYGSFGGVKGRDLICIQSMDGMLMVFEQESYAFGRFLPGFLLPGPLAYSSRTDSFLTVSSCQQVESYKYQVLAFATDADKRQETEQQKLGSGKRLVVDWTLNIGEQALDICIVSFNQSASSVFVLGERNFFCLKDNGQIRFMKKLDWSPSCFLPYCSVSEGTINTLIGNHNNMLHIYQDVTLKWATQLPHIPVAVRVGCLHDLKGVIVTLSDDGHLQCSYLGTDPSLFQAPNVQSRELNYDELDVEMKELQKIIKDVNKSQGVWPMTEREDDLNVSVVVSPNFDSVSQATDVEVGTDLVPSVTVKVTLQNRVILQKAKLSVYVQPPLELTCDQFTFEFMSLNVLGIPRVIQCKFRLPLKLICLPGQPSKTASHKITIDTNKSPVSLLSLFPGFASQSDDDQVNVMGFHFLGGARITVLASKTSQRYRIQSEQFEDLWLITNELILRLQEYFEKQGVKDFACSFSGSIPLQEYFELIDHHFELRINGEKLEELLSERAVQFRAIQRRLLARFKDKTPAPLQHLDTLLDGTYKQVIALADAVEENQGNLFQSFTRLKSATHLVILLIALWQKLSADQVAILEAAFLPLQEDTQELGWEETVDAAISHLLKTCLSKSSKEQALNLNSQLNIPKDTSQLKKHITLLCDRLSKGGRLCLSTDAAAPQTMVMPGGVFLHKLSLLAAIHVRCDLLLLAFHHDCEATPATWNCKSN

SEQ ID NO: 40712 - protein, 881 aa, Artificial Sequence
  Synthetic polypeptide
MSLFKARDWWSTILGDKEEFDQGCLCLANVDNSGNGQDKIIVGSFMGYLRIFSPHPAKTGDGAQAEDLLLEVDLRDPVLQVEVGKFVSGTEMLHLAVLHSRKLCVYSVSGTLGNVEHGNQCQMKLMYEHNLQRTACNMTYGSFGGVKGRDLICIQSMDGMLMVFEQESYAFGRFLPGFLLPGPLAYSSRTDSFLTVSSCQQVESYKYQVLAFATDADKRQETEQQKLGSGKRLVVDWTLNIGEQALDICIVSFNQSASSVFVLGERNFFCLKDNGQIRFMKKLDWSPSCFLPYCSVSEGTINTLIGNHNNMLHIYQDVTLKWATQLPHIPVAVRVGCLHDLKGVIVTLSDDGHLQCSYLGTDPSLFQAPNVQSRELNYDELDVEMKELQKIIKDVNKSQGVWPMTEREDDLNVSVVVSPNFDSVSQATDVEVGTDLVPSVTVKVTLQNRVILQKAKLSVYVQPPLELTCDQFTFEFMTPDLTRTVSFSVYLKRSYTPSELEGNAVVSYSRPTDRNPDGIPRVIQCKFRLPLKLICLPGQPSKTASHKITIDTNKSPVSLLSLFPGFASQSDDDQVNVMGFHFLGGARITVLASKTSQRYRIQSEQFEDLWLITNELILRLQEYFEKQGVKDFACSFSGSIPLQEYFELIDHHFELRINGEKLEELLSERAVQFRAIQRRLLARFKDKTPAPLQHLDTLLDGTYKQVIALADAVEENQGNLFQSFTRLKSATHLVILLIALWQKLSADQVAILEAAFLPLQEDTQELGWEETVDAAISHLLKTCLSKSSKEQALNLNSQLNIPKDTSQLKKHITLLCDRLSKGGRLCLSTDAAAPQTMVMPGGVFLHKLSLLAAIHVRCDLLLLAFHHDCEATPATWNCKSN

SEQ ID NO: 40713 - protein, 876 aa, Artificial Sequence
  Synthetic polypeptide
MSLFKARDWWSTILGDKEEFDQGCLCLANVDNSGNGQDKIIVGSFMGYLRIFSPHPAKTGDGAQAEDLLLEVDLRDPVLQVEVGKFVSGTEMLHLAVLHSRKLCVYSVSGTLGNVEHGNQCQMKLMYEHNLQRTACNMTYGSFGGVKGRDLICIQSMDGMLMVFEQESYAFGRFLPGFLLPGPLAYSSRTDSFLTVSSCQQVESYKYQVLAFATDADKRQETEQQKLGSGKRLVVDWTLNIGEQALDICIVSFNQSASSVFVLGERNFFCLKDNGQIRFMKKLDWSPSCFLPYCSVSEGTINTLIGNHNNMLHIYQDVTLKWATQLPHIPVAVRVGCLHDLKGVIVTLSDDGHLQCSYLGTDPSLFQAPNVQSRELNYDELDVEMKELQKIIKDVNKSQGVWPMTEREDDLNVSVVVSPNFDSVSQATDVEVGTDLVPSVTVKVTLQNRVILQKAKLSVYVQPPLELTCDQFTFEFMTPDLTRTVSFSVYLKRSYTPSELEGNAVVSYSRPTGIPRVIQCKFRLPLKLICLPGQPSKTASHKITIDTNKSPVSLLSLFPGFASQSDDDQVNVMGFHFLGGARITVLASKTSQRYRIQSEQFEDLWLITNELILRLQEYFEKQGVKDFACSFSGSIPLQEYFELIDHHFELRINGEKLEELLSERAVQFRAIQRRLLARFKDKTPAPLQHLDTLLDGTYKQVIALADAVEENQGNLFQSFTRLKSATHLVILLIALWQKLSADQVAILEAAFLPLQEDTQELGWEETVDAAISHLLKTCLSKSSKEQALNLNSQLNIPKDTSQLKKHITLLCDRLSKGGRLCLSTDAAAPQTMVMPGGVFLHKLSLLAAIHVRCDLLLLAFHHDCEATPATWNCKSN

SEQ ID NO: 40714 - protein, 24 aa, Artificial Sequence
  Synthetic polypeptide
MASPGSGEETQRGESHVKTEVEAG

SEQ ID NO: 40715 - protein, 140 aa, Artificial Sequence
  Synthetic polypeptide
MAPLLGRKPFPLVKPLPGEEPLFTIPHTQEAFRTREEYEARLERYSERIWTCKSTGSSQLTHKEAWEEEQEVAELLKEEFPAWYEKLVLEMVHHNTASLEKLVDTAWLEIMTKYAVGEECDFEEERRELFPPVRRLTGRF

SEQ ID NO: 40716 - protein, 4 aa, Artificial Sequence
  Synthetic polypeptide
KWRS

SEQ ID NO: 40717 - protein, 51 aa, Artificial Sequence
  Synthetic polypeptide
MEQVEILRKFIQRVQAMKSPDHNGEDNFARDFMAEAGGSPKVRSSRPAWIT

SEQ ID NO: 40718 - protein, 264 aa, Artificial Sequence
  Synthetic polypeptide
MKMHFCIPVSQQRSDALGGRYVLYSVHLDGFLFCRVRYSQLHGWNEQLRRVFGNCLPPFPPKYYLAMTTAMADERRDQLEQYLQNVTMDPNVLRSDVFVEFLKLAQLNTFDIATKKAYLDIFLPNEQSIRIEIITSDTAERVLEVVSHKIGLCRELLGYFGLFLIRFGKEGKLSVVKKLADFELPYVSLGSSEVENCKVGLRKWYMAPSLDSVLMDCRVAVDLLYMQAIQDIEKGWAKPTQAQRQKLEAFQKEDSQTKHLVQFL

SEQ ID NO: 40719 - protein, 165 aa, Artificial Sequence
  Synthetic polypeptide
MLGNTENWNTFDIATKKAYLDIFLPNEQSIRIEIITSDTAERVLEVVSHKIGLCRELLGYFGLFLIRFGKEGKLSVVKKLADFELPYVSLGSSEVENCKVGLRKWYMAPSLDSVLMDCRVAVDLLYMQAIQDIEKGWAKPTQAQRQKLEAFQKEDSQTKHLVQFL

SEQ ID NO: 40720 - protein, 260 aa, Artificial Sequence
  Synthetic polypeptide
MAMDEYLWMVILGFIIAFILAFSVGANDVANSFGTAVGSGVVTLRQACILASIFETTGSVLLGAKVGETIRKGIIDVNLYNETVETLMAGEVSAMVGSAVWQLIASFLRLPISGTHCIVGSTIGFSLVAIGTKGVQWMELVKIVASWFISPLLSGFMSGLLFVLIRIFILKKEDPVPNGLRALPVFYAATIAINVFSIMYTGAPVLGLVLPMWAIALISFGVALLFAFFVWLFVCPWMRRKITGKGFRVCPLAAGHNLDA

SEQ ID NO: 40721 - protein, 79 aa, Artificial Sequence
  Synthetic polypeptide
MDASRTSRHLEETINNFERQKMKDIKARHSGPHLQSQHFGSPRRVDHLRSGVRDQPGQHGETPSLLKIQKLARLGGTRL

SEQ ID NO: 40722 - protein, 234 aa, Artificial Sequence
  Synthetic polypeptide
MMRRTLENRNAQTKQLQTAVSNVEKHFGELCQIFAAYVRKTARLRDKADLLVNEINAYAATETPHLKLGLMNFADEFAKLQDYRQAEVERLEAKVVEPLKTYGTIVKMKRDDLKATLTARNREAKQLTQLERTRQRNPSDRHVISQAETELQRAAMDASRTSRHLEETINNFERQKMKDIKARHSGPHLQSQHFGSPRRVDHLRSGVRDQPGQHGETPSLLKIQKLARLGGTRL

SEQ ID NO: 40723 - protein, 51 aa, Artificial Sequence
  Synthetic polypeptide
MEAETKTLPLENASILSEGSLQEGHRLWIGNLDPKITEYHLLKLLQKFGKS

SEQ ID NO: 40724 - protein, 86 aa, Artificial Sequence
  Synthetic polypeptide
MGLRIHFVVDPHGWCCMGLIVFVWLYNIVLIPKIVLFPHYEEGHIPGILIIIFYGISIFCLVALVRASITDPGRLPENPKIPHGAM

SEQ ID NO: 40725 - protein, 76 aa, Artificial Sequence
  Synthetic polypeptide
VYGAKDIELCPEAQVKIDRYTQQGFGNLPICMAKTDLSLSHQPDKKGVPRDFILPISDVRASIGAGFIYPLVGTEP

SEQ ID NO: 40726 - protein, 201 aa, Artificial Sequence
  Synthetic polypeptide
MDAELAEVRALQAEIAALRRACEDPPAPWEEKSRVQKSFQAIHQFNLEGWKSSKDLKNQLGHLESELSFLSTLTGINIRNHSKQTEDLTSTEMTEKSIRKVLQRHRLSGNCHMVTFQLEFQILEIQNKERLSSAVTDLNIIMEPTECSELSEFVSRAEERKDLFMFFRSLHFFVEWFEYRKRTFKHLKTSKEISIRSLAYQ

SEQ ID NO: 40727 - protein, 36 aa, Artificial Sequence
  Synthetic polypeptide
MSVEPPPELEEKAASEPEAGAMPEKRAGAQAAGSTW

SEQ ID NO: 40728 - protein, 112 aa, Artificial Sequence
  Synthetic polypeptide
MNGDDAFARRPRDDAQISEKLRKAFDDIAKYFSKKEWEKMKSSEKIVYVYMKLNYEVMTKLGFKVTLPPFMRSKRAADFHGNDFGNDRNHRNQVERPQMTFGSLQRIFPKKT

SEQ ID NO: 40729 - protein, 51 aa, Artificial Sequence
  Synthetic polypeptide
CLCSAFHHVSVYPKKELPLFIHFTAGFCSSTAMIAILTHQFPEIMGIFAKA

SEQ ID NO: 40730 - protein, 83 aa, Artificial Sequence
  Synthetic polypeptide
CLCSAFHHVSVYPKKELPLFIHFTAGFCSSTAMIAILTHQFPEIMGIFAKAVLGLWCPQPWASSGFEENTQDLKSEDLGLSSG

SEQ ID NO: 40731 - protein, 63 aa, Artificial Sequence
  Synthetic polypeptide
CLCSAFHHVSVYPKKELPLFIHFTAGFCSSTAMIAILTHQFPEIMGIFAKAVSMISRTCVDYL

SEQ ID NO: 40732 - protein, 63 aa, Artificial Sequence
  Synthetic polypeptide
CLCSAFHHVSVYPKKELPLFIHFTAGFCSSTAMIAILTHQFPEIMGIFAKAVVGVKTQKENAD

SEQ ID NO: 40733 - protein, 45 aa, Artificial Sequence
  Synthetic polypeptide
PTRLSDRLSWYHSACVQPFIMFLFTQKRSFLCSSISQQDFALLQQ

SEQ ID NO: 40734 - protein, 58 aa, Artificial Sequence
  Synthetic polypeptide
SLSSQLGYQIDCHGIIVLVFSLSSCFCLPKKGASFVHPFHSRILLFYSNDSHSHSPVS

SEQ ID NO: 40735 - protein, 33 aa, Artificial Sequence
  Synthetic polypeptide
AQEFKAVVGRDHATALEPGAPQGEAGGPQHHLA

SEQ ID NO: 40736 - protein, 36 aa, Artificial Sequence
  Synthetic polypeptide
PQLFRKLRQEDHLSTGVQSCSGPRSCHCTRAWSPPR

SEQ ID NO: 40737 - protein, 550 aa, Artificial Sequence
  Synthetic polypeptide
WAEIMPLHSSLEPPKVRLEGRSTTSLSVSWSIPPPQQSRVWKYEVTYRKKGDSNSYNVRRTEGFSVTLDDLAPDTTYLVQVQALTQEGQGAGSKVHEFQTLSPEGSGNLAVIGGVAVGVVLLLVLAGVGFFIHRRRKNQRARQSPEDVYFSKSEQLKPLKTYVDPHTYEDPNQAVLKFTTEIHPSCVTRQKVIGAGEFGEVYKGMLKTSSGKKEVPVAIKTLKAGYTEKQRVDFLGEAGIMGQFSHHNIIRLEGVISKYKPMMIITEYMENGALDKFLREKDGEFSVLQLVGMLRGIAAGMKYLANMNYVHRDLAARNILVNSNLVCKVSDFGLSRVLEDDPEATYTTSGGKIPIRWTAPEAISYRKFTSASDVWSFGIVMWEVMTYGERPYWELSNHEVMKAINDGFRLPTPMDCPSAIYQLMMQCWQQERARRPKFADIVSILDKLIRAPDSLKTLADFDPRVSIRLPSTSGSEGVPFRTVSEWLESIKMQQYTEHFMAAGYTAIEKVVQMTNDDIKRIGVRLPGHQKRIAYSLLGLKDQVNTVGIPI

SEQ ID NO: 40738 - protein, 23 aa, Artificial Sequence
  Synthetic polypeptide
AQAGGSLELRSSRPAWGSHVAPC

SEQ ID NO: 40739 - protein, 34 aa, Artificial Sequence
  Synthetic polypeptide
AQEFETSLGITCGAMLTRARQKGLWMPCCCTDRM

SEQ ID NO: 40740 - protein, 938 aa, Artificial Sequence
  Synthetic polypeptide
KPRREDHLSSGVRDQPGDHMWRHVDKGTAEGAVDAMLLHGQDVITVSNGGRIMRSWETNIGGLNWEITLDSGSFQALGLVGLQESVRYIAVLKKTTLALHHLSSGHLKWVEHLPESDSIHYQMVYSYGSGVVWALGVVPFSHVNIVKFNVEDGEIVQQVRVSTPWLQHLSGACGVVDEAVLVCPDPSSRSLQTLALETEWELRQIPLQSLDLEFGSGFQPRVLPTQPNPVDASRAQFFLHLSPSHYALLQYHYGTLSLLKNFPQTALVSFATTGEKTVAAVMACRNEVKSSSSEDGSMGSFSEKSSSKDSLACFNQTYTINLYLVETGRRLLDTTITFSLEQSGTRPERLYIQVFLKKDDSVGYRALVQTEDHLLLFLQQLAGKVVLWSREESLAEVVCLEMVDLPLTGAQAELEGEFGKKADGLLGMFLKRLSSQLILLQAWTSHLWKMFYDARKPRSQIKNEINIDTLARDEFNLQKMMVMVTASGKLFGIESSSGTILWKQYLPNVKPDSSFKLMVQRTTAHFPHPPQCTLLVKDKESGMSSLYVFNPIFGKWSQVAPPVLKRPILQSLLLPVMDQDYAKVLLLIDDEYKVTAFPATRNVLRQLHELAPSIFFYLVDAEQGRLCGYRLRKDLTTELSWELTIPPEVQRIVKVKGKRSSEHVHSQGRVMGDRSVLYKSLNPNLLAVVTESTDAHHERTFIGIFLIDGVTGRIIHSSVQKKAKGPVHIVHSENWVVYQYWNTKARRNEFTVLELYEGTEQYNATAFSSLDRPQLPQVLQQSYIFPSSISAMEATITERGITSRHLLIGLPSGAILSLPKALLDPRRPEIPTEQSREENLIPYSPDVQIHAERFINYNQTVSRMRGIYTAPSGLESTCLVVAYGLDIYQTRVYPSKQFDVLKDDYDYVLISSVLFGLVFATMITKRLAQVKLLNRAWR

SEQ ID NO: 40741 - protein, 939 aa, Artificial Sequence
  Synthetic polypeptide
KPRREDHLSSGVRDQPGDHMWRHVDKGTAEGAVDAMLLHGQDVITVSNGGRIMRSWETNIGGLNWEITLDSGSFQALGLVGLQESVRYIAVLKKTTLALHHLSSGHLKWVEHLPESDSIHYQMVYSYGSGVVWALGVVPFSHVNIVKFNVEDGEIVQQVRVSTPWLQHLSGACGVVDEAVLVCPDPSSRSLQTLALETEWELRQIPLQSLDLEFGSGFQPRVLPTQPNPVDASRAQFFLHLSPSHYALLQYHYGTLSLLKNFPQTALVSFATTGEKTVAAVMACRNEVQKSSSSEDGSMGSFSEKSSSKDSLACFNQTYTINLYLVETGRRLLDTTITFSLEQSGTRPERLYIQVFLKKDDSVGYRALVQTEDHLLLFLQQLAGKVVLWSREESLAEVVCLEMVDLPLTGAQAELEGEFGKKADGLLGMFLKRLSSQLILLQAWTSHLWKMFYDARKPRSQIKNEINIDTLARDEFNLQKMMVMVTASGKLFGIESSSGTILWKQYLPNVKPDSSFKLMVQRTTAHFPHPPQCTLLVKDKESGMSSLYVFNPIFGKWSQVAPPVLKRPILQSLLLPVMDQDYAKVLLLIDDEYKVTAFPATRNVLRQLHELAPSIFFYLVDAEQGRLCGYRLRKDLTTELSWELTIPPEVQRIVKVKGKRSSEHVHSQGRVMGDRSVLYKSLNPNLLAVVTESTDAHHERTFIGIFLIDGVTGRIIHSSVQKKAKGPVHIVHSENWVVYQYWNTKARRNEFTVLELYEGTEQYNATAFSSLDRPQLPQVLQQSYIFPSSISAMEATITERGITSRHLLIGLPSGAILSLPKALLDPRRPEIPTEQSREENLIPYSPDVQIHAERFINYNQTVSRMRGIYTAPSGLESTCLVVAYGLDIYQTRVYPSKQFDVLKDDYDYVLISSVLFGLVFATMITKRLAQVKLLNRAWR

SEQ ID NO: 40742 - protein, 20 aa, Artificial Sequence
  Synthetic polypeptide
AGRLTPVIPALWEAEHGPPT

SEQ ID NO: 40743 - protein, 29 aa, Artificial Sequence
  Synthetic polypeptide
SQHFGRLSMGLLHDQLPDSDRYDWFASPG

SEQ ID NO: 40744 - protein, 3499 aa, Artificial Sequence
  Synthetic polypeptide
RMKNNVVGRLCNECADGSFHLSTRNPDGCLKCFCMGVSRHCTSSSWSRAQLHGASEEPGHFSLTNAASTHTTNEGIFSPTPGELGFSSFHRLLSGPYFWSLPSRFLGDKVTSYGGELRFTVTQRSQPGSTPLHGQPLVVLQGNNIILEHHVAQEPSPGQPSTFIVPFREQAWQRPDGQPATREHLLMALAGIDTLLIRASYAQQPAESRVSGISMDVAVPEETGQDPALEVEQCSCPPGYRGPSCQDCDTGYTRTPSGLYLGTCERCSCHGHSEACEPETGACQGCQHHTEGPRCEQCQPGYYGDAQRGTPQDCQLCPCYGDPAAGQAAHTCFLDTDGHPTCDACSPGHSGRHCERCAPGYYGNPSQGQPCQRDSQVPGPIGCNCDPQGSVSSQCDAAGQCQCKAQVEGLTCSHCRPHHFHLSASNPDGCLPCFCMGITQQCASSAYTRHLISTHFAPGDFQGFALVNPQRNSRLTGEFTVEPVPEGAQLSFGNFAQLGHESFYWQLPETYQGDKVAAYGGKLRYTLSYTAGPQGSPLSDPDVQITGNNIMLVASQPALQGPERRSYEIMFREEFWRRPDGQPATREHLLMALADLDELLIRATFSSVPLAASISAVSLEVAQPGPSNRPRALEVEECRCPPGYIGLSCQDCAPGYTRTGSGLYLGHCELCECNGHSDLCHPETGACSQCQHNAAGEFCELCAPGYYGDATAGTPEDCQPCACPLTNPENMFSRTCESLGAGGYRCTACEPGYTGQYCEQCGPGYVGNPSVQGGQCLPETNQAPLVVEVHPARSIVPQGGSHSLRCQVSGSPPHYFYWSREDGRPVPSGTQQRHQGSELHFPSVQPSDAGVYICTCRNLHQSNTSRAELLVTEAPSKPITVTVEEQRSQSVRPGADVTFICTAKSKSPAYTLVWTRLHNGKLPTRAMDFNGILTIRNVQLSDAGTYVCTGSNMFAMDQGTATLHVQASGTLSAPVVSIHPPQLTVQPGQLAEFRCSATGSPTPTLEWTGGPGGQLPAKAQIHGGILRLPAVEPTDQAQYLCRAHSSAGQQVARAVLHVHGGGGPRVQVSPERTQVHAGRTVRLYCRAAGVPSATITWRKEGGSLPPQARSERTDIATLLIPAITTADAGFYLCVATSPAGTAQARIQVVVLSASDASPPPVKIESSSPSVTEGQTLDLNCVVAGSAHAQVTWYRRGGSLPPHTQVHGSRLRLPQVSPADSGEYVCRVENGSGPKEASITVSVLHGTHSGPSYTPVPGSTRPIRIEPSSSHVAEGQTLDLNCVVPGQAHAQVTWHKRGGSLPARHQTHGSLLRLHQVTPADSGEYVCHVVGTSGPLEASVLVTIEASVIPGPIPPVRIESSSSTVAEGQTLDLSCVVAGQAHAQVTWYKRGGSLPARHQVRGSRLYIFQASPADAGQYVCRASNGMEASITVTVTGTQGANLAYPAGSTQPIRIEPSSSQVAEGQTLDLNCVVPGQSHAQVTWHKRGGSLPVRHQTHGSLLRLYQASPADSGEYVCRVLGSSVPLEASVLVTIEPAGSVPALGVTPTVRIESSSSQVAEGQTLDLNCLVAGQAHAQVTWHKRGGSLPARHQVHGSRLRLLQVTPADSGEYVCRVVGSSGTQEASVLVTIQQRLSGSHSQGVAYPVRIESSSASLANGHTLDLNCLVASQAPHTITWYKRGGSLPSRHQIVGSRLRIPQVTPADSGEYVCHVSNGAGSRETSLIVTIQGSGSSHVPSVSPPIRIESSSPTVVEGQTLDLNCVVARQPQAIITWYKRGGSLPSRHQTHGSHLRLHQMSVADSGEYVCRANNNIDALEASIVISVSPSAGSPSAPGSSMPIRIESSSSHVAEGETLDLNCVVPGQAHAQVTWHKRGGSLPSHHQTRGSRLRLHHVSPADSGEYVCRVMGSSGPLEASVLVTIEASGSSAVHVPAPGGAPPIRIEPSSSRVAEGQTLDLKCVVPGQAHAQVTWHKRGGNLPARHQVHGPLLRLNQVSPADSGEYSCQVTGSSGTLEASVLVTIEPSSPGPIPAPGLAQPIYIEASSSHVTEGQTLDLNCVVPGQAHAQVTWYKRGGSLPARHQTHGSQLRLHLVSPADSGEYVCRAASGPGPEQEASFTVTVPPSEGSSYRLRSPVISIDPPSSTVQQGQDASFKCLIHDGAAPISLEWKTRNQELEDNVHISPNGSIITIVGTRPSNHGTYRCVASNAYGVAQSVVNLSVHGPPTVSVLPEGPVWVKVGKAVTLECVSAGEPRSSARWTRISSTPAKLEQRTYGLMDSHAVLQISSAKPSDAGTYVCLAQNALGTAQKQVEVIVDTGAMAPGAPQVQAEEAELTVEAGHTATLRCSATGSPAPTIHWSKLRSPLPWQHRLEGDTLIIPRVAQQDSGQYICNATSPAGHAEATIILHVESPPYATTVPEHASVQAGETVQLQCLAHGTPPLTFQWSRVGSSLPGRATARNELLHFERAAPEDSGRYRCRVTNKVGSAEAFAQLLVQGPPGSLPATSIPAGSTPTVQVTPQLETKSIGASVEFHCAVPSDRGTQLRWFKEGGQLPPGHSVQDGVLRIQNLDQSCQGTYICQAHGPWGKAQASAQLVIQALPSVLINIRTSVQTVVVGHAVEFECLALGDPKPQVTWSKVGGHLRPGIVQSGGVVRIAHVELADAGQYRCTATNAAGTTQSHVLLLVQALPQISMPQEVRVPAGSAAVFPCIASGYPTPDISWSKLDGSLPPDSRLENNMLMLPSVRPQDAGTYVCTATNRQGKVKAFAHLQVPERVVPYFTQTPYSFLPLPTIKDAYRKFEIKITFRPDSADGMLLYNGQKRVPGSPTNLANRQPDFISFGLVGGRPEFRFDAGSGMATIRHPTPLALGHFHTVTLLRSLTQGSLIVGDLAPVNGTSQGKFQGLDLNEELYLGGYPDYGAIPKAGLSSGFIGCVRELRIQGEEIVFHDLNLTAHGISHCPTCRDRPCQNGGQCHDSESSSYVCVCPAGFTGSRCEHSQALHCHPEACGPDATCVNRPDGRGYTCRCHLGRSGLRCEEGVTVTTPSLSGAGSYLALPALTNTHHELRLDVEFKPLAPDGVLLFSGGKSGPVEDFVSLAMVGGHLEFRYELGSGLAVLRSAEPLALGRWHRVSAERLNKDGSLRVNGGRPVLRSSPGKSQGLNLHTLLYLGGVEPSVPLSPATNMSAHFRGCVGEVSVNGKRLDLTYSFLGSQGIGQCYDSSPCERQPCQHGATCMPAGEYEFQCLCRDGFKGDLCEHEENPCQLREPCLHGGTCQGTRCLCLPGFSGPRCQQGSGHGIAESDWHLEGSGGNDAPGQYGAYFHDDGFLAFPGHVFSRSLPEVPETIELEVRTSTASGLLLWQGVEVGEAGQGKDFISLGLQDGHLVFRYQLGSGEARLVSEDPINDGEWHRVTALREGRRGSIQVDGEELVSGRSPGPNVAVNAKGSVYIGGAPDVATLTGGRFSSGITGCVKNLVLHSARPGAPPPQPLDLQHRAQAGANTRPCPS

SEQ ID NO: 40745 - protein, 29 aa, Artificial Sequence
  Synthetic polypeptide
VTLCKSFHIPEPLFPHVKDEEQCGGALVQ

SEQ ID NO: 40746 - protein, 29 aa, Artificial Sequence
  Synthetic polypeptide
ALEGAFWRRSVTPWRGRSSSCSAAWKRSI

SEQ ID NO: 40747 - protein, 42 aa, Artificial Sequence
  Synthetic polypeptide
GEKGLIEPWKGPSGGGVSHLGEGDPHPAALPGRGVFEALPPL

SEQ ID NO: 40748 - protein, 146 aa, Artificial Sequence
  Synthetic polypeptide
LSPGRGLLEEECHTLEREILILQRCLEEEYLRPCHPSEAALEPTLAELKEQKKAMEQELQASVGPSCVSPNHRQRPLGSSTQGLRPPLPLCGVAPLQCCLPAPPLEPYLRPRGQSATHRWGRQLQCSPREGPASTPMSSAAPQAPA

SEQ ID NO: 40749 - protein, 129 aa, Artificial Sequence
  Synthetic polypeptide
LSPGRGLLEEECHTLEREILILQRCLEEEYLRPCHPSEAALEPTLAELKEQKKAMEQELQASVGPSCVSPNHSGPWGPPHRASDPRFPSAGLHLSSAACLHLLWSPTFDLEASRLPTAGDGSFSAAPGK

SEQ ID NO: 40750 - protein, 39 aa, Artificial Sequence
  Synthetic polypeptide
MGTVAHAIIPTLWEAEAAGLLEIKSSRPSLGNIKRFVKG

SEQ ID NO: 40751 - protein, 216 aa, Artificial Sequence
  Synthetic polypeptide
MGTVAHAIIPTLWEAEAAGLLEIKSSRPSLGNIKRFVKGLRQYGKNFFRIRKELLPNKETGELITFYYYWKKTPEAASSRAHRRHRRQAVFRRIKTRTASTPVNTPSRPPSSEFLDLSSASEDDFDSEDSEQELKGYACRHCFTTSTPYPRDLPGAIPPPMSAAHQLQAMHAQSAELQRLAMEQQWLHGHPHMHGGHLPSQEDYYSRLKKEGDKQL

SEQ ID NO: 40752 - protein, 1198 aa, Artificial Sequence
  Synthetic polypeptide
MGTVAHAIIPTLWEAEAAGLLEIKSSRPSLGNIKRFVKGLRQYGKNFFRIRKELLPNKETGELITFYYYWKKTPEAASSRAHRRHRRQAVFRRIKTRTASTPVNTPSRPPSSEFLDLSSASEDDFDSEDSEQELKGYACRHCFTTTSKDWHHGGRENILLCTDCRIHFKKYGELPPIEKPVDPPPFMFKPVKEEDDGLSGKHSMRTRRSRGSMSTLRSGRKKQPASPDGRTSPINEDIRSSGRNSPSAASTSSNDSKAETVKKSAKKVKEEASSPLKSNKRQREKVASDTEEADRTSSKKTKTQEISRPNSPSEGEGESSDSRSVNDEGSSDPKDIDQDNRSTSPSIPSPQDNESDSDSSAQQQMLQAQPPALQAPTGVTPAPSSAPPGTPQLPTPGPTPSATAVPPQGSPTASQAPNQPQAPTAPVPHTHIQQAPALHPQRPPSPHPPPHPSPHPPLQPLTGSAGQPSAPSHAQPPLHGQGPPGPHSLQAGPLLQHPGPPQPFGLPPQASQGQAPLGTSPAAAYPHTSLQLPASQSALQSQQPPREQPLPPAPLAMPHIKPPPTTPIPQLPAPQAHKHPPHLSGPSPFSMNANLPPPPALKPLSSLSTHHPPSAHPPPLQLMPQSQPLPSSPAQPPGLTQSQNLPPPPASHPPTGLHQVAPQPPFAQHPFVPGGPPPITPPTCPSTSTPPAGPGTSAQPPCSGAAASGGSIAGGSSCPLPTVQIKEEALDDAEEPESPPPPPRSPSPEPTVVDTPSHASQSARFYKHLDRGYNSCARTDLYFMPLAGSKLAKKREEAIEKAKREAEQKAREEREREKEKEKEREREREREREAERAAKASSSAHEGRLSDPQLSGPGHMRPSFEPPPTTIAAVPPYIGPDTPALRTLSEYARPHVMSPTNRNHPFYMPLNPTDPLLAYHMPGLYNVDPTIRERELREREIREREIRERELRERMKPGFEVKPPELDPLHPAANPMEHFARHSALTIPPTAGPHPFASFHPGLNPLERERLALAGPQLRPEMSYPDRLAAERIHAERMASLTSDPLARLQMFNVTPHHHQHSHIHSHLHLHQQDPLHQGSAGPVHPLVDPLTAGPHLARFPYPPGTLPNPLLGQPPHEHEMLRHPVFGTPYPRDLPGAIPPPMSAAHQLQAMHAQSAELQRLAMEQQWLHGHPHMHGGHLPSQEDYYSRLKKEGDKQL

SEQ ID NO: 40753 - protein, 15 aa, Artificial Sequence
  Synthetic polypeptide
NQEFKTKPGQHKTLR

SEQ ID NO: 40754 - protein, 11 aa, Artificial Sequence
  Synthetic polypeptide
KLLFQVCGREQ

SEQ ID NO: 40755 - protein, 194 aa, Artificial Sequence
  Synthetic polypeptide
LKATFPGMWERTITIGSAGKTFSVTGWKLGWSIGPNHLIKHLQTVQQNTIYTCATPLQEALAQAFWIDIKRMDDPECYFNSLPKELEVKRDRMVRLLESVGLKPIVPDGGYFIIADVSLLDPDLSDMKNNEPYDYKFVKWMTKHKKLSAIPVSAFCNSETKSQFEKFVRFCFIKKDSTLDAAEEIIKAWSVQKS

SEQ ID NO: 40756 - protein, 69 aa, Artificial Sequence
  Synthetic polypeptide
VIAKSYFSRYVGENNNNRKCWKDFQCNWLEAWLVHWSKSFDKTFTDSSTKHDLYLCNSFTGSLGSSFLD

SEQ ID NO: 40757 - protein, 221 aa, Artificial Sequence
  Synthetic polypeptide
GSQDPRNNTVVCSAIQNQDFTVIEDYCTGLKALLYLKSIEELQDWDGQSPATVSHQKGKPVPRIAELMDKKLPSFGPYLEQRKKIIAENKIRLKEQNVAFSPLKRNCFIPKRPIPTIKDVIGKALQYLGTFGELSNVEQVVAMIDEEMCINCGKCYMTCNDSGYQAIQFDPETHLPTITDTCTGCTLCLSVCPIVDCIKMVSRTTPYEPKRGVPLSVNPVC

SEQ ID NO: 40758 - protein, 88 aa, Artificial Sequence
  Synthetic polypeptide
KANGGRLLLPRRWNRFTFLCASHCIQLKTLICKTDDIRRLKGEEKADWLGISRPEKQHSGMQCHSESGFHCDRRLLHWPQSPALSEKH

SEQ ID NO: 40759 - protein, 28 aa, Artificial Sequence
  Synthetic polypeptide
REGRLARDLKTRETTQWYAVPFRIRISL

SEQ ID NO: 40760 - protein, 22 aa, Artificial Sequence
  Synthetic polypeptide
GGRAPRRGGAQAAARPGTSQRW

SEQ ID NO: 40761 - protein, 64 aa, Artificial Sequence
  Synthetic polypeptide
QAGARPGEEGLRRPRAQEHRKGGEPGARVPGEPLHLQPRPQAPVVPQAEDCPLQRCRHFHTRRR

SEQ ID NO: 40762 - protein, 93 aa, Artificial Sequence
  Synthetic polypeptide
RRARAQERRGSGGRAPRNIAKVVSQVHAFQENPYTFSPDPKLQSYLKQRIARFSGADISTLAADSRANFHQVSSEKHSRKIQDKLRRMKATFQ

SEQ ID NO: 40763 - protein, 28 aa, Artificial Sequence
  Synthetic polypeptide
NYHGGNKYADCLAIKTEDRSQIQERSPY

SEQ ID NO: 40764 - protein, 18 aa, Artificial Sequence
  Synthetic polypeptide
PLKLSWRKQIRRLLGHQN

SEQ ID NO: 40765 - protein, 908 aa, Artificial Sequence
  Synthetic polypeptide
PSEIHFGLLTSETIMEETNTQIAWPSKLKIGAKSKKDPHIKVSGKKEDVKEAKEMIMSVLDTKSNRVTLKMDVSHTEHSHVIGKGGNNIKKVMEETGCHIHFPDSNRNNQAEKSNQVSIAGQPAGVESARVRIRELLPLVLMFELPIAGILQPVPDPNSPSIQHISQTYNISVSFKQRSRMYGATVIVRGSQNNTSAVKEGTAMLLEHLAGSLASAIPVSTQLDIAAQHHLFMMGRNGSNIKHIMQRTGAQIHFPDPSNPQKKSTVYLQGTIESVCLARQYLMGCLPLVLMFDMKEEIEVDPQFIAQLMEQLDVFISIKPKPKQPSKSVIVKSVERNALNMYEARKCLLGLESSGVTIATSPSPASCPAGLACPSLDILASAGLGLTGLGLLGPTTLSLNTSTTPNSLLNALNSSVSPLQSPSSGTPSPTLWAPPLANTSSATGFSAIPHLMIPSTAQATLTNILLSGVPTYGHTAPSPPPGLTPVDVHINSMQTEGKKISAALNGHAQSPDIKYGAISTSSLGEKVLSANHGDPSIQTSGSEQTSPKSSPTEGCNDAFVEVGMPRSPSHSGNAGDLKQMMCPSKVSCAKRQTVELLQGTKNSHLHSTDRLLSDPELSATESPLADKKAPGSERAAERAAAAQQNSERAHLAPRSSYVNMQAFDYEQKKLLATKAMLKKPVVTEVRTPTNTWSGLGFSKSMPAETIKELRRANHVSYKPTMTTTYEGSSMSLSRSNSREHLGGGSESDNWRDRNGIGPGSHSEFAASIGSPKRKQNKSTEHYLSSSNYMDCISSLTGSNGCNLNSSFKGSDLPELFSKLGLGKYTDVFQQQEIDLQTFLTLTDQDLKELGITTFGARRKMLLAISELNKNRRKLFESPNARTSFLEGGASGRLPRQYHSDIASVSGRW

SEQ ID NO: 40766 - protein, 386 aa, Artificial Sequence
  Synthetic polypeptide
GRELKTILANMNYFESYLAVASTVPSMLCLVANFLLVNRVAVHIRVLASLTVILAIFMVITALVKVDTSSWTRGFFAVTIVCMVILSGASTVFSSSIYGMTGSFPMRNSQALISGGAMGGTVSAVASLVDLAASSDVRNSALAFFLTATVFLVLCMGLYLLLSRLEYARYYMRPVLAAHVFSGEEELPQDSLSAPSVASRFIDSHTPPLRPILKKTASLGFCVTYVFFITSLIYPAICTNIESLNKGSGSLWTTKFFIPLTTFLLYNFADLCGRQLTAWIQVPGPNSKALPGFVLLRTCLIPLFVLCNYQPRVHLKTVVFQSDVYPALLSSLLGLSNGYLSTLALLYGPKIVPRELAEATGVVMSFYVCLGLTLGSACSTLLVHLI

SEQ ID NO: 40767 - protein, 4 aa, Artificial Sequence
  Synthetic polypeptide
HELL

SEQ ID NO: 40768 - protein, 11 aa, Artificial Sequence
  Synthetic polypeptide
LLPCDFDQGCS

SEQ ID NO: 40769 - protein, 516 aa, Artificial Sequence
  Synthetic polypeptide
YYHVTLIKVAARSRYSKDPFEFKKETPNSRLVTEPVEDEQPSTLSPKKKQRNGGMRNSPNTSPKLMRHDPLLIPGNDQIDNMDSNVKKYDSTGMFHWCAPKEIEKVILTRSEAAMTVLSGHVVVCIFGDVSSALIGLRNLVMPLRASNFHYHELKHIVFVGSIEYLKREWETLHNFPKVSILPGTPLSRADLRAVNINLCDMCVILSANQNNIDDTSLQDKECILASLNIKSMQFDDSIGVLQANSQGFTPPGMDRSSPDNSPVHGMLRQPSITTGVNIPIITELVNDTNVQFLDQDDDDDPDTELYLTQPFACGTAFAVSVLDSLMSATYFNDNILTLIRTLVTGGATPELEALIAEENALRGGYSTPQTLANRDRCRVAQLALLDGPFADLGDGGCYGDLFCKALKTYNMLCFGIYRLRDAHLSTPSQCTKRYVITNPPYEFELVPTDLIFCLMQFDHNAGQSRASLSHSSHSSQSSSKKSSSVHSIPSTANRQNRPKSRESRDKQKYVQEERL

SEQ ID NO: 40770 - protein, 3 aa, Artificial Sequence
  Synthetic polypeptide
QRW

SEQ ID NO: 40771 - protein, 274 aa, Artificial Sequence
  Synthetic polypeptide
RLREVRKLQKKSWKLAEMVMESGDWLVGGDLQVLEKIRWNDGLDQYRLTPLELKQKCKEMNADAVFAFQLRNPVHNGHALLMQDTRRRLLERGYKHPVLLLHPLGGWTKDDDVPLDWRMKQHAAVLEEGVLDPKSTIVAIFPSPMLYAGPTEVQWHCRSRMIAGANFYIVGRDPAGMPHPETKKDLYEPTHGGKVLSMAPGLTSVEIIPFRVAAYNKAKKAMDFYDPARHNEFDFISGTRMRKLAREGENPPDGFMAPKAWKVLTDYYRSLEKN

SEQ ID NO: 40772 - protein, 68 aa, Artificial Sequence
  Synthetic polypeptide
VVLSNQLQHCLKPKHLIQSKALTPFNSMKVERGEKAAEEKLEASRDGDGKWGLAGWWRPSGAGENKME

SEQ ID NO: 40773 - protein, 24 aa, Artificial Sequence
  Synthetic polypeptide
FQTSGLQNCSFKRWSMILKTMKVE

SEQ ID NO: 40774 - protein, 18 aa, Artificial Sequence
  Synthetic polypeptide
HLDFRLLVSRTAASKDGP

SEQ ID NO: 40775 - protein, 165 aa, Artificial Sequence
  Synthetic polypeptide
VYCLTLRTCECDIFWKASICRFDYIKDANLRLSWIKWVGPKFSNKCPDKQHRGETWREVRRPCEDRGRDLRYTATSQGVAGATRSWKRQRRILLQSLWRKHGPTDTLISDFWSPELQLQKMVHDIKNNEGGIMNKIKKLKVKAPPSVPRRDYASDTCSLSWNPSK

SEQ ID NO: 40776 - protein, 556 aa, Artificial Sequence
  Synthetic polypeptide
VYCLTLRTCECDIFWKASICRFDYIKDANLRLSWIKWVGPKFSNKCPDKQHRGETWREVRRPCEDRGRDLRYTATSQGVAGATRSWKRQRRILLQSLWRKHGPTDTLISDFWSPELQLQKMVHDIKNNEGGIMNKIKKLKVKAPPSVPRRDYASESPADEEEQWSDDFDSDYENPDEHSDSEMYVMPAEENADDSYEPPPVEQETRPVHPALPFARGEYIDNRSSQRHSPPFSKTLPSKPSWPSEKARLTSTLPALTALQKPQVPPKPKGLLEDEADYVVPVEDNDENYIHPTESSSPPPEKAPMVNRSTKPNSSTPASPPGTASGRNSGAWETKSPPPAAPSPLPRAGKKPTTPLKTTPVASQQNASSVCEEKPIPAERHRGSSHRQEAVQSPVFPPAQKQIHQKPIPLPRFTEGGNPTVDGPLPSFSSNSTISEQEAGVLCKPWYAGACDRKSAEEALHRSNKDGSFLIRKSSGHDSKQPYTLVVFFNKRVYNIPVRFIEATKQYALGRKKNGEEYFGSVAEIIRNHQHSPLVLIDSQNNTKDSTRLKYAVKVS

SEQ ID NO: 40777 - protein, 521 aa, Artificial Sequence
  Synthetic polypeptide
VYCLTLRTCECDIFWKASICRFDYIKDANLRLSWIKWVGPKFSNKCPDKQHRGETWREVRRPCEDRGRDLRYTATSQGVAGATRSWKRQRRILLQSLWRKHGPTDTLISDFWSPELQLQKMVHDIKNNEGGIMNKIKKLKVKAPPSVPRRDYASESPADEEEQWSDDFDSDYENPDEHSDSEMYVMPAEENADDSYEPPPVEQETRPVHPALPFARGEYIDNRSSQRHSPPFSKTLPSKPSWPSEKARLTSTLPALTALQKPQVPPKPKGLLEDEADYVVPVEDNDENYIHPTESSSPPPEKAPMVNRSTKPNSSTPASPPGTASGRNSGAWETKSPPPAAPSPLPRAGKKPTTPLKTTPVASQQNASSVCEEKPIPAERHRGSSHRQEAVQSPVFPPAQKQIHQKPIPLPRFTEGGNPTVDGPLPSFSSNSTISEQEAGVLCKPWYAGACDRKSAEEALHRSNKDPQPPLPSKQWETRKLQYFGSVAEIIRNHQHSPLVLIDSQNNTKDSTRLKYAVKVS

SEQ ID NO: 40778 - protein, 504 aa, Artificial Sequence
  Synthetic polypeptide
VYCLTLRTCECDIFWKASICRFDYIKDANLRLSWIKWVGPKFSNKCPDKQHRGETWREVRRPCEDRGRDLRYTATSQGVAGATRSWKRQRRILLQSLWRKHGPTDTLISDFWSPELQLQKMVHDIKNNEGGIMNKIKKLKVKAPPSVPRRDYASESPADEEEQWSDDFDSDYENPDEHSDSEMYVMPAEENADDSYEPPPVEQETRPVHPALPFARGEYIDNRSSQRHSPPFSKTLPSKPSWPSEKARLTSTLPALTALQKPQVPPKPKGLLEDEADYVVPVEDNDENYIHPTESSSPPPEKAPMVNRSTKPNSSTPASPPGTASGRNSGAWETKSPPPAAPSPLPRAGKKPTTPLKTTPVASQQNASSVCEEKPIPAERHRGSSHRQEAVQSPVFPPAQKQIHQKPIPLPRFTEGGNPTVDGPLPSFSSNSTISEQEAGVLCKPWYAGACDRKSAEEALHRSNKYFGSVAEIIRNHQHSPLVLIDSQNNTKDSTRLKYAVKVS

SEQ ID NO: 40779 - protein, 533 aa, Artificial Sequence
  Synthetic polypeptide
VYCLTLRTCECDIFWKASICRFDYIKDANLRLSWIKWVGPKFSNKCPDKQHRGETWREVRRPCEDRGRDLRYTATSQGVAGATRSWKRQRRILLQSLWRKHGPTDTLISDFWSPELQLQKMVHDIKNNEGGIMNKIKKLKVKAPPSVPRRDYASESPADEEEQWSDDFDSDYENPDEHSDSEMYVMPAEENADDSYEPPPVEQETRPVHPALPFARGEYIDNRSSQRHSPPFSKTLPSKPSWPSEKARLTSTLPALTALQKPQVPPKPKGLLEDEADYVVPVEDNDENYIHPTESSSPPPEKGRNSGAWETKSPPPAAPSPLPRAGKKPTTPLKTTPVASQQNASSVCEEKPIPAERHRGSSHRQEAVQSPVFPPAQKQIHQKPIPLPRFTEGGNPTVDGPLPSFSSNSTISEQEAGVLCKPWYAGACDRKSAEEALHRSNKDGSFLIRKSSGHDSKQPYTLVVFFNKRVYNIPVRFIEATKQYALGRKKNGEEYFGSVAEIIRNHQHSPLVLIDSQNNTKDSTRLKYAVKVS

SEQ ID NO: 40780 - protein, 221 aa, Artificial Sequence
  Synthetic polypeptide
VYCLTLRTCECDIFWKASICRFDYIKDANLRLSWIKWVGPKFSNKCPDKQHRGETWREVRRPCEDRGRDLRYTATSQGVAGATRSWKRQRRILLQSLWRKHGPTDTLISDFWSPELQLQKMVHDIKNNEGGIMNKIKKLKVKAPPSVPRRDYASESPADEEEQWSDDFDSDYENPDEHSDSEMYVMPAEENADDSYEPPPVEQETRPVHPALPFARGEYIG

SEQ ID NO: 40781 - protein, 33 aa, Artificial Sequence
  Synthetic polypeptide
AVGHWRICFPMRRMALSQTGFYQNGSSLTNSGI

SEQ ID NO: 40782 - protein, 121 aa, Artificial Sequence
  Synthetic polypeptide
KQSDHVPVQPPAHMSCGSLADMFSHEENGPEPDWVLSEREQFNEFRDLNKDGKLDKDEIRHWILPQDYDHAQAEARHLVYESDKNKDEKLTKEEILENWNMFVGSQATNYGEDLTKNHDEL

SEQ ID NO: 40783 - protein, 21 aa, Artificial Sequence
  Synthetic polypeptide
PCSCAASSSYELWVIGGYVFP

SEQ ID NO: 40784 - protein, 20 aa, Artificial Sequence
  Synthetic polypeptide
AEITPLHSRLGDKLEEESKG

SEQ ID NO: 40785 - protein, 23 aa, Artificial Sequence
  Synthetic polypeptide
AEITPLHSRLGDKLEEESKGDCT

SEQ ID NO: 40786 - protein, 2 aa, Artificial Sequence
  Synthetic polypeptide
QT

SEQ ID NO: 40787 - protein, 42 aa, Artificial Sequence
  Synthetic polypeptide
SQLLVGLRQEDHLSLGGGGCSEPRSRHCTPVWVTNLKKRVKE

SEQ ID NO: 40788 - protein, 45 aa, Artificial Sequence
  Synthetic polypeptide
SQLLVGLRQEDHLSLGGGGCSEPRSRHCTPVWVTNLKKRVKEIVH

SEQ ID NO: 40789 - protein, 80 aa, Artificial Sequence
  Synthetic polypeptide
SQLLVGLRQEDHLSLGGGGCSEPRSRHCTPVWVTNLKKRVKEIVHKAFWDCLSVQLSEDPPAYDHAIKLVGEIKETLLSF

SEQ ID NO: 40790 - protein, 531 aa, Artificial Sequence
  Synthetic polypeptide
SQLLVGLRQEDHLSLGGGGCSEPRSRHCTPVWVTNLKKRVKEIVHKAFWDCLSVQLSEDPPAYDHAIKLVGEIKETLLSFLLPGHTRLRNQITEVLDLDLIKQEAENGALDISKLAEFIIGMMGTLCAPARDEEVKKLKDIKEIVPLFREIFSVLDLMKVDMANFAISSIRPHLMQQSVEYERKKFQEILERQPNSLDFVTQWLEEASEDLMTQKYKHALPVGGMAAGSGDMPRLSPVAVQNYAYLKLLKWDHLQRPFPETVLMDQSRFHELQLQLEQLTILGAVLLVTFSMAAPGISSQADFAEKLKMIVKILLTDMHLPSFHLKDVLTTIGEKVCLEVSSCLSLCGSSPFTTDKETVLKGQIQAVASPDDPIRRIMESRILTFLETYLASGHQKPLPTVPGGLSPVQRELEEVAIKFARLVNYNKMVFCPYYDAILRKRWISFGNFFGSSNTDMSPWNCRTDYPMSLHIRFPKNHVIEAPMTIQLCFQEPCNKALSLLNIPLEAKGILDRSFLQRRLKPYRIRFCCRAL

SEQ ID NO: 40791 - protein, 445 aa, Artificial Sequence
  Synthetic polypeptide
SQLLVGLRQEDHLSLGGGGCSEPRSRHCTPVWVTNLKKRVKEIVHKAFWDCLSVQLSEDPPAYDHAIKLVGEIKETLLSFLLPGHTRLRNQITEVLDLDLIKQEAENGALDISKLAEFIIGMMGTLCAPARDEEVKKLKDIKEIVPLFREIFSVLDLMKVDMANFAISSIRPHLMQQSVEYERKKFQEILERQPNSLDFVTQWLEEASEDLMTQKYKHALPVGGMAAGSGDMPRLSPVAVQNYAYLKLLKWDHLQRPFPETVLMDQSRFHELQLQLEQLTILGAVLLVTFSMAAPGISSQADFAEKLKMIVKILLTDMHLPSFHLKDVLTTIGEKVCLEVSSCLSLCGSSPFTTDKETVLKGQIQAVASPDDPIRRIMESRILTFLETYLASGHQKPLPTVPGGLSPVQRELEEVAIKFARLVNYNKMVFCPYYDAILSKILVRS

SEQ ID NO: 40792 - protein, 35 aa, Artificial Sequence
  Synthetic polypeptide
ECAGAAGRMESHSVTQAGVQWRSLGSLQPPPPRFK

SEQ ID NO: 40793 - protein, 44 aa, Artificial Sequence
  Synthetic polypeptide
RVRRRGGQDGVSLCYPGRSAVAQSRLTATSTSQVQVILMPQSPE

SEQ ID NO: 40794 - protein, 249 aa, Artificial Sequence
  Synthetic polypeptide
SAQARRAGWSLTLLPRPECSGAVSAHCNLHLPGSSDSHASVPRVAGITDAHHHAWLIMVASAGSLFGGMVLKKFLKEIQSILPGISAKLTWTSEEGSYSQDMTGVTPFQMIFEVDEKPRTLMTDCLVIKHFLRKIIMVHPKVRFHFSVKVNGILSTEIFGVENEPTLNLGNGIALLVDSQHYVRPNFGTIESHCSRIHPVLGHPVMLFIPEDVAGMDLLGELILTPAAALCPSPKVSSNQLNRISSVSI

SEQ ID NO: 40795 - protein, 579 aa, Artificial Sequence
  Synthetic polypeptide
SAQARRAGWSLTLLPRPECSGAVSAHCNLHLPGSSDSHASVPRVAGITDAHHHAWLIMVASAGSLFGGMVLKKFLKEIQSILPGISAKLTWTSEEGSYSQDMTGVTPFQMIFEVDEKPRTLMTDCLVIKHFLRKIIMVHPKVRFHFSVKVNGILSTEIFGVENEPTLNLGNGIALLVDSQHYVRPNFGTIESHCSRIHPVLGHPVMLFIPEDVAGMDLLGELILTPAAALCPSPKVSSNQLNRISSVSIFLYGPLGLPLILSTWEQPMTTFFKDTSSLVDWKKYHLCMIPNLDLNLDRDLVLPDVSYQVESSEEDQSQTMDPQGQTLLLFLFVDFHSAFPVQQMEIWGVYTLLTTHLNAILVESHSVVQGSIQFTVDKVLEQHHQAAKAQQKLQASLSVAVNSIMSILTGSTRSSFRKMCLQTLQAADTQEFRTKLHKVFREITQHQFLHHCSCEVKQQLTLEKKDSAQGTEDAPDNSSLELLADTSGQAENKRLKRGSPRIEEMRALRSARAPSPSEAAPRRPEATAAPLTPRGREHREAHGRALAPGRASLGSRLEDVLWLQEVSNLSEWLSPSPGP

SEQ ID NO: 40796 - protein, 599 aa, Artificial Sequence
  Synthetic polypeptide
EFVRNIVDFLKKKHDFVDLIIKHIGTSAIMDLLLRLLTCIEPPQPRQDVLNKSVMKTTWGVLDPPVGNTRLNVIRLISSLLQTNTSSINGDLMELNSIGVILNMFFKYTWNNFLHTQVEICIALILASPFENTENATITDQDSTGDNLLLKHLFQKCQLIERILEAWEMNEKKQAEGGRRHGYMGHLTRIANCIVHSTDKGPNSALVQQLIKDLPDEVRERWETFCTSSLGETNKRNTVDLVTTCHIHSSSDDEIDFKETGFSQDSSLQQAFSDYQMQQMTSNFIDQFGFNDEKFADQDDIGNVSFDRVSDINFTLNTNESGNIALFEACCKERIQQFDDGGSDEEDIWEEKHIAFTPESQRRSSSGSTDSEESTDSEEEDGAKQDLFEPSSANTEDKMEVDLSEPPNWSANFDVPMETTHGAPLDSVGSDVWSTEEPMPTKETGWASFSEFTSSLSTKDSLRSNSPVEMETSTEPMDPLTPSAAALAVQPEAAGSVAMEASSDGEEDAESTDKVTETVMNGGMKETLSLTVDAKTETAVFKSEEGKLSTSQDAACKDAEECPETAEAKCAAPRPPSSSPEQRTGQPSAPGDTSVNGPV

SEQ ID NO: 40797 - protein, 53 aa, Artificial Sequence
  Synthetic polypeptide
EFVRNIVDFLKKKHDFVDLIIKHIGTSAIMDLLLRLLTCIEPPQPRQDVLNWL

SEQ ID NO: 40798 - protein, 98 aa, Artificial Sequence
  Synthetic polypeptide
EFVRNIVDFLKKKHDFVDLIIKHIGTSAIMDLLLRLLTCIEPPQPRQDVLNWLNEEKIIQRLVEIVHPSQEEDRHSNASQSLCEIVRLSRDQMLQIQN

SEQ ID NO: 40799 - protein, 711 aa, Artificial Sequence
  Synthetic polypeptide
EFVRNIVDFLKKKHDFVDLIIKHIGTSAIMDLLLRLLTCIEPPQPRQDVLNWLNEEKIIQRLVEIVHPSQEEDRHSNASQSLCEIVRLSRDQMLQIQNSTEPDPLLATLEKQEIIEQLLSNIFHKEKNESAIVSAIQILLTLLETRRPTFEGHIEICPPGMSHSACSVNKSVLEAIRGRLGSFHELLLEPPKKSVMKTTWGVLDPPVGNTRLNVIRLISSLLQTNTSSINGDLMELNSIGVILNMFFKYTWNNFLHTQVEICIALILASPFENTENATITDQDSTGDNLLLKHLFQKCQLIERILEAWEMNEKKQAEGGRRHGYMGHLTRIANCIVHSTDKGPNSALVQQLIKDLPDEVRERWETFCTSSLGETNKRNTVDLAFSDYQMQQMTSNFIDQFGFNDEKFADQDDIGNVSFDRVSDINFTLNTNESGNIALFEACCKERIQQFDDGGSDEEDIWEEKHIAFTPESQRRSSSGSTDSEESTDSEEEDGAKQDLFEPSSANTEDKMEVDLSEPPNWSANFDVPMETTHGAPLDSVGSDVWSTEEPMPTKETGWASFSEFTSSLSTKDSLRSNSPVEMETSTEPMDPLTPSAAALAVQPEAAGSVAMEASSDGEEDAESTDKVTETVMNGGMKETLSLTVDAKTETAVFKSEEGKLSTSQDAACKDAEECPETAEAKCAAPRPPSSSPEQRTGQPSAPGDTSVNGPV

SEQ ID NO: 40800 - protein, 694 aa, Artificial Sequence
  Synthetic polypeptide
EFVRNIVDFLKKKHDFVDLIIKHIGTSAIMDLLLRLLTCIEPPQPRQDVLNWLNEEKIIQRLVEIVHPSQEEDRHSNASQSLCEIVRLSRDQMLQIQNSTEPDPLLATLEKQEIIEQLLSNIFHKEKNESAIVSAIQILLTLLETRRPTFEGHIEICPPGMSHSACSVNKSVLEAIRGRLGSFHELLLEPPKKSVMKTTWGVLDPPVGNTRLNVIRLISSLLQTNTSSINGDLMELNSIGVILNMFFKYTWNNFLHTQVEICIALILASPFENTENATITDQDSTGDNLLLKHLFQKCQLIERILEAWEMNEKKQAEGGRRHGYMGHLTRIANCIVHSTDKGPNSALVQQLIKDLPDEVRERWETFCTSSLGETNKRNTVDLFGFNDEKFADQDDIGNVSFDRVSDINFTLNTNESGNIALFEACCKERIQQFDDGGSDEEDIWEEKHIAFTPESQRRSSSGSTDSEESTDSEEEDGAKQDLFEPSSANTEDKMEVDLSEPPNWSANFDVPMETTHGAPLDSVGSDVWSTEEPMPTKETGWASFSEFTSSLSTKDSLRSNSPVEMETSTEPMDPLTPSAAALAVQPEAAGSVAMEASSDGEEDAESTDKVTETVMNGGMKETLSLTVDAKTETAVFKSEEGKLSTSQDAACKDAEECPETAEAKCAAPRPPSSSPEQRTGQPSAPGDTSVNGPV

SEQ ID NO: 40801 - protein, 705 aa, Artificial Sequence
  Synthetic polypeptide
EFVRNIVDFLKKKHDFVDLIIKHIGTSAIMDLLLRLLTCIEPPQPRQDVLNWLNEEKIIQRLVEIVHPSQEEDRHSNASQSLCEIVRLSRDQMLQIQNSTEPDPLLATLEKQEIIEQLLSNIFHKEKNESAIVSAIQILLTLLETRRPTFEGHIEICPPGMSHSACSVNKSVLEAIRGRLGSFHELLLEPPKKSVMKTTWGVLDPPVGNTRLNVIRLISSLLQTNTSSINGDLMELNSIGVILNMFFKYTWNNFLHTQVEICIALILASPFENTENATITDQDSTGDNLLLKHLFQKCQLIERILEAWEMNEKKQAEGGRRHGYMGHLTRIANCIVHSTDKGPNSALVQQLIKDLPDEVRERWETFCTSSLGETNKRNTVDLMQQMTSNFIDQFGFNDEKFADQDDIGNVSFDRVSDINFTLNTNESGNIALFEACCKERIQQFDDGGSDEEDIWEEKHIAFTPESQRRSSSGSTDSEESTDSEEEDGAKQDLFEPSSANTEDKMEVDLSEPPNWSANFDVPMETTHGAPLDSVGSDVWSTEEPMPTKETGWASFSEFTSSLSTKDSLRSNSPVEMETSTEPMDPLTPSAAALAVQPEAAGSVAMEASSDGEEDAESTDKVTETVMNGGMKETLSLTVDAKTETAVFKSEEGKLSTSQDAACKDAEECPETAEAKCAAPRPPSSSPEQRTGQPSAPGDTSVNGPV

SEQ ID NO: 40802 - protein, 746 aa, Artificial Sequence
  Synthetic polypeptide
EFVRNIVDFLKKKHDFVDLIIKHIGTSAIMDLLLRLLTCIEPPQPRQDVLNWLNEEKIIQRLVEIVHPSQEEDRHSNASQSLCEIVRLSRDQMLQIQNSTEPDPLLATLEKQEIIEQLLSNIFHKEKNESAIVSAIQILLTLLETRRPTFEGHIEICPPGMSHSACSVNKSVLEAIRGRLGSFHELLLEPPKKSVMKTTWGVLDPPVGNTRLNVIRLISSLLQTNTSSINGDLMELNSIGVILNMFFKYTWNNFLHTQVEICIALILASPFENTENATITDQDSTGDNLLLKHLFQKCQLIERILEAWEMNEKKQAEGGRRHGYMGHLTRIANCIVHSTDKGPNSALVQQLIKDLPDEVRERWETFCTSSLGETNKRNTVDLVTTCHIHSSSDDEIDFKETGFSQDSSLQQAFSDYQMQQMTSNFIDQFGFNDEKFADQDDIGNVSFDRVSDINFTLNTNESGNIALFEACCKERIQQFDDGGSDEEDIWEEKHIAFTPESQRRSSSGSTDSEESTDSEEEDGAKQDLFEPSSANTEDKMEVDLSEPPNWSANFDVPMETTHGAPLDSVGSDVWSTEEPMPTKETGWASFSEFTSSLSTKDSLRSNSPVEMETSTEPMDPLTPSAAALAVQPEAAGSVAMEASSDGEEDAESTDKVTETVMNGGMKETLSLTVDAKTETAVFKRLLGGCSEEGKLSTSQDAACKDAEECPETAEAKCAAPRPPSSSPEQRTGQPSAPGDTSVNGPV

SEQ ID NO: 40803 - protein, 746 aa, Artificial Sequence
  Synthetic polypeptide
EFVRNIVDFLKKKHDFVDLIIKHIGTSAIMDLLLRLLTCIEPPQPRQDVLNWLNEEKIIQRLVEIVHPSQEEDRHSNASQSLCEIVRLSRDQMLQIQNSTEPDPLLATLEKQEIIEQLLSNIFHKEKNESAIVSAIQILLTLLETRRPTFEGHIEICPPGMSHSACSVNKSVLEAIRGRLGSFHELLLEPPKKSVMKTTWGVLDPPVGNTRLNVIRLISSLLQTNTSSINGDLMELNSIGVILNMFFKYTWNNFLHTQVEICIALILASPFENTENATITDQDSTGDNLLLKHLFQKCQLIERILEAWEMNEKKQAEGGRRHGYMGHLTRIANCIVHSTDKGPNSALVQQLIKDLPDEVRERWETFCTSSLGETNKRNTVDLVTTCHIHSSSDDEIDFKETGFSQDSSLQQAFSDYQMQQMTSNFIDQFGFNDEKFADQDDIGNVSFDRVSDINFTLNTNESGNIALFEACCKERIQQFDDGGSDEEDIWEEKHIAFTPESQRRSSSGSTDSEESTDSEEEDGAKQDLFEPSSANTEDKMEVDLSEPPNWSANFDVPMETTHGAPLDSVGSDVWSTEEPMPTKETGWASFSEFTSSLSTKDSLRSNSPVEMETSTEPMDPLTPSAAALAVQPEAAGSVAMEASSDGEEDAESTDKVTETVMNGGMKETLSLTVDAKTETAVFKRVLKSYREEGKLSTSQDAACKDAEECPETAEAKCAAPRPPSSSPEQRTGQPSAPGDTSVNGPV

SEQ ID NO: 40804 - protein, 740 aa, Artificial Sequence
  Synthetic polypeptide
EFVRNIVDFLKKKHDFVDLIIKHIGTSAIMDLLLRLLTCIEPPQPRQDVLNWLNEEKIIQRLVEIVHPSQEEDRHSNASQSLCEIVRLSRDQMLQIQNSTEPDPLLATLEKQEIIEQLLSNIFHKEKNESAIVSAIQILLTLLETRRPTFEGHIEICPPGMSHSACSVNKSVLEAIRGRLGSFHELLLEPPKKSVMKTTWGVLDPPVGNTRLNVIRLISSLLQTNTSSINGDLMELNSIGVILNMFFKYTWNNFLHTQVEICIALILASPFENTENATITDQDSTGDNLLLKHLFQKCQLIERILEAWEMNEKKQAEGGRRHGYMGHLTRIANCIVHSTDKGPNSALVQQLIKDLPDEVRERWETFCTSSLGETNKRNTVDLVTTCHIHSSSDDEIDFKETGFSQDSSLQQAFSDYQMQQMTSNFIDQFGFNDEKFADQDDIGNVSFDRVSDINFTLNTNESGNIALFEACCKERIQQFDDGGSDEEDIWEEKHIAFTPESQRRSSSGSTDSEESTDSEEEDGAKQDLFEPSSANTEDKMEVDLSEPPNWSANFDVPMETTHGAPLDSVGSDVWSTEEPMPTKETGWASFSEFTSSLSTKDSLRSNSPVEMETSTEPMDPLTPSAAALAVQPEAAGSVAMEASSDGEEDAESTDKVTETVMNGGMKETLSLTVDAKTETAVFKSEEGKLSTSQDAACKDAEECPETAEAKCAAPRPPSSSPEQRTGQPSAPGDTSVNGPV

SEQ ID NO: 40805 - protein, 734 aa, Artificial Sequence
  Synthetic polypeptide
EFVRNIVDFLKKKHDFVDLIIKHIGTSAIMDLLLRLLTCIEPPQPRQDVLNWLNEEKIIQRLVEIVHPSQEEDRHSNASQSLCEIVRLSRDQMLQIQNSTEPDPLLATLEKQEIIEQLLSNIFHKEKNESAIVSAIQILLTLLETRRPTFEGHIEICPPGMSHSACSVNKSVLEAIRGRLGSFHELLLEPPKKSVMKTTWGVLDPPVGNTRLNVIRLISSLLQTNTSSINGDLMELNSIGVILNMFFKYTWNNFLHTQVEICIALILASPFENTENATITDQDSTGDNLLLKHLFQKCQLIERILEAWEMNEKKQAEGGRRHGYMGHLTRIANCIVHSTDKGPNSALVQQLIKDLPDEVRERWETFCTSSLGETNKRNTVDLVTTCHIHSSSDDEIDFKETGFSQDSSLQQMQQMTSNFIDQFGFNDEKFADQDDIGNVSFDRVSDINFTLNTNESGNIALFEACCKERIQQFDDGGSDEEDIWEEKHIAFTPESQRRSSSGSTDSEESTDSEEEDGAKQDLFEPSSANTEDKMEVDLSEPPNWSANFDVPMETTHGAPLDSVGSDVWSTEEPMPTKETGWASFSEFTSSLSTKDSLRSNSPVEMETSTEPMDPLTPSAAALAVQPEAAGSVAMEASSDGEEDAESTDKVTETVMNGGMKETLSLTVDAKTETAVFKSEEGKLSTSQDAACKDAEECPETAEAKCAAPRPPSSSPEQRTGQPSAPGDTSVNGPV

SEQ ID NO: 40806 - protein, 660 aa, Artificial Sequence
  Synthetic polypeptide
EFVRNIVDFLKKKHDFVDLIIKHIGTSAIMDLLLRLLTCIEPPQPRQDVLNWLNEEKIIQRLVEIVHPSQEEDRHSNASQSLCEIVRLSRDQMLQIQNSTEPDPLLATLEKQEIIEQLLSNIFHKEKNESAIVSAIQILLTLLETRRPTFEGHIEICPPGMSHSACSVNKSVLEAIRGRLGSFHELLLEPPKNMFFKYTWNNFLHTQVEICIALILASPFENTENATITDQDSTGDNLLLKHLFQKCQLIERILEAWEMNEKKQAEGGRRHGYMGHLTRIANCIVHSTDKGPNSALVQQLIKDLPDEVRERWETFCTSSLGETNKRNTVDLAFSDYQMQQMTSNFIDQFGFNDEKFADQDDIGNVSFDRVSDINFTLNTNESGNIALFEACCKERIQQFDDGGSDEEDIWEEKHIAFTPESQRRSSSGSTDSEESTDSEEEDGAKQDLFEPSSANTEDKMEVDLSEPPNWSANFDVPMETTHGAPLDSVGSDVWSTEEPMPTKETGWASFSEFTSSLSTKDSLRSNSPVEMETSTEPMDPLTPSAAALAVQPEAAGSVAMEASSDGEEDAESTDKVTETVMNGGMKETLSLTVDAKTETAVFKSEEGKLSTSQDAACKDAEECPETAEAKCAAPRPPSSSPEQRTGQPSAPGDTSVNGPV

SEQ ID NO: 40807 - protein, 658 aa, Artificial Sequence
  Synthetic polypeptide
EFVRNIVDFLKKKHDFVDLIIKHIGTSAIMDLLLRLLTCIEPPQPRQDVLNWLNEEKIIQRLVEIVHPSQEEDRHSNASQSLCEIVRLSRDQMLQIQNSTEPDPLLATLEKQEIIEQLLSNIFHKEKNESAIVSAIQILLTLLETRRPTFEGHIEICPPGMSHSACSVNKSVLEAIRGRLGSFHELLLEPPKNMFFKYTWNNFLHTQVEICIALILASPFENTENATITDQDSTGDNLLLKHLFQKCQLIERILEAWEMNEKKQAEGGRRHGYMGHLTRIANCIVHSTDKGPNSALVQQLIKDLPDEVRERWETFCTSSLGETNKRNTVDLAFSDYQMQQMTSNFIDQFGFNDEKFADQDDIGNVSFDRVSDINFTLNTNESGNIALFEACCKERIQQFDDGGSDEEDIWEEKHIAFTPESQRRSSSGSTDSEESTDSEEEDGAKQDLFEPSSANTEDKMEVDLSEPPNWSANFDVPMETTHGAPLDSVGSDVWSTEEPMPTKETGWASFSEFTSSLSTKDSLRSNSPVEMETSTEPMDPLTPSAAALAVQPEAAGSVAMEASSDGEEDAESTDKVTETVMNGGMKETLSLTVDAKTETAVFKSEEGKLSTSQDAACKDAEECPETAEAKCAAPRPPSSSPEQSGVEIPALPGQWSQQ

SEQ ID NO: 40808 - protein, 10 aa, Artificial Sequence
  Synthetic polypeptide
KYCGFLKEEA

SEQ ID NO: 40809 - protein, 18 aa, Artificial Sequence
  Synthetic polypeptide
TSSPSVLPENLLEILWIS

SEQ ID NO: 40810 - protein, 54 aa, Artificial Sequence
  Synthetic polypeptide
FSEFSFLFYKMKIITTSEEQPATLSAAHGIYGHKSCSSTSLDPWASQSGYLETA

SEQ ID NO: 40811 - protein, 51 aa, Artificial Sequence
  Synthetic polypeptide
IQFPFLQNEDHYYFRGTTCHTFSCPWHLWAQVMFQHIPGPMGFSEWLPRNS

SEQ ID NO: 40812 - protein, 43 aa, Artificial Sequence
  Synthetic polypeptide
RSLLLQRNNLPHFQLPMAFMGTSHVPAHPWTHGLLRVVTSKQL

SEQ ID NO: 40813 - protein, 80 aa, Artificial Sequence
  Synthetic polypeptide
GRQITRSGVRDQPDQQAKDTDIVDEAIYYFKANVFFKNYEIKNEADRTLIYITLYISECLKKLQKCNSKSQEVMRAYLQQ

SEQ ID NO: 40814 - protein, 73 aa, Artificial Sequence
  Synthetic polypeptide
GRQITRSGVRDQPDQQAKDTDIVDEAIYYFKANVFFKNYEIKNEADRTLIYITLYISECLKKLQKCNSKSQGE

SEQ ID NO: 40815 - protein, 159 aa, Artificial Sequence
  Synthetic polypeptide
GRQITRSGVRDQPDQQAKDTDIVDEAIYYFKANVFFKNYEIKNEADRTLIYITLYISECLKKLQKCNSKSQGEKEMYTLGITNFPIPGEPGFPLNAIYAKPANKQEDEVMRAYLQQLRQETGLRLCEKVFDPQNDKPSKWWTCFVKRQFMNKSLSGPGQ

SEQ ID NO: 40816 - protein, 10 aa, Artificial Sequence
  Synthetic polypeptide
PTSKRYRYCG

SEQ ID NO: 40817 - protein, 64 aa, Artificial Sequence
  Synthetic polypeptide
RGWWLTPVIPALWEAEAGRSRGQEFETSLTNKQKIQILWMKPSITSRPMSSSKTMKLRMKLIGP

SEQ ID NO: 40818 - protein, 284 aa, Artificial Sequence
  Synthetic polypeptide
KVGGWGRRCKRHASREEAELVQQMAANIKERQDVFFDMEAYLPKKNGLYLNLVLGNVNVTLLSNQAKFAYKDEYEKFKLYLTIILLLGAVACRFVLHYRVTDEVFNFLLVWYYCTLTIRESILISNGSRIKGWWVSHHYVSTFLSGVMLTWPNGPIYQKFRNQFLAFSIFQSCVQFLQYYYQRGCLYRLRALGERNHLDLTVEGFQSWMWRGLTFLLPFLFCGHFWQLYNAVTLFELSSHEECREWQVFVLAFTFLILFLGNFLTTLKVVHAKLQKNRGKTKQP

SEQ ID NO: 40819 - protein, 213 aa, Artificial Sequence
  Synthetic polypeptide
KVGGWGRRCKRHASREEAELVQQMAANIKERQDVFFDMEAYLPKKNGLYLNLVLGNVNVTLLSNQAKFAYKDEYEKFKLYLTIILLLGAVACRFVLHYRVTDEVFNFLLVWYYCTLTIRESILISNGSRIKGWWVSHHYVSTFLSGVMLTWPNGPIYQKFRNQFLAFSIFQSCVQFLQYYYQRGCLYRLRALGERNHLDLTVVLAALQCRHAV

SEQ ID NO: 40820 - protein, 56 aa, Artificial Sequence
  Synthetic polypeptide
KVGGWGRRWEAGVEGANAMPVGRRRSSFSRWQRTSRSGRTSSSTWRPTCPRRTGST

SEQ ID NO: 40821 - protein, 67 aa, Artificial Sequence
  Synthetic polypeptide
KVQTPCQSGGGGARSADGSEHQGAAGRLLRHGGLPAQEERALLEPGPRQCERDPPQQPGQVRLQGRI

SEQ ID NO: 40822 - protein, 70 aa, Artificial Sequence
  Synthetic polypeptide
KVGGWGRRWEAGVEGGRHWGRRWEAGVEGANAMPVGRRRSSFSRWQRTSRSGRTSSSTWRPTCPRRTGST

SEQ ID NO: 40823 - protein, 70 aa, Artificial Sequence
  Synthetic polypeptide
ASSESHAYNCSSWGGQGGWISSTQEFKTSLGNMHKQYYNGCRQHNFQWAFNSSNDEWTRKHYFFKQKYCL

SEQ ID NO: 40824 - protein, 25 aa, Artificial Sequence
  Synthetic polypeptide
LQQLGRPRRVDLFNSRVQDKPWQHA

SEQ ID NO: 40825 - protein, 312 aa, Artificial Sequence
  Synthetic polypeptide
PAASLMPIIAAVGEAKAGGSLQLKSSRQALATCISSTIMDVDSTISSGRSTPAMMNGQGSTTSSSKNIAYNCCWDQCQACFNSSPDLADHIRSIHVDGQRGGVFVCLWKGCKVYNTPSTSQSWLQRHMLTHSGDKPFKCVVGGCNASFASQGGLARHVPTHFSQQNSSKVSSQPKAKEESPSKAGMNKRRKLKNKRRRSLPRPHDFFDAQTLDAIRHRAICFNLSAHIESLGKGHSVVFHSTVIAKRKEDSGKIKLLLHWMPEDILPDVWVNESERHQLKTKVVHLSKLPKDTALLLDPNIYRTMPQKRLKR

SEQ ID NO: 40826 - protein, 326 aa, Artificial Sequence
  Synthetic polypeptide
PAASLMPIIAAVGEAKAGGSLQLKSSRQALATCISSTIMDVDSTISSGRSTPAMMNGQGSTTSSSKNIAYNCCWDQCQACFNSSPDLADHIRSIHVDGQRGGVFVCLWKGCKVYNTPSTSQSWLQRHMLTHSGDKPFKCVVGGCNASFASQGGLARHVPTHFSQQNSSKVSSQPKAKEESPSKAGMNKRRKLKNKRRRSLPRPHDFFDAQTLDAIRHRAICFNLSAHIESLGKGHSVVFHSTVIAKRKEDSGKIKLLLHWMPEDILPDVWVNESERHQLKTKVVHLSKLPKDTALLLDPNIYRTMPQKRLKRTLIRKVFNLYLSKQ

SEQ ID NO: 40827 - protein, 512 aa, Artificial Sequence
  Synthetic polypeptide
KFQEDRDYVCSLLCSVYSQFLVSSKLINTYVLSPVLTSEVHSVRAGRHLATKLNILVQQHFDLASTTITNIPMKEEQHANTSANYDVELLHHKDAHVDFLKSGDSHLGGGSREGSFKETITLKWCTPRTNNIELHYCTGAYRISPVDVNSRPSSCLTNFLLNGRSVLLEQPRKSGSKVISHMLSSHGGEIFLHVLSSSRSILEDPPSISEGCGGRVTDYRITDFGEFMRENRLTPFLDPRYKIDGSLEVPLERAKDQLEKHTRYWPMIISQTTIFNMQAVVPLASVIVKESLTEEDVLNCQKTIYNLVDMERKNDPLPISTVGTRGKGPKRDEQYRIMWNELETLVRAHINNSEKHQRVLECLMACRSKPPEEEERKKRGRKREDKEDKSEKAVKDYEQEKSWQDSERLKGILERGKEELAEAEIIKDSPDSPEPPNKKPLVEMDETPQVEKSKGPVSLLSLWSNRINTANSRKHQEFAGRLNSVNNRAELYQHLKEENGMETTENGKASRQ

SEQ ID NO: 40828 - protein, 9 aa, Artificial Sequence
  Synthetic polypeptide
LIHMCCPRF

SEQ ID NO: 40829 - protein, 10 aa, Artificial Sequence
  Synthetic polypeptide
YICVVPGFNQ

SEQ ID NO: 40830 - protein, 460 aa, Artificial Sequence
  Synthetic polypeptide
LLGLSIRKYLKMILLIIASVIGIIVYRLSVFIVFSAKLPKNINGTDPIQKYLTPQTATSITASIISFIIIMILNTIYEKVAIMITNFELPRTQTDYENSLTMKMFLFQFVNYYSSCFYIAFFKGKFVGYPGDPVYWLGKYRNEECDPGGCLLELTTQLTIIMGGKAIWNNIQEVLLPWIMNLIGRFHRVSGSEKITPRWEQDYHLQPMGKLGLFYEYLEMIIQFGFVTLFVASFPLAPLLALVNNILEIRVDAWKLTTQFRRLVPEKAQDIGAWQPIMQGIAILAVVTNAMIIAFTSDMIPRLVYYWSFSVPPYGDHTSYTMEGYINNTLSIFKVADFKNKSKGNPYSDLGNHTTCRYRDFRYPPGHPQEYKHNIYYWHVIAAKLAFIIVMEHVIYSVKFFISYAIPDVSKRTKSKIQREKYLTQKLLHENHLKDMTKNMGVIAERMIEAVDNNLRPKSE

SEQ ID NO: 40831 - protein, 479 aa, Artificial Sequence
  Synthetic polypeptide
LLGLSIRKYLKMILLIIASVIGIIVYRLSVFIVFSAKLPKNINGTDPIQKYLTPQTATSITASIISFIIIMILNTIYEKVAIMITNFELPRTQTDYENSLTMKMFLFQFVNYYSSCFYIAFFKGKFVGYPGDPVYWLGKYRNEECDPGGCLLELTTQLTIIMGGKAIWNNIQEVLLPWIMNLIGRFHRVSGSEKITPRWEQDYHLQPMGKLGLFYEYLEMIIQFGFVTLFVASFPLAPLLALVNNILEIRVDAWKLTTQFRRLVPEKAQDIGAWQPIMQGIAILAVVTNAMIIAFTSDMIPRLVYYWSFSVPPYGDHTSYTMEGYINNTLSIFKVADFKNKSKGNPYSDLGNHTTCRYRDFRYPPGHPQEYKHNIYYWHVIAAKLAFIIVMEYLALLPRLGHSGMILAHCNLRLPVDCCMCYRFVDEIRLLEQLTSDFIDSLYYIFSISIISIFFSVTFFFLLLSLGPTPCFSVSNFLS

SEQ ID NO: 40832 - protein, 30 aa, Artificial Sequence
  Synthetic polypeptide
STNLALRTFNQEIFENDPIDHRFSYWDHCL

SEQ ID NO: 40833 - protein, 37 aa, Artificial Sequence
  Synthetic polypeptide
VKEARGYHCSDLPDRSFGGSPQCGCGPGLHEPEKAGP

SEQ ID NO: 40834 - protein, 34 aa, Artificial Sequence
  Synthetic polypeptide
WRKSAWESGVLGAAADFLASLSEGGERLSLQRPA

SEQ ID NO: 40835 - protein, 16 aa, Artificial Sequence
  Synthetic polypeptide
LSQWRIWEHRWCIWTS

SEQ ID NO: 40836 - protein, 428 aa, Artificial Sequence
  Synthetic polypeptide
RLTLPDRLRSPVDHHGHRALGNSHSGGSGSTDGVFGPVKNPWSYSKQYREKRKQNPHSENEDSDWLITGGSSGGSAAAVSAFTCYAALGSDTGGSTRNPAAHCGLVGFKPSYGLVSRHGLIPLVNSMDVPGILTRCVDDAAIVLGALAGPDPRDSTTVHEPINKPFMLPSLADVSKLCIGIPKEYLVPELSSEVQSLWSKAADLFESEGAKVIEVSLPHTSYSIVCYHVLCTSEVASNMARFDGLQYGHRCDIDVSTEAMYAATRREGFNDVVRGRILSGNFFLLKENYENYFVKAQKVRRLIANDFVNAFNSGVDVLLTPTTLSEAVPYLEFIKEDNRTRSAQDDIFTQAVNMAGLPAVSIPVALSNQGLPIGLQFIGRAFCDQQLLTVAKWFEKQVQFPVIQLQELMDDCSAVLENEKLASVSLKQ

SEQ ID NO: 40837 - protein, 219 aa, Artificial Sequence
  Synthetic polypeptide
RLTLPDRLRSPVDHHGHRALGNSHSGGSGSTDGVFGPVKNPWSYSKQYREKRKQNPHSENEDSDWLITGGSSGGSAAAVSAFTCYAALGSDTGGSTRNPAAHCGLVGFKPSYGLVSRHGLIPLVNSMDVPGILTRCVDDAAIVLGALAGPDPRDSTTVHEPINKPFMLPSLADVSKLCIGIPKVTFSFHYFTEILSSPIESTDLGGGLGGFESLLCHFY

SEQ ID NO: 40838 - protein, 45 aa, Artificial Sequence
  Synthetic polypeptide
VTLTVEDLGAQMVYLDQLKTPGVIQNNIEKRGSRIPTARMKIQTG

SEQ ID NO: 40839 - protein, 760 aa, Artificial Sequence
  Synthetic polypeptide
EGPTPTVEADLALPLLYVELTGSSVFDYVHPGDHVEMAEQLGMKLPPGRGLLSQGTAEDGASSASSSSQSETPEPVESTSPSLLTTDNTLERSFFIRMKSTLTKRGVHIKSSGYKVIHITGRLRLRVSLSHGRTVPSQIMGLVVVAHALPPPTINEVRIDCHMFVTRVNMDLNIIYCENRISDYMDLTPVDIVGKRCYHFIHAEDVEGIRHSHLDLLNKGQCVTKYYRWMQKNGGYIWIQSSATIAINAKNANEKNIIWVNYLLSNPEYKDTPMDIAQLPHLPEKTSESSETSDSESDSKDTSEDNENSKSDEKGNQSENSEDPEPDRKKSGNACDNDMNCNDDGHSSSNPDSRDSDDSFEHSDFENPKAGEDGFGALGAMQIKVERYVESESDLRLQNCESLTSDSAKDSDSAGEAGAQASSKHQKRKKRRKRQKGGSASRRRLSSASSPGGLDAGLVEPPRLLSSPNSASVLKIKTEISEPINFDNDSSIWNYPPNREISRNESPYSMTKPPSSEHFPSPQGGGGGGGGGGGLHVAIPDSVLTPPGADGAAARKTQFGASATAALAPVASDPLSPPLSASPRDKHPGNGGGGGGGGGGAGGGGPSASNSLLYTGDLEALQRLQAGNVVLPLVHRVTGTLAATSTAAQRVYTTGTIRYAPAEVTLAMQSNLLPNAHAVNFVDVNSPGFGLDPKTPMEMLYHHVHRLNMSGPFGGAVSAASLTQMPAGNVFTTAEGLFSTLPFPVYSNGIHAAQTLERKE

SEQ ID NO: 40840 - protein, 764 aa, Artificial Sequence
  Synthetic polypeptide
EGPTPTVEADLALPLLYVELTGSSVFDYVHPGDHVEMAEQLGMKLPPGRGLLSQGTAEDGASSASSSSQSETPEPVESTSPSLLTTDNTLERSFFIRMKSTLTKRGVHIKSSGYKVIHITGRLRLRVSLSHGRTVPSQIMGLVVVAHALPPPTINEVRIDCHMFVTRVNMDLNIIYCENRISDYMDLTPVDIVGKRCYHFIHAEDVEGIRHSHLDLLNKGQCVTKYYRWMQKNGGYIWIQSSATIAINAKNANEKNIIWVNYLLSNPEYKDTPMDIAQLPHLPEKTSESSETSDSESDSKDTSGITEDNENSKSDEKGNQSENSEDPEPDRKKSGNACDNDMNCNDDGHSSSNPDSRDSDDSFEHSDFENPKAGEDGFGALGAMQIKVERYVESESDLRLQNCESLTSDSAKDSDSAGEAGAQASSKHQKRKKRRKRQKGGSASRRRLSSASSPGGLDAGLVEPPRLLSSPNSASVLKIKTEISEPINFDNDSSIWNYPPNREISRNESPYSMTKPPSSEHFPSPQGGGGGGGGGGGLHVAIPDSVLTPPGADGAAARKTQFGASATAALAPVASDPLSPPLSASPRDKHPGNGGGGGGGGGGAGGGGPSASNSLLYTGDLEALQRLQAGNVVLPLVHRVTGTLAATSTAAQRVYTTGTIRYAPAEVTLAMQSNLLPNAHAVNFVDVNSPGFGLDPKTPMEMLYHHVHRLNMSGPFGGAVSAASLTQMPAGNVFTTAEGLFSTLPFPVYSNGIHAAQTLERKED

SEQ ID NO: 40841 - protein, 88 aa, Artificial Sequence
  Synthetic polypeptide
EGPTPTVEADLALPLLYVELTGSSVFDYVHPGDHVEMAEQLGMKLPPGRGLLSQGTAEDGASSASSSSQSETPEPVVCFPPASDQFLL

SEQ ID NO: 40842 - protein, 19 aa, Artificial Sequence
  Synthetic polypeptide
KGPHPLLKLTLLCLFYMWS

SEQ ID NO: 40843 - protein, 16 aa, Artificial Sequence
  Synthetic polypeptide
PCSASSICGADRQQCL

SEQ ID NO: 40844 - protein, 6441 aa, Artificial Sequence
  Synthetic polypeptide
GFGINNILEKKFILLLEFHYYKCLVLGLVDEVKSKLDIWNIKYGSRESVELLLEDWHKFIEEKEFLARLDTSFQKCGEIYKNLAGECQNINKQYMMVKSDVCMYRKNIYNVKSTLQKVLACWATYVENLRLLRACFEETKKEEIKEVPFETLAQWNLEHATLNEAGNFLVEVSNDVVGSSISKELRRLNKRWRKLVSKTQLEMNLPLMIKKQDQPTFDNSGNILSKEEKATVEFSTDMSVELPENYNQNIKAGEKHEKENEEFTGQLKVAKDVEKLIGQVEIWEAEAKSVLDQDDVDTSMEESLKHLIAKGSMFDELMARSEDMLQMDIQNISSQESFQHVLTTGLQAKIQEAKEKVQINVVKLIAALKNLTDVSPDLDIRLKMEESQKELESYMMRAQQLLGQRESPGELISKHKEALIISNTKSLAKYLKAVEELKNNVTEDIKMSLEEKSRDVCAKWESLHHELSLYVQQLKIDIEKGKLSDNILKLEKQINKEKKLIRRGRTKGLIKEHEACFSEEGCLYQLNHHMEVLRELCEELPSQKSQQEVKRLLKDYEQKIERLLKCASEIHMTLQPTAGGTSKNEGTITTSENRGGDPHSEAPFAKSDNQPSTEKAMEPTMKFSLASVLRPLQEESIMEKDYSASINSLLERYDTYRDILEHHLQNNKFRITSDFSSEEDRSSSCLQAKLTDLQVIKNETDARWKEFEIISLKLENHVNDIKKPFVIKERDTLKERERELQMTLNTRMESLETALRLVLPVEKASLLLCGSDLPLHKMAIQGFHLIDADRIYQHLRNIQDSIAKQIEICNRLEEPGNFVLKELHPFDLHAMQNIILKYKTQFEGMNHRVQRSEDTLKALEDFLASLRTAKLSAEPVTDLSASDTQVAQENTLTVKNKEGEIHLMKDKAKHLDKCLKMLDMSFKDAERGDDTSCENLLDAFSIKLSETHGYGVQEEFTEENKLLEACIFKNNELLKNIQDVQSQISKIGLKDPTVPAVKHRKKSLIRLDKVLDEYEEEKRHLQEMANSLPHFKDGREKTVNQQCQNTVVLWENTKALVTECLEQCGRVLELLKQYQNFKSILTTLIQKEESVISLQASYMGKENLKKRIAEIEIVKEEFNEHLEVVDKINQVCKNLQFYLNKMKTFEEPPFEKEANIIVDRWLDINEKTEDYYENLGRALALWDKLFNLKNVIDEWTEKALQKMELHQLTEEDRERLKEELQVHEQKTSEFSRRVAEIQFLLQSSEIPLELQVMESSILNKMEHVQKCLTGESNCHALSGSTAELREDLDQAKTQIGMTESLLKALSPSDSLEIFTKLEEIQQQILQQKHSMILLENQIGCLTPELSELKKQYESVSDLFNTKKSVLQDHFSKLLNDQCKNFNDWFSNIKVNLKECFESSETKKSVEQKLQKLSDFLTLEGRNSKIKQVDSVLKHVKKHLPKAHVKELISWLVGQEFELEKMESICQARAKELEDSLQQLLRLQDDHRNLRKWLTNQEEKWKGMEEPGEKTELFCQALARKREQFESVAQLNNSLKEYGFTEEEEIIMEATCLMDRYQTLLRQLSEIEEEDKLLPTEDQSFNDLAHDVIHWIKEIKESLMVLNSSEGKMPLEERIQKIKEIILLKPEGDARIETIMKQAESSEAPLVQKTLTDISNQWDNTLHLASTYLSHQEKLLLEGEKYLQSKEDLRLMLIELKKKQEAGFALQHGLQEKKAQLKIYKKFLKKAQDLTSLLKELKSQGNYLLECTKNPSFSEEPWLEIKHLHESLLQQLQDSVQNLDGHVREHDSYQVCVTDLNTTLDNFSKEFVSFSDKPVDQIAVEEKLQKLQELENRLSLQDGTLKKILALAKSVKQNTSSVGQKIIKDDIKSLQCKQKDLENRLASAKQEMECCLNSILKSKRSTEKKGKFTLPGREKQATSDVQESTQESAAVEKLEEDWEINKDSAVEMAMSKQLSLNAQESMKNTEDERKVNELQNQPLELDTMLRNEQLEEIEKLYTQLEAKKAAIKPLEQTECLNKTETGALVLHNIGYSAQHLDNLLQALITLKKNKESQYCVLRDFQEYLAAVESSMKALLTDKESLKVGPLDSVTYLDKIKKFIASIEKEKDSLGNLKIKWENLSNHVTDMDKKLLESQIKQLEHGWEQVEQQIQKKYSQQVVEYDEFTTLMNKVQDTEISLQQQQQHLQLRLKSPEERAGNQSMIALTTDLQATKHGFSVLKGQAELQMKRIWGEKEKKNLEDGINNLKKQWETLEPLHLEAENQIKKCDIRNKMKETILWAKNLLGELNPSIPLLPDDILSQIRKCKVTHDGILARQQSVESLAEEVKDKVPSLTTYEGSDLNNTLEDLRNQYQMLVLKSTQRSQQLEFKLEERSNFFAIIRKFQLMVQESETLIIPRVETAATEAELKHHHVTLEASQKELQEIDSGISTHLQELTNIYEELNVFERLFLEDQLKNLKIRTNRIQRFIQNTCNEVEHKIKFCRQFHEKTSALQEEADSIQRNELLLNQEVNKGVKEEIYNLKDRLTAIKCCILQVLKLKKVFDYIGLNWDFSQLDQLQTQVFEKEKELEEKIKQLDTFEEEHGKYQALLSKMRAIDLQIKKMTEVVLKAPDSSPESRRLNAQILSQRIEKAKCLCDEIIKKLNENKTFDDSFKEKEILQIKLNAEENDKLYKVLQNMVLELSPKELDEKNCQDKLETSLHVLNQIKSQLQQPLLINLEIKHIQNEKDNCEAFQEQVWAEMCSIKAVTAIEKQREENSSEASDVETKLREFEDLQMQLNTSIDLRTNVLNDAYENLTRYKEAVTRAVESITSLEAIIIPYRVDVGNPEESLEMPLRKQEELESTVAHIQDLTEKLGMISSPEAKLQLQYTLQELVSKNSAMKEAFKAQETEAERYLENYKCYRKMEEDIYTNLSKMETVLGQSMSSLPLSYREALERLEQSKALVSNLISTKEELMKLRQILRLLRLRCTENDGICLLKIVSALWEKWLSLLEAAKEWEMWCEELKQEWKFVSEEIEREAIILDNLQEELPEISKTKEAATTEELSELLDCLCQYGENVEKQQLLLTLLLQRIRSIQNVPESSGAVETVPAFQEITSMKERCNKLLQKVQKNKELVQTEIQERHSFTKEIIALKNFFQQTTTSFQNMAFQDHPEKSEQFEELQSILKKGKLTFENIMEKLRIKYSEMYTIVPAEIESQVEECRKALEDIDEKISNEVLKSSPSYAMRRKIEEINNGLHNVEKMLQQKSKNIEKAQEIQKKMWDELDLWHSKLNELDSEVQDIVEQDPGQAQEWMDNLMIPFQQYQQVSQRAECRTSQLNKATVKMEEYSDLLKSTEAWIENTSHLLANPADYDSLRTLSHHASTVQMALEDSEQKHNLLHSIFMDLEDLSIIFETDELTQSIQELSNQVTALQQKIMESLPQIQRMADDVVAIESEVKSMEKRVSKIKTILLSKEIFDFSPEEHLKHGEVILENIRPMKKTIAEIVSYQVELRLPQTGMKPLPVFQRTNQLLQDIKLLENVTQEQNELLKVVIKQTNEWDEEIENLKQILNNYSAQFSLEHMSPDQADKLPQLQGEIERMEKQILSLNQRKEDLLVDLKATVLNLHQHLKQEQEGVERDRLPAVTSEEGGVAERDASERKLNRRGSMSYLAAVEEEVEESSVKSDNGDEKAEPSPQSWSSLWKHDKDMEEDRASSSSGTIVQEAYGKISTSDNSMAQILTPDSLNTEQGPECSLRPNQTEEGTTPPIEADTLDSSDAQGGLEPRVEKTRPEPTEVLHACKTQVAELELWLQQANVAVEPETLNADMQQVLEQQLVGCQAMLTEIEHKVAFLLETCKDQGLGDNGATQHEAEALSLKLKTVKCNLEKVQMMLQEKHSEDQHPTILKKSSEPEHQEALQPVNLSELESIVTERPQFSRQKDFQQQQVLELKPMEQKDFIKFIEFNAKKMWPQYCQHDNDTTQESSASNQASSPENDVPDSILSPQGQNGDKWQYLHHELSSKIKLPLPQLVEPQVSTNMGILPSVTMYNFRYPTTEELKTYTTQLEDLRQEASNLQTQENMTEEAYINLDKKLFELFLTLSQCLSSVEEMLEMPRLYREDGSGQQVHYETLALELKKLYLALSDKKGDLLKAMTWPGENTNLLLECFDNLQVCLEHTQAAAVCRSKSLKAGLDYNRSYQNEIKRLYHQLIKSKTSLQQSLNEISGQSVAEQLQKADAYTVELENAESRVAKLRDEGERLHLPYALLQEVYKLEDVLDSMWGMLRARYTELSSPFVTESQQDALLQGMVELVKIGKEKLAHGHLKQTKSKVALQAQIENHKVFFQKLVADMLLIQAYSAKILPSLLQNRETFWAEQVTEVKILEEKSRQCGMKLQSLLQKWEEFDENYASLEKDLEILISTLPSVSLVEETEERLVERISFYQQIKRNIGGKHARLYQTLNEGKQLVASVSCPELEGQIAKLEEQWLSLNKKIDHELHRLQALLKHLLSYNRDSDQLTKWLESSQHTLNYWKEQSLNVSQDLDTIRSNINNFFEFSKEVDEKSSLKTAVISIGNQLLHLKETDTATLRASLAQFEQKWTMLITQLPDIQEKLHQLQMEKLPSRKAITEMISWMNNVEHQTSDEDSVHSPSSASQVKHLLQKHKEFRMEMDYKQWIVDFVNQSLLQLSTCDVESKRYERTEFAEHLGEMNRQWHRVHGMLNRKIQHLEQLLESITESENKIQILNNWLEAQEERLKTLQKPESVISVQKLLLDCQDIENQLAIKSKALDELKQSYLTLESGAVPLLEDTASRIDELFQKRSSVLTQVNQLKTSMQSVLQEWKIYDQLYDEVNMMTIRFWYCMEHSKPVVLSLETLRCQVENLQSLQDEAESSEGSWEKLQEVIGKLKGLCPSVAEIIEEKCQNTHKRWTQVNQAIADQLQKAQSLLQLWKAYSNAHGEAAARLKQQEAKFQQLANISMSGNNLAEILPPALQDIKELQHDVQKTKEAFLQNSSVLDRLPQPAESSTHMLLPGPLHSLQRAAYLEKMLLVKANEFEFVLSQFKDFGVRLESLKGLIMHEEENLDRLHQQEKENPDSFLNHVLALTAQSPDIEHLNEVSLKLPLSDVAVKTLQNMNRQWIRATATALERCSELQGIGLNEKFLYCCEKWIQLLEKIEEALKVDVANSLPELLEQQKTYKMLEAEVSINQTIADSYVTQSLQLLDTTEIENRPEFITEFSKLTDRWQNAVQGVRQRKGDVDGLVRQWQDFTTSVENLFRFLTDTSHLLSAVKGQERFSLYQTRSLIHELKNKEIHFQRRRTTCALTLEAGEKLLLTTDLKTKESVGRRISQLQDSWKDMEPQLAEMIKQFQSTVETWDQCEKKIKELKSRLQVLKAQSEDPLPELHEDLHNEKELIKELEQSLASWTQNLKELQTMKADLTRHVLVEDVMVLKEQIEHLHRQWEDLCLRVAIRKQEIEDRLNTWVVFNEKNKELCAWLVQMENKVLQTADISIEEMIEKLQKDCMEEINLFSENKLQLKQMGDQLIKASNKSRAAEIDDKLNKINDRWQHLFDVIGSRVKKLKETFAFIQQLDKNMSNLRTWLARIESELSKPVVYDVCDDQEIQKRLAEQQDLQRDIEQHSAGVESVFNICDVLLHDSDACANETECDSIQQTTRSLDRRWRNICAMSMERRMKIEETWRLWQKFLDDYSRFEDWLKSAERTAACPNSSEVLYTSAKEELKRFEAFQRQIHERLTQLELINKQYRRLARENRTDTASRLKQMVHEGNQRWDNLQRRVTAVLRRLRHFTNQREEFEGTRESILVWLTEMDLQLTNVEHFSESDADDKMRQLNGFQQEITLNTNKIDQLIVFGEQLIQKSEPLDAVLIEDELEELHRYCQEVFGRVSRFHRRLTSCTPGLEDEKEASENETDMEDPREIQTDSWRKRGESEEPSSPQSLCHLVAPGHERSGCETPVSVDSIPLEWDHTGDVGGSSSHEEDEEGPYYSALSDVEIPENPEAYLKMTTKTLKASSGKSISDGHSWHVPDSPSCPEHHYKQMEGDRNVPPVPPASSTPYKPPYGKLLLPPGTDGGKEGPRVLNGNPQQEDGGLAGITEQQSGAFDRWEMIQAQELHNKLKIKQNLQQLNSDISAITTWLKKTEAELEMLKMAKPPSDIQEIELRVKRLQEILKAFDTYKALVVSVNVSSKEFLQTESPESTELQSRLRQLSLLWEAAQGAVDSWRGGLRQSLMQCQDFHQLSQNLLLWLASAKNRRQKAHVTDPKADPRALLECRRELMQLEKELVERQPQVDMLQEISNSLLIKGHGEDCIEAEEKVHVIEKKLKQLREQVSQDLMALQGTQNPASPLPSFDEVDSGDQPPATSVPAPRAKFRAVRTTEGEEETESRVPGSTRPQRSFLSRVVRAALPLQLLLLLLLLLACLLPSSEEDYSCTQANNFARSFYPMLRYTNGPPPT

SEQ ID NO: 40845 - protein, 6419 aa, Artificial Sequence
  Synthetic polypeptide
GFGINNILEKKFILLLEFHYYKCLVLGLVDEVKSKLDIWNIKYGSRESVELLLEDWHKFIEEKEFLARLDTSFQKCGEIYKNLAGECQNINKQYMMVKSDVCMYRKNIYNVKSTLQKVLACWATYVENLRLLRACFEETKKEEIKEVPFETLAQWNLEHATLNEAGNFLVEVSNDVVGSSISKELRRLNKRWRKLVSKTQLEMNLPLMIKKQDQPTFDNSGNILSKEEKATVEFSTDMSVELPENYNQNIKAGEKHEKENEEFTGQLKVAKDVEKLIGQVEIWEAEAKSVLDQDDVDTSMEESLKHLIAKGSMFDELMARSEDMLQMDIQNISSQESFQHVLTTGLQAKIQEAKEKVQINVVKLIAALKNLTDVSPDLDIRLKMEESQKELESYMMRAQQLLGQRESPGELISKHKEALIISNTKSLAKYLKAVEELKNNVTEDIKMSLEEKSRDVCAKWESLHHELSLYVQQLKIDIEKGKLSDNILKLEKQINKEKKLIRRGRTKGLIKEHEACFSEEGCLYQLNHHMEVLRELCEELPSQKSQQEVKRLLKDYEQKIERLLKCASEIHMTLQPTAGGTSKNEGTITTSENRGGDPHSEAPFAKSDNQPSTEKAMEPTMKFSLASVLRPLQEESIMEKDYSASINSLLERYDTYRDILEHHLQNNKFRITSDFSSEEDRSSSCLQAKLTDLQVIKNETDARWKEFEIISLKLENHVNDIKKPFVIKERDTLKERERELQMTLNTRMESLETALRLVLPVEKASLLLCGSDLPLHKMAIQGFHLIDADRIYQHLRNIQDSIAKQIEICNRLEEPGNFVLKELHPFDLHAMQNIILKYKTQFEGMNHRVQRSEDTLKALEDFLASLRTAKLSAEPVTDLSASDTQVAQENTLTVKNKEGEIHLMKDKAKHLDKCLKMLDMSFKDAERGDDTSCENLLDAFSIKLSETHGYGVQEEFTEENKLLEACIFKNNELLKNIQDVQSQISKIGLKDPTVPAVKHRKKSLIRLDKVLDEYEEEKRHLQEMANSLPHFKDGREKTVNQQCQNTVVLWENTKALVTECLEQCGRVLELLKQYQNFKSILTTLIQKEESVISLQASYMGKENLKKRIAEIEIVKEEFNEHLEVVDKINQVCKNLQFYLNKMKTFEEPPFEKEANIIVDRWLDINEKTEDYYENLGRALALWDKLFNLKNVIDEWTEKALQKMELHQLTEEDRERLKEELQVHEQKTSEFSRRVAEIQFLLQSSEIPLELQVMESSILNKMEHVQKCLTGESNCHALSGSTAELREDLDQAKTQIGMTESLLKALSPSDSLEIFTKLEEIQQQILQQKHSMILLENQIGCLTPELSELKKQYESVSDLFNTKKSVLQDHFSKLLNDQCKNFNDWFSNIKVNLKECFESSETKKSVEQKLQKLSDFLTLEGRNSKIKQVDSVLKHVKKHLPKAHVKELISWLVGQEFELEKMESICQARAKELEDSLQQLLRLQDDHRNLRKWLTNQEEKWKGMEEPGEKTELFCQALARKREQFESVAQLNNSLKEYGFTEEEEIIMEATCLMDRYQTLLRQLSEIEEEDKLLPTEDQSFNDLAHDVIHWIKEIKESLMVLNSSEGKMPLEERIQKIKEIILLKPEGDARIETIMKQAESSEAPLVQKTLTDISNQWDNTLHLASTYLSHQEKLLLEGEKYLQSKEDLRLMLIELKKKQEAGFALQHGLQEKKAQLKIYKKFLKKAQDLTSLLKELKSQGNYLLECTKNPSFSEEPWLEIKHLHESLLQQLQDSVQNLDGHVREHDSYQVCVTDLNTTLDNFSKEFVSFSDKPVDQIAVEEKLQKLQELENRLSLQDGTLKKILALAKSVKQNTSSVGQKIIKDDIKSLQCKQKDLENRLASAKQEMECCLNSILKSKRSTEKKGKFTLPGREKQATSDVQESTQESAAVEKLEEDWEINKDSAVEMAMSKQLSLNAQESMKNTEDERKVNELQNQPLELDTMLRNEQLEEIEKLYTQLEAKKAAIKPLEQTECLNKTETGALVLHNIGYSAQHLDNLLQALITLKKNKESQYCVLRDFQEYLAAVESSMKALLTDKESLKVGPLDSVTYLDKIKKFIASIEKEKDSLGNLKIKWENLSNHVTDMDKKLLESQIKQLEHGWEQVEQQIQKKYSQQVVEYDEFTTLMNKVQDTEISLQQQQQHLQLRLKSPEERAGNQSMIALTTDLQATKHGFSVLKGQAELQMKRIWGEKEKKNLEDGINNLKKQWETLEPLHLEAENQIKKCDIRNKMKETILWAKNLLGELNPSIPLLPDDILSQIRKCKVTHDGILARQQSVESLAEEVKDKVPSLTTYEGSDLNNTLEDLRNQYQMLVLKSTQRSQQLEFKLEERSNFFAIIRKFQLMVQESETLIIPRVETAATEAELKHHHVTLEASQKELQEIDSGISTHLQELTNIYEELNVFERLFLEDQLKNLKIRTNRIQRFIQNTCNEVEHKIKFCRQFHEKTSALQEEADSIQRNELLLNQEVNKGVKEEIYNLKDRLTAIKCCILQVLKLKKVFDYIGLNWDFSQLDQLQTQVFEKEKELEEKIKQLDTFEEEHGKYQALLSKMRAIDLQIKKMTEVVLKAPDSSPESRRLNAQILSQRIEKAKCLCDEIIKKLNENKTFDDSFKEKEILQIKLNAEENDKLYKVLQNMVLELSPKELDEKNCQDKLETSLHVLNQIKSQLQQPLLINLEIKHIQNEKDNCEAFQEQVWAEMCSIKAVTAIEKQREENSSEASDVETKLREFEDLQMQLNTSIDLRTNVLNDAYENLTRYKEAVTRAVESITSLEAIIIPYRVDVGNPEESLEMPLRKQEELESTVAHIQDLTEKLGMISSPEAKLQLQYTLQELVSKNSAMKEAFKAQETEAERYLENYKCYRKMEEDIYTNLSKMETVLGQSMSSLPLSYREALERLEQSKALVSNLISTKEELMKLRQILRLLRLRCTENDGICLLKIVSALWEKWLSLLEAAKEWEMWCEELKQEWKFVSEEIEREAIILDNLQEELPEISKTKEAATTEELSELLDCLCQYGENVEKQQLLLTLLLQRIRSIQNVPESSGAVETVPAFQEITSMKERCNKLLQKVQKNKELVQTEIQERHSFTKEIIALKNFFQQTTTSFQNMAFQDHPEKSEQFEELQSILKKGKLTFENIMEKLRIKYSEMYTIVPAEIESQVEECRKALEDIDEKISNEVLKSSPSYAMRRKIEEINNGLHNVEKMLQQKSKNIEKAQEIQKKMWDELDLWHSKLNELDSEVQDIVEQDPGQAQEWMDNLMIPFQQYQQVSQRAECRTSQLNKATVKMEEYSDLLKSTEAWIENTSHLLANPADYDSLRTLSHHASTVQMALEDSEQKHNLLHSIFMDLEDLSIIFETDELTQSIQELSNQVTALQQKIMESLPQIQRMADDVVAIESEVKSMEKRVSKIKTILLSKEIFDFSPEEHLKHGEVILENIRPMKKTIAEIVSYQVELRLPQTGMKPLPVFQRTNQLLQDIKLLENVTQEQNELLKVVIKQTNEWDEEIENLKQILNNYSAQFSLEHMSPDQADKLPQLQGEIERMEKQILSLNQRKEDLLVDLKATVLNLHQHLKQEQEGVERDRLPAVTSEEGGVAERDASERKLNRRGSMSYLAAVEEEVEESSVKSDNGDEKAEPSPQSWSSLWKHDKDMEEDRASSSSGTIVQEAYGKISTSDNSMAQILTPDSLNTEQGPECSLRPNQTEEGTTPPIEADTLDSSDAQGGLEPRVEKTRPEPTEVLHACKTQVAELELWLQQANVAVEPETLNADMQQVLEQQLVGCQAMLTEIEHKVAFLLETCKDQGLGDNGATQHEAEALSLKLKTVKCNLEKVQMMLQEKHSEDQHPTILKKSSEPEHQEALQPVNLSELESIVTERPQFSRQKDFQQQQVLELKPMEQKDFIKFIEFNAKKMWPQYCQHDNDTTQESSASNQASSPENDVPDSILSPQGQNGDKWQYLHHELSSKIKLPLPQLVEPQVSTNMGILPSVTMYNFRYPTTEELKTYTTQLEDLRQEASNLQTQENMTEEAYINLDKKLFELFLTLSQCLSSVEEMLEMPRLYREDGSGQQVHYETLALELKKLYLALSDKKGDLLKAMTWPGENTNLLLECFDNLQVCLEHTQAAAVCRSKSLKAGLDYNRSYQNEIKRLYHQLIKSKTSLQQSLNEISGQSVAEQLQKADAYTVELENAESRVAKLRDEGERLHLPYALLQEVYKLEDVLDSMWGMLRARYTELSSPFVTESQQDALLQGMVELVKIGKEKLAHGHLKQTKSKVALQAQIENHKVFFQKLVADMLLIQAYSAKILPSLLQNRETFWAEQVTEVKILEEKSRQCGMKLQSLLQKWEEFDENYASLEKDLEILISTLPSVSLVEETEERLVERISFYQQIKRNIGGKHARLYQTLNEGKQLVASVSCPELEGQIAKLEEQWLSLNKKIDHELHRLQALLKHLLSYNRDSDQLTKWLESSQHTLNYWKEQSLNVSQDLDTIRSNINNFFEFSKEVDEKSSLKTAVISIGNQLLHLKETDTATLRASLAQFEQKWTMLITQLPDIQEKLHQLQMEKLPSRKAITEMISWMNNVEHQTSDEDSVHSPSSASQVKHLLQKHKEFRMEMDYKQWIVDFVNQSLLQLSTCDVESKRYERTEFAEHLGEMNRQWHRVHGMLNRKIQHLEQLLESITESENKIQILNNWLEAQEERLKTLQKPESVISVQKLLLDCQDIENQLAIKSKALDELKQSYLTLESGAVPLLEDTASRIDELFQKRSSVLTQVNQLKTSMQSVLQEWKIYDQLYDEVNMMTIRFWYCMEHSKPVVLSLETLRCQVENLQSLQDEAESSEGSWEKLQEVIGKLKGLCPSVAEIIEEKCQNTHKRWTQVNQAIADQLQKAQSLLQLWKAYSNAHGEAAARLKQQEAKFQQLANISMSGNNLAEILPPALQDIKELQHDVQKTKEAFLQNSSVLDRLPQPAESSTHMLLPGPLHSLQRAAYLEKMLLVKANEFEFVLSQFKDFGVRLESLKGLIMHEEENLDRLHQQEKENPDSFLNHVLALTAQSPDIEHLNEVSLKLPLSDVAVKTLQNMNRQWIRATATALERCSELQGIGLNEKFLYCCEKWIQLLEKIEEALKVDVANSLPELLEQQKTYKMLEAEVSINQTIADSYVTQSLQLLDTTEIENRPEFITEFSKLTDRWQNAVQGVRQRKGDVDGLVRQWQDFTTSVENLFRFLTDTSHLLSAVKGQERFSLYQTRSLIHELKNKEIHFQRRRTTCALTLEAGEKLLLTTDLKTKESVGRRISQLQDSWKDMEPQLAEMIKQFQSTVETWDQCEKKIKELKSRLQVLKAQSEDPLPELHEDLHNEKELIKELEQSLASWTQNLKELQTMKADLTRHVLVEDVMVLKEQIEHLHRQWEDLCLRVAIRKQEIEDRLNTWVVFNEKNKELCAWLVQMENKVLQTADISIEEMIEKLQKDCMEEINLFSENKLQLKQMGDQLIKASNKSRAAEIDDKLNKINDRWQHLFDVIGSRVKKLKETFAFIQQLDKNMSNLRTWLARIESELSKPVVYDVCDDQEIQKRLAEQQDLQRDIEQHSAGVESVFNICDVLLHDSDACANETECDSIQQTTRSLDRRWRNICAMSMERRMKIEETWRLWQKFLDDYSRFEDWLKSAERTAACPNSSEVLYTSAKEELKRFEAFQRQIHERLTQLELINKQYRRLARENRTDTASRLKQMVHEGNQRWDNLQRRVTAVLRRLRHFTNQREEFEGTRESILVWLTEMDLQLTNVEHFSESDADDKMRQLNGFQQEITLNTNKIDQLIVFGEQLIQKSEPLDAVLIEDELEELHRYCQEVFGRVSRFHRRLTSCTPGLEDEKEASENETDMEDPREIQTDSWRKRGESEEPSSPQSLCHLVAPGHERSGCETPVSVDSIPLEWDHTGDVGGSSSHEEDEEGPYYSALSGKSISDGHSWHVPDSPSCPEHHYKQMEGDRNVPPVPPASSTPYKPPYGKLLLPPGTDGGKEGPRVLNGNPQQEDGGLAGITEQQSGAFDRWEMIQAQELHNKLKIKQNLQQLNSDISAITTWLKKTEAELEMLKMAKPPSDIQEIELRVKRLQEILKAFDTYKALVVSVNVSSKEFLQTESPESTELQSRLRQLSLLWEAAQGAVDSWRGGLRQSLMQCQDFHQLSQNLLLWLASAKNRRQKAHVTDPKADPRALLECRRELMQLEKELVERQPQVDMLQEISNSLLIKGHGEDCIEAEEKVHVIEKKLKQLREQVSQDLMALQGTQNPASPLPSFDEVDSGDQPPATSVPAPRAKQFRAVRTTEGEEETESRVPGSTRPQRSFLSRVVRAALPLQLLLLLLLLLACLLPSSEEDYSCTQANNFARSFYPMLRYTNGPPPT

SEQ ID NO: 40846 - protein, 6352 aa, Artificial Sequence
  Synthetic polypeptide
GFGINNILEKKFILLLEFHYYKCLVLGLVDEVKSKLDIWNIKYGSRESVELLLEDWHKFIEEKEFLARLDTSFQKCGEIYKNLAGECQNINKQYMMVKSDVCMYRKNIYNVKSTLQKVLACWATYVENLRLLRACFEETKKEEIKEVPFETLAQWNLEHATLNEAGNFLVEVSNDVVGSSISKELRRLNKRWRKLVSKTQLEMNLPLMIKKQDQPTFDNSGNILSKEEKATVEFSTDMSVELPENYNQNIKAGEKHEKENEEFTGQLKVAKDVEKLIGQVEIWEAEAKSVLDQDDVDTSMEESLKHLIAKGSMFDELMARSEDMLQMDIQNISSQESFQHVLTTGLQAKIQEAKEKVQINVVKLIAALKNLTDVSPDLDIRLKMEESQKELESYMMRAQQLLGQRESPGELISKHKEALIISNTKSLAKYLKAVEELKNNVTEDIKMSLEEKSRDVCAKWESLHHELSLYVQQLKIDIEKGKLSDNILKLEKQINKEKKLIRRGRTKGLIKEHEACFSEEGCLYQLNHHMEVLRELCEELPSQKSQQEVKRLLKDYEQKIERLLKCASEIHMTLQPTAGGTSKNEGTITTSENRGGDPHSEAPFAKSDNQPSTEKAMEPTMKFSLASVLRPLQEESIMEKDYSASINSLLERYDTYRDILEHHLQNNKFRITSDFSSEEDRSSSCLQAKLTDLQVIKNETDARWKEFEIISLKLENHVNDIKKPFVIKERDTLKERERELQMTLNTRMESLETALRLVLPVEKASLLLCGSDLPLHKMAIQGFHLIDADRIYQHLRNIQDSIAKQIEICNRLEEPGNFVLKELHPFDLHAMQNIILKYKTQFEGMNHRVQRSEDTLKALEDFLASLRTAKLSAEPVTDLSASDTQVAQENTLTVKNKEGEIHLMKDKAKHLDKCLKMLDMSFKDAERGDDTSCENLLDAFSIKLSETHGYGVQEEFTEENKLLEACIFKNNELLKNIQDVQSQISKIGLKDPTVPAVKHRKKSLIRLDKVLDEYEEEKRHLQEMANSLPHFKDGREKTVNQQCQNTVVLWENTKALVTECLEQCGRVLELLKQYQNFKSILTTLIQKEESVISLQASYMGKENLKKRIAEIEIVKEEFNEHLEVVDKINQVCKNLQFYLNKMKTFEEPPFEKEANIIVDRWLDINEKTEDYYENLGRALALWDKLFNLKNVIDEWTEKALQKMELHQLTEEDRERLKEELQVHEQKTSEFSRRVAEIQFLLQSSEIPLELQVMESSILNKMEHVQKCLTGESNCHALSGSTAELREDLDQAKTQIGMTESLLKALSPSDSLEIFTKLEEIQQQILQQKHSMILLENQIGCLTPELSELKKQYESVSDLFNTKKSVLQDHFSKLLNDQCKNFNDWFSNIKVNLKECFESSETKKSVEQKLQKLSDFLTLEGRNSKIKQVDSVLKHVKKHLPKAHVKELISWLVGQEFELEKMESICQARAKELEDSLQQLLRLQDDHRNLRKWLTNQEEKWKGMEEPGEKTELFCQALARKREQFESVAQLNNSLKEYGFTEEEEIIMEATCLMDRYQTLLRQLSEIEEEDKLLPTEDQSFNDLAHDVIHWIKEIKESLMVLNSSEGKMPLEERIQKIKEIILLKPEGDARIETIMKQAESSEAPLVQKTLTDISNQWDNTLHLASTYLSHQEKLLLEGEKYLQSKEDLRLMLIELKKKQEAGFALQHGLQEKKAQLKIYKKFLKKAQDLTSLLKELKSQGNYLLECTKNPSFSEEPWLEIKHLHESLLQQLQDSVQNLDGHVREHDSYQVCVTDLNTTLDNFSKEFVSFSDKPVDQIAVEEKLQKLQELENRLSLQDGTLKKILALAKSVKQNTSSVGQKIIKDDIKSLQCKQKDLENRLASAKQEMECCLNSILKSKRSTEKKGKFTLPGREKQATSDVQESTQESAAVEKLEEDWEINKNFVENVMAVSKNCHHSMYIFESIVKNFISDEMQDSAVEMAMSKQLSLNAQESMKNTEDERKVNELQNQPLELDTMLRNEQLEEIEKLYTQLEAKKAAIKPLEQTECLNKTETGALVLHNIGYSAQHLDNLLQALITLKKNKESQYCVLRDFQEYLAAVESSMKALLTDKESLKVGPLDSVTYLDKIKKFIASIEKEKDSLGNLKIKWENLSNHVTDMDKKLLESQIKQLEHGWEQVEQQIQKKYSQQVVEYDEFTTLMNKVQDTEISLQQQQQHLQLRLKSPEERAGNQSMIALTTDLQATKHGFSVLKGQAELQMKRIWGEKEKKNLEDGINNLKKQWETLEPLHLEAENQIKKCDIRNKMKETILWAKNLLGELNPSIPLLPDDILSQIRKCKVTHDGILARQQSVESLAEEVKDKVPSLTTYEGSDLNNTLEDLRNQYQMLVLKSTQRSQQLEFKLEERSNFFAIIRKFQLMVQESETLIIPRVETAATEAELKHHHVTLEASQKELQEIDSGISTHLQELTNIYEELNVFERLFLEDQLKNLKIRTNRIQRFIQNTCNEVEHKIKFCRQFHEKTSALQEEADSIQRNELLLNQEVNKGVKEEIYNLKDRLTAIKCCILQVLKLKKVFDYIGLNWDFSQLDQLQTQVFEKEKELEEKIKQLDTFEEEHGKYQALLSKMRAIDLQIKKMTEVVLKAPDSSPESRRLNAQILSQRIEKAKCLCDEIIKKLNENKTFDDSFKEKEILQIKLNAEENDKLYKVLQNMVLELSPKELDEKNCQDKLETSLHVLNQIKSQLQQPLLINLEIKHIQNEKDNCEAFQEQVWAEMCSIKAVTAIEKQREENSSEASDVETKLREFEDLQMQLNTSIDLRTNVLNDAYENLTRYKEAVTRAVESITSLEAIIIPYRVDVGNPEESLEMPLRKQEELESTVAHIQDLTEKLGMISSPEAKLQLQYTLQELVSKNSAMKEAFKAQETEAERYLENYKCYRKMEEDIYTNLSKMETVLGQSMSSLPLSYREALERLEQSKALVSNLISTKEELMKLRQILRLLRLRCTENDGICLLKIVSALWEKWLSLLEAAKEWEMWCEELKQEWKFVSEEIEREAIILDNLQEELPEISKTKEAATTEELSELLDCLCQYGENVEKQQLLLTLLLQRIRSIQNVPESSGAVETVPAFQEITSMKERCNKLLQKVQKNKELVQTEIQERHSFTKEIIALKNFFQQTTTSFQNMAFQDHPEKSEQFEELQSILKKGKLTFENIMEKLRIKYSEMYTIVPAEIESQVEECRKALEDIDEKISNEVLKSSPSYAMRRKIEEINNGLHNVEKMLQQKSKNIEKAQEIQKKMWDELDLWHSKLNELDSEVQDIVEQDPGQAQEWMDNLMIPFQQYQQVSQRAECRTSQLNKATVKMEEYSDLLKSTEAWIENTSHLLANPADYDSLRTLSHHASTVQMALEDSEQKHNLLHSIFMDLEDLSIIFETDELTQSIQELSNQVTALQQKIMESLPQIQRMADDVVAIESEVKSMEKRVSKIKTILLSKEIFDFSPEEHLKHGEVILENIRPMKKTIAEIVSYQVELRLPQTGMKPLPVFQRTNQLLQDIKLLENVTQEQNELLKVVIKQTNEWDEEIENLKQILNNYSAQFSLEHMSPDQADKLPQLQGEIERMEKQILSLNQRKEDLLVDLKATVLNLHQHLKQEQEGVERDRLPAVTSEEGGVAERDASERKLNRRGSMSYLAAVEEEVEESSVKSDHDKDMEEDRASSSSGTIVQEAYGKISTSDNSMAQILTPDSLNTEQGPECSLRPNQTEEGTTPPIEADTLDSSDAQGGLEPRVEKTRPEPTEVLHACKTQVAELELWLQQANVAVEPETLNADMQQVLEQQLVGCQAMLTEIEHKVAFLLETCKDQGLGDNGATQHEAEALSLKLKTVKCNLEKVQMMLQEKHSEDQHPTILKKSSEPEHQEALQPVNLSELESIVTERPQFSRQKDFQQQQVLELKPMEQKDFIKFIEFNAKKMWPQYCQHDNDTTQESSARYPTTEELKTYTTQLEDLRQEASNLQTQENMTEEAYINLDKKLFELFLTLSQCLSSVEEMLEMPRLYREDGSGQQVHYETLALELKKLYLALSDKKGDLLKAMTWPGENTNLLLECFDNLQVCLEHTQAAAVCRSKSLKAGLDYNRSYQKADAYTVELENAESRVAKLRDEGERLHLPYALLQEVYKLEDVLDSMWGMLRARYTELSSPFVTESQQDALLQGMVELVKIGKEKLAHGHLKQTKSKVALQAQIENHKVFFQKLVADMLLIQAYSAKILPSLLQNRETFWAEQVTEVKILEEKSRQCGMKLQSLLQKWEEFDENYASLEKDLEILISTLPSVSLVEETEERLVERISFYQQIKRNIGGKHARLYQTLNEGKQLVASVSCPELEGQIAKLEEQWLSLNKKIDHELHRLQALLKHLLSYNRDSDQLTKWLESSQHTLNYWKEQSLNVSQDLDTIRSNINNFFEFSKEVDEKSSLKTAVISIGNQLLHLKETDTATLRASLAQFEQKWTMLITQLPDIQEKLHQLQMEKLPSRKAITEMISWMNNVEHQTSDEDSVHSPSSASQVKHLLQKHKEFRMEMDYKQWIVDFVNQSLLQLSTCDVESKRYERTEFAEHLGEMNRQWHRVHGMLNRKIQHLEQLLESITESENKIQILNNWLEAQEERLKTLQKPESVISVQKLLLDCQDIENQLAIKSKALDELKQSYLTLESGAVPLLEDTASRIDELFQKRSSVLTQVNQLKTSMQSVLQEWKIYDQLYDEVNMMTIRFWYCMEHSKPVVLSLETLRCQVENLQSLQDEAESSEGSWEKLQEVIGKLKGLCPSVAEIIEEKCQNTHKRWTQVNQAIADQLQKAQSLLQLWKAYSNAHGEAAARLKQQEAKFQQLANISMSGNNLAEILPPALQDIKELQHDVQKTKEAFLQNSSVLDRLPQPAESSTHMLLPGPLHSLQRAAYLEKMLLVKANEFENHVLALTAQSPDIEHLNEVSLKLPLSDVAVKTLQNMNRQWIRATATALERCSELQGIGLNEKFLYCCEKWIQLLEKIEEALKVDVANSLPELLEQQKTYKMLEAEVSINQTIADSYVTQSLQLLDTTEIENRPEFITEFSKLTDRWQNAVQGVRQRKGDVDGLNAHVARCGGASLKKQDLRYSLHTACGAALLCRSSHGANKEIHFQRRRTTCALTLEAGEKLLLTTDLKTKESVGRRISQLQDSWKDMEPQLAEMIKQFQSTVETWDQCEKKIKELKSRLQVLKAQSEDPLPELHEDLHNEKELIKVAIRKQEIEDRLNTWVVFNEKNKELCAWLVQMENKVLQTADISIEEMIEKLQKRTVGREEVPERWECETIVSGHGTEESCFLSIRKFHQGRGLHILTCQLIPQDCMEEINLFSENKLQLKQMGDQLIKASNKSRAAEIDDKLNKINDRWQHLFDVIGSSMADQTNSRWMFFQWPRGIQRTVTWPWDHLCSCASTGHTGPFHSSVLRCFEQHIEFGIYRRTYKVNKELGGDKNGQRCPIIYPHGLVQCIRLGEPLILKRVKKLKETFAFIQQLDKNMSNLRTWLARIESELSKPVVYDVCDDQEIQKRLAEQQDLQRDIEQHSAGVESVFNICDVLLHDSDACANETECDSIQQTTRSLDRRWRNICAMSMERRMKIEETWRLWQKFLDDYSRFEDWLKSAERTAACPNSSEVLYTSAKEELKRFERQIHERLTQLELINKQYRRLARENRTDTASRLKQMVHEGNQRWDNLQRRVTAVLRRLRHFTNQREEFEGTRESILVWLTEMDLQLTNVEHFSESDADDKMRQLNGFQQEITLNTNKIDQLIVFGEQLIQKSEPLDAVLIEDELEELHRYCQEGLEDEKEASENETDMEDPREIQTDSWRKRGESEEPSSPQSLCHLVAPGHERSGCETPVSVDSIPLEWDHTGDVGGSSSHEEDEEGPYYSALSGKSISDGHSWHVPDSPSCPEHHYKQMEGDRNVPPVPPASSTPYKPPYVSLNFTGSTAYVCAFDRWEMIQAQELHNKLKIKQNLQQLNSDISAITTWLKKTEAELEMLKMAKPPSDIQEIELRVKRLQEILKAFDTYKALVVSVNVSSKEFLQTESPESTELQSRLRQLSLLWEAAQGAVDSWRGGLRQSLMQCQDFHQLSQNLLLWLASAKNRRQKAHVTDPKADPRALLECRRELMQLEKELVERQPQVDMLQEISNSLLIKGHGEDCIEAEEKVHVIEKKLKQLREQVSQDLMALQGTQNPASPLPSFDEVDSGDQPPATSVPAPRAKFLYPAVQSSENYRRRGGDREQGPRQHTATALLPLKGGPGSPTPAAAPPAAAAPGLPAALLRRRLQLHSGQQLCPVLLPHAEVHQWATPHIEGIAGHSATPPA

SEQ ID NO: 40847 - protein, 15 aa, Artificial Sequence
  Synthetic polypeptide
VLESTTFWRKNLFYF

SEQ ID NO: 40848 - protein, 30 aa, Artificial Sequence
  Synthetic polypeptide
WFWNQQHFGEKIYSTSRISLLQVLSSWFGR

SEQ ID NO: 40849 - protein, 48 aa, Artificial Sequence
  Synthetic polypeptide
AGHGGSCLQSQHVGRPRWVAHLKSGVPDQPGQHVRVCVETFVRAGQPL

SEQ ID NO: 40850 - protein, 38 aa, Artificial Sequence
  Synthetic polypeptide
GRAWWLMSAIPARWEAKVGGSPEVRSSRPAWPTCTSMR

SEQ ID NO: 40851 - protein, 47 aa, Artificial Sequence
  Synthetic polypeptide
SQEFQTSLANMYEYALRHLYVLVNLCEKPYPLHRIKLSMDHVCLGHY

SEQ ID NO: 40852 - protein, 14 aa, Artificial Sequence
  Synthetic polypeptide
EKDLGLSRRKSFLR

SEQ ID NO: 40853 - protein, 58 aa, Artificial Sequence
  Synthetic polypeptide
KEKLPKVIRRGRKRTPMLLKGHHLPSSCFALNIAQRSKVNTLAYPLGILQRNWVKCGL

SEQ ID NO: 40854 - protein, 74 aa, Artificial Sequence
  Synthetic polypeptide
KEKLPKVIRRGRKRTPMLLKGHHLPSSCFALNIAQRSKVNTLAYPLGILQRNWVKCGLSSQPKINNHMNRKQLS

SEQ ID NO: 40855 - protein, 68 aa, Artificial Sequence
  Synthetic polypeptide
DWLSGAPYFCHDSVPNLLFDSGQATSPFWARVSRGGSEYQRNNRRNKWNISWKKKRKQTMRNRKLKGS

SEQ ID NO: 40856 - protein, 59 aa, Artificial Sequence
  Synthetic polypeptide
TGCQGPRISAMTQSLICSLILDKPPLLFGLVFPEEVVSIKETTEETSGTSAGRRKESKQ

SEQ ID NO: 40857 - protein, 511 aa, Artificial Sequence
  Synthetic polypeptide
VSKKQQKKQVEHQLEEEKKANNEKQKAERELEGQIQRLNTEKKKLNTDLYHMKHSLRYFEEESKDLAGRLQRSSQRIGELEWSLCAVAATQKKKPDGFSSRSKALLKRQLEQSIREQILLKGHVTQLKESLKEVQLERDQYAEQIKGERAQWQQRMRKMSQEVCTLKEEKKHDTHRVEELERSLSRLKNQMAEPLPPDAPAVSSEVELQDLRKELERVAGELQAQVENNQCISLLNRGQKERLREQEERLQEQQERLREREKRLQQLAEPQSDLEELKHENKSALQLEQQVKELQEKLGQVMETLTSAEKEPEAAVPASGTGGESSGLMDLLEEKADLREHVEKLELGFIQYRRERCHQKVHRLLTEPGDSAKDASPGGGHHQAGPGQGGEEGEAAGAAGDGVAACGSYSEGHGKFLAAARNPAAEPSPGAPAPQELGAADKHGDLCEASLTNSVEPAQGEAREGSSQDNPTAQPVVQLLGEMQDHQEHPGLGSNCCVPCFCWAWLPRRRR

SEQ ID NO: 40858 - protein, 30 aa, Artificial Sequence
  Synthetic polypeptide
DEIILDYPGRLDWETLVHENLPGLMEMDQD

SEQ ID NO: 40859 - protein, 75 aa, Artificial Sequence
  Synthetic polypeptide
DEIILDYPGRLDWETLVHENLPGLMEMDQDDRVWPRDSLFRYFELLEKLQYNLEERKKLQEFAGKKKAGHGGSHL

SEQ ID NO: 40860 - protein, 73 aa, Artificial Sequence
  Synthetic polypeptide
DEIILDYPGRLDWETLVHENLPGLMEMDQDDRVWPRDSLFRYFELLEKLQYNLEERKKLQEFAVQALMNLEDK

SEQ ID NO: 40861 - protein, 28 aa, Artificial Sequence
  Synthetic polypeptide
DHPRLSRSFGLGDSCARKSARANGNGSG

SEQ ID NO: 40862 - protein, 18 aa, Artificial Sequence
  Synthetic polypeptide
IIQVVWTGRLLCTKICPG

SEQ ID NO: 40863 - protein, 35 aa, Artificial Sequence
  Synthetic polypeptide
KYMWHMLIIPATQEAEAGESLEPGRWRLRGFVSYD

SEQ ID NO: 40864 - protein, 270 aa, Artificial Sequence
  Synthetic polypeptide
SQLLRRLRQENRLNPGGGGCEVLSAMISVLLVYILMGFLLYEAVQRTIHMNYEINGDIMLITAAVGVAVNVIMGFLLNQSGHRHSHSHSLPSNSPTRGSGCERNHGQDSLAVRAAFVHALGDLVQSVGVLIAAYIIRFKPEYKIADPICTYVFSLLVAFTTFRIIWDTVVIILEGVPSHLNVDYIKEALMKIEDVYSVEDLNIWSLTSGKSTAIVHIQLIPGSSSKWEEVQSKANHLLLNTFGMYRCTIQLQSYRQEVDRTCANCQSSSP

SEQ ID NO: 40865 - protein, 12 aa, Artificial Sequence
  Synthetic polypeptide
TREVEVARFCQL

SEQ ID NO: 40866 - protein, 31 aa, Artificial Sequence
  Synthetic polypeptide
AFTFTHHSLIDSFRATSSPVSAFHVRPHIEE

SEQ ID NO: 40867 - protein, 8 aa, Artificial Sequence
  Synthetic polypeptide
APFMCGLT

SEQ ID NO: 40868 - protein, 21 aa, Artificial Sequence
  Synthetic polypeptide
FLQSNFQSCKRLSCAASHRGI

SEQ ID NO: 40869 - protein, 139 aa, Artificial Sequence
  Synthetic polypeptide
ERAGGSILCHLQDHPSDPSGKSLSFKQDHRQETQQLRSVLWRLASRYLQPREWKKLAYSWEFTEAHVDAIEQQWTGTRSYQEHGHRMLLIWLHGVATAGENPSKALFEGLVAIGRRDLAENIRKKANAAPSAPRRCTAM

SEQ ID NO: 40870 - protein, 147 aa, Artificial Sequence
  Synthetic polypeptide
ERAGGSILCHLQDHPSDPSGKSLSFKQDHRQETQQLRSVLWRLASRYLQPREWKKLAYSWEFTEAHVDAIEQQWTGTRSYQEHGHRMLLIWLHGVATAGENPSKALFEGLVAIGRRDLAGWSTMARSQLTATSASRVQMILVPQPPE

SEQ ID NO: 40871 - protein, 16 aa, Artificial Sequence
  Synthetic polypeptide
REGRWFHLMPSPGPPQ

SEQ ID NO: 40872 - protein, 138 aa, Artificial Sequence
  Synthetic polypeptide
RGQVVPSYAISRTTPVIPLGRACPLSRTIGRKHSSSVLCCGGWPPGICSPVSGRSWHIPGSSRRHMSTPSSNSGQAPGAIRSTATECCSFGCMAWPRLVRTPAKRCSRASWPLAGGTWLAGVQWRDLSSRQPPPPGFK

SEQ ID NO: 40873 - protein, 139 aa, Artificial Sequence
  Synthetic polypeptide
RGQVVPSYAISRTTPVIPLGRACPLSRTIGRKHSSSVLCCGGWPPGICSPVSGRSWHIPGSSRRHMSTPSSNSGQAPGAIRSTATECCSFGCMAWPRLVRTPAKRCSRASWPLAGGTWLKISGRKQTQPRVPPGGAQPC

SEQ ID NO: 40874 - protein, 376 aa, Artificial Sequence
  Synthetic polypeptide
AQEFKTSLGNIGRSRKMEELSQALASSFSVSQDLNSTAAPHPRLSQYKSKYSSLEQSERRRRLLELQKSKRLDYVNHARRLAEDDWTGMESEEENKKDDEEMDIDTVKKLPKHYANQLMLSEWLIDVPSDLGQEWIVVVCPVGKRALIVASRGSTSAYTKSGYCVNRFSSLLPGGNRRNSTAKDYTILDCIYNEVNQTYYVLDVMCWRGHPFYDCQTDFRFYWMHSKLPEEEGLGEKTKLNPFKFVGLKNFPCTPESLCDVLSMDFPFEVDGLLFYHKQTHYSPGSTPLVGWLRPYMVSDVLGVAVPAGPLTTKPDYAGHQLQQIMEHKKSQKEGMKEKLTHKASENGHYELEHLSTPKLKGSSHSPDHPGCLMEN

SEQ ID NO: 40875 - protein, 8 aa, Artificial Sequence
  Synthetic polypeptide
GDPGRWKS

SEQ ID NO: 40876 - protein, 18 aa, Artificial Sequence
  Synthetic polypeptide
PRQHREIPEDGRVESGPG

SEQ ID NO: 40877 - protein, 63 aa, Artificial Sequence
  Synthetic polypeptide
AQILPRHSSLDNRFALGPQPGPGHPGMRRWACCSWSRCSCCPAPTDCPSTTASTTPTAPTTRT

SEQ ID NO: 40878 - protein, 48 aa, Artificial Sequence
  Synthetic polypeptide
SQLLGRLRHENHLNPGDGGCSELRSCHGTPAWTTDLPWGPSLARVTLA

SEQ ID NO: 40879 - protein, 397 aa, Artificial Sequence
  Synthetic polypeptide
TQETEVAVSSDLATALQLGQQICPGAPAWPGSPWHEEMGLLLLVPLLLLPGSYGLPFYNGFYYSNSANDQNLGNGHGKDLLNGVKLVVETPEETLFTYQGASVILPCRYRYEPALVSPRRVRVKWWKLSENGAPEKDVLVAIGLRHRSFGDYQGRVHLRQDKEHDVSLEIQDLRLEDYGRYRCEVIDGLEDESGLVELELRGVVFPYQSPNGRYQFNFHEGQQVCAEQAAVVASFEQLFRAWEEGLDWCNAGWLQDATVQYPIMLPRQPCGGPGLAPGVRSYGPRHRRLHRYDVFCFATALKGRVYYLEHPEKLTLTEAREACQEDDATIAKVGQLFAAWKFHGLDRCDAGWLADGSVRYPVVHPHPNCGPPEPGVRSFGFPDPQSRLYGVYCYRQH

SEQ ID NO: 40880 - protein, 46 aa, Artificial Sequence
  Synthetic polypeptide
EEAGRILFWSFQREPGPAGTLCLPLSFPACSSSGVLGQGHHHLPAV

SEQ ID NO: 40881 - protein, 128 aa, Artificial Sequence
  Synthetic polypeptide
RGRTNSLLELPEGAWSCWHLMLALKFSSLQLIWCTGARPSSSTRCVRTTSTCCLPMPAYVCTPRWPSSSPTSSHLMTCRPFLPSSPCRSPCQNLGIPWPPLCRRPSSSRWWCGCCSAGFSSSCTPMSA

SEQ ID NO: 40882 - protein, 144 aa, Artificial Sequence
  Synthetic polypeptide
ISWARWCMPVIAATQEAEVPEGVQDGAVPPVFTAQVRAAPAVHLLPLALPQPAAPQAPPQARRHLQLQPRRVLLQVQRSHRRVPRRRRVSLPAPDDGGHRTQVPPALLQNRNLHPRDRRTWPLREEWAALCLRARPPGPAAARV

SEQ ID NO: 40883 - protein, 151 aa, Artificial Sequence
  Synthetic polypeptide
ISWARWCMPVIAATQEAEVPEGVQDGAVPPVFTAQVRAAPAVHLLPLALPQPAAPQAPPQARRHLQLQPRRVLLQVQRSHRRVPRRRRVTSRRPLSSVGTPSGACPRGCPHCAPFPSPVVLARSLGTSRQCRSTGLVHTSWGDHMGHGPPR
